United States Patent Application Publication US 2026/0191920 A1 - sequence listing, part 18

SEQ ID NO: 80690 - protein, 378 aa, Salimicrobium halophilum
  REGION 1..378: note = tr|A0A1G8TIL2|A0A1G8TIL2_9BACI Epoxyqueuosine reductase OS=Salimicrobium halophilum OX=86666 GN=queG; PE = 3 SV=1
MLDVHQLKEDIIAYSKDIGIDKIGFASADVFGELKSRLIRQEQLGYQSGFEKGSVEERTEPERLLPTSQSIISIALAYPSKMKNPPKNEKGARRGQFARASWGEDYHTVLREKLQLLGTFLQEKVPDVDLKWMVDTGELSDRAVAERAGIGFSGKNCAIITPEYGSYVYLGELVTNVPFVPDEPIQDGCGDCNICVDACPTDALVQGGQLDANRCIAFLTQTKGFLEEEYRTKIGNRLYGCDTCQTVCPINRKKDFHNHEDFEPDPEKVKPKLRPLLRISNREFKERFGRMAGSWRGKKPIQRNAILALGHYKEVEAVDDLIFLMENDPRPVIRGTAAYSLGKIGTSRCYEAITEALDKEKEEEVKEEMEKGLAFQVS

SEQ ID NO: 80691 - protein, 377 aa, unidentified
  source 1..377: note = Salimicrobium jeotgali
  REGION 1..377: note = tr|K2GJK1|K2GJK1_9BACI Epoxyqueuosine reductase; OS = Salimicrobium jeotgali OX=1230341 GN=queG PE=3 SV=1
MDAEQLKRETIAYSKEIGIDKIGFASADVFGELKSRLIRQEQLGYHSGFEKGSPEERTEPERLLPSSQSIISIALAYPSKMENPPKNEKGARRGQFARASWGEDYHTVLREKLQLLGSFLREKVPEVELKLMVDTGELSDRAVAERAGIGFSGKNCAIITPEFGSYVYLGELVTNLPFAPDEPIQEGCGDCNICVDSCPTDALVQGGQLNANRCIAFLTQTKGFLEDEYRTKIGNRVYGCDTCQTVCPFNRKKDFHLHEEFEPDPEKVKPVLRPILRISNREFKEKFGRMAGSWRGKKPIQRNAILALGHYREIEAVEDLVHLMKNDPRPVIRGTAAYSLGKIGTPECFEELEMARGDETDEKVKEEMEKGLAFQMN

SEQ ID NO: 80692 - protein, 377 aa, Salimicrobium salexigens
  REGION 1..377: note = tr|A0A1N7J4H3|A0A1N7J4H3_9BACI Epoxyqueuosine reductase OS=Salimicrobium salexigens OX=908941 GN=queG; PE = 3 SV=1
MDAEQLKRETIAYSKEIGIDKIGFASADVFGELKSRLIRQEQLGYHSGFEKGSPEERTEPERLLPSSQSIISIALAYPSKMENPPKNEKGARRGQFARASWGEDYHTVLREKLQLLGSFLREKVPEVELKLMVDTGELSDRAVAERAGIGFSGKNCAIITPEFGSYVYLGELVTNLPFAPDEPIQEGCGDCNICVDSCPTDALVQGGQLNANRCIAFLTQTKGFLEDEYRTKIGNRVYGCDTCQTVCPFNRKKDFHLHEEFEPDPEKVKPVLRPILRISNREFKEKFGRMAGSWRGKKPIQRNAILALGHYREIEAVEDLVYLMKNDPRPVIRGTAAYSLGKIGTPECFEELEVARGDETDEKVKEEMEKGLAFQVN

SEQ ID NO: 80693 - protein, 377 aa, Salimicrobium sp.
  REGION 1..377: note = tr|A0A2A3A7E7|A0A2A3A7E7_9BACI tRNA epoxyqueuosine(34) reductase QueG OS=Salimicrobium sp. WN024 OX=2029857 GN=queG PE=4 SV=1
MDAEQLKKETIAYSKEIGIDKIGFASADVFGELKSRLIRQEQLGYHSGFEKGSPEERTEPERLLPSSQSIISIALAYPSKMENPPKNEKGARRGQFARASWGEDYHTVLREKLQLLGSFLREKVPEVELKLMVDTGELSDRAVAERAGIGFSGKNCAIITPEFGSYVYLGELVTNLPFAPDEPIQEGCGDCNICVDSCPTDALVQGGQLNAGRCIAFLTQTKGFLEDEYRTKIGNRVYGCDTCQTVCPFNRKKDFHLHEEFEPDPEKVKPVLRPILRISNREFKEKFGRMAGSWRGKKPIQRNAILALGHYRETEAVEDLVYLMKNDPRPVIRGTAAYSLGKIGTPECFEELEVARGHETDEKVKEEMEKGLAFQMN

SEQ ID NO: 80694 - protein, 330 aa, unidentified
  source 1..330: note = Salinarimonadaceae bacterium
  REGION 1..330: note = tr|A0A0P7Y3T3|A0A0P7Y3T3_9RHIZ Epoxyqueuosine reductase QueG OS=Salinarimonadaceae bacterium HL-109; OX = 1653334 GN=queG PE=4 SV=1
MDWMAETAPRRADPKTLWPEVRSIILLGMNYGPDCDPLEDLDKRDRATISVYARNRDYHDVIKGRLKELAGFLVARAGGDVKVFVDTAPVMEKPLAEAAGLGWQGKHTVLVSREFGSWLFLGAIFTTAELPPDAPESDHCGSCRRCLDICPTNAFPAPYQLDARRCISYLTIEHKGHIDRDLRPGIGNRIFGCDDCLAVCPWNKFAQDAREAKLRQREDLARLPLAELASLDDTAFRARFAGTPIKRTGRDRFLRNVLIAIGNSGMPALAQPARERLGDDSPLVRAMAIWALSRLLPRADFIALAARYIDGESDAAVQAEWRMGCEEKTV

SEQ ID NO: 80695 - protein, 381 aa, Salinarimonas sp.
  REGION 1..381: note = tr|A0A5B2VVW0|A0A5B2VVW0_9RHIZ Epoxyqueuosine reductase OS=Salinarimonas sp. BN140002 OX=1638099 GN=queG; PE = 3 SV=1
MTGAGLKALLQERARALGFDACRIASPDAIPEARERLDAWLAAGHHGTMAWMSENVDRRADPRALWAEVRSVVLLAVNYGPETDPLATLSRPERASISVYARNRDYHEVIKGRLKELAGVLASRAGADVKVFVDTAPVMEKPLAQAAGLGWQGKHTVLVSRDYGNWLFLGAIFTTAELPVDGPAEESCGSCRRCLDVCPTNAFPAPFRLDARRCVSYLTIEHKGHIDPALRAGIGNRVFGCDDCLAVCPWNKFAKAGREAKLRQRDDLAALPLAELAALDDAAFRARFAGTPVKRTGRDRFVRNVLIAIGNSGEPVLAAAAEPRLDDASPLVRAMAVWACGRLLTREHAADLARARLPAETDPDVRGEWAALGLAPIEETA

SEQ ID NO: 80696 - protein, 379 aa, Salinibacillus kushneri
  REGION 1..379: note = tr|A0A1I0AL41|A0A1I0AL41_9BACI Epoxyqueuosine reductase OS=Salinibacillus kushneri OX=237682; GN = SAMN05421676_102191 PE=4 SV=1
MYDELKQDVMKQSKGIGIDKIGFASVDVFTTLKERLKVQQENQYQSGFEKGTIEERTTPRKLMPEAQSIISIALAYPSKLENAPRSTKGDRRGQFCRASWGTDYHHILREKLEQLGEYLKEKHPDTQYKIMVDTGELSDKEVAVRAGIGFTGKNTVLITPEFGSYVYLGEMITNIPFEPDQPLEEDCGNCNLCVDTCPTGALIQGGQLNAQKCIAFLTQTKDFLPDDYRKKIGNRLYGCDTCQVVCPRNKGKNFHLHEEMEPDPEVVKPRLKPLLRISNREFKETFGPMAGSWRGKKPIQRNAIIALANYKDETAVDELIDVMKHDPRLVIRGTAAWALGKIGSESGKTAILEAKEKETDESVLAEMEKGLEFFTAPLS

SEQ ID NO: 80697 - protein, 327 aa, Salinibacter sp.
  REGION 1..327: note = tr|A0A2P6C1F9|A0A2P6C1F9_9BACT Epoxyqueuosine reductase OS=Salinibacter sp. 10B OX=1923971 GN=queG PE=3; SV = 1
MPGFDATSQERLAQATKLEATRLGFDACGISKAEPLDEEAIRLEQWLLEGRHGTMDWMERNFDKRIDPTKLVDGAESVISVLHNYYQPTDHPDDPEVGKISRYAWGTDYHEVMKEKLYLLYQWLQEAVDAEINGRAFVDSAPVMDKAWAKRSGLGWQGKHSNVLNRETGSFFFLGELIVSVPMDTDDPMADYCGSCTRCIDACPTDAIYEPYAVDANRCISYLTIEHGPDDVPDGLQPDVGNWLFGCDICQDVCPWNKFSQPTDEERYLPREGVTDTALEDWAEMNLDEFERRFEASPVKRATFDGFKRNVRNAIQNALNRRADDSS

SEQ ID NO: 80698 - protein, 377 aa, Salinicoccus alkaliphilus
  REGION 1..377: note = tr|A0A1M7A668|A0A1M7A668_9STAP Epoxyqueuosine reductase OS=Salinicoccus alkaliphilus DSM 16010; OX = 1123231 GN=SAMN02745189_00040 PE=4 SV=1
MDRNEFKQKVIDYAHSIGIDDIGFTHAEPFLEYKAKLIDYLDKGYASGFEKGSVEERTNPKASLPGAKSIIAIAVGYPNKLPDAPKGRKGSRRGMFARASWGMDYHELLNRRLDKLEAYIKSIDPGIETKSMVDTGVLSDREVARRSGLGYIGKNGFVINPELGTYTYLGEMIVSYPFPPDEELIDSCGDCNICVDRCPTGALVGNGQLDSNKCISFLTQIKGWMPDEYRHKIGNRLYGCDTCQQVCPRNKGINTDHHEDIVLEPEILKPELEPLLEISNREFKEKYGHLAGVWRGKKPIQRNAIIALAHFKEESAVDTLKRVAENDPRPVIKGTAYWAIGQIQGSDAAGYIHERYPHEQDAEVKEEMLKGIQEVSH

SEQ ID NO: 80699 - protein, 376 aa, Salinicoccus halodurans
  REGION 1..376: note = tr|A0A0F7HLG0|A0A0F7HLG0_9STAP Iron-sulfur cluster-binding protein OS=Salinicoccus halodurans; OX = 407035 GN=AAT16_09615 PE=4 SV=1
MERSEFKQKVIDYAHSIGIDEIGFTHSEPFLEFREKLIDYHKKGYASGFEKGSVEERTEPKRSLESANSIISIAVGYPNKLPDAPKSRKGARRGLFARASWGVDYHTLLNDRLDKLEQFIKSLDPDIETKSMVDTGVLSDREVARRSGLGYIGKNGFMINPNLGTYSYLGEMITSYPFPPDEELIDSCGDCNLCVDRCPTGALVGNGQLDSQKCISFLTQTKGFLPDEYRSKIGNRLYGCDTCQQVCPRNKGINTDHHEDIVLEPEILKPELTSLLEISNRDFKETYGHLAGVWRGKKPIQRNAIIALAHFKEVDSAEVLKRVAENDARPVIKGTAYWAIGRILENDALEYINERYKIETDEQVKEEMLKGIQEAV

SEQ ID NO: 80700 - protein, 377 aa, unidentified
  source 1..377: note = Salinicoccus kekensis
  REGION 1..377: note = tr|A0A285UCC4|A0A285UCC4_9STAP Epoxyqueuosine reductase OS=Salinicoccus kekensis OX=714307; GN = SAMN05878391_0930 PE=4 SV=1
MDRREFKQKVIDYAHSIGIDDIGFTHAEPFLEYKAKLIDYLDKGYASGFEKGSVEERTNPKASLPSAKSIIAIAVGYPNKLPDAPKGRKGSRRGMFARASWGMDYHELLNRRLDKLEAYIKSIDPGIETKSMVDTGVLSDREVARRSGLGYIGKNGFVINPELGTYTYLGEMIVSYPFPPDEELIDSCGDCNICVDRCPTGALVGNGQLDSNKCISFLTQIKGWMPDEYRYKIGNRLYGCDTCQQVCPRNKGINTDHHEDIVLEPEILKPELEPLLEISNREFKEKYGHLAGVWRGKKPIQRNAIIALAHFKEESAVDTLKRVAENDPRPVIKGTAYWAIGQIQGSDAAGYIHERYPHEQDAEVKAEMLKGIQETSQ

SEQ ID NO: 80701 - protein, 377 aa, Salinicoccus qingdaonensis
  REGION 1..377: note = tr|A0A1G9HSS6|A0A1G9HSS6_9STAP Epoxyqueuosine reductase OS=Salinicoccus qingdaonensis OX=576118; GN = SAMN05216216_12612 PE=4 SV=1
MDRYEFKQKVIDYAHSIGIDEIGFTHAEPFVEYKAKLMDYLDKGFASGFEKGSVEERTNPKASLPNAQSIIAIAVGYPNKLPDAPKGRKGSRRGIFARASWGMDYHTLLNRRLNKLEAYIKSLNPDVETKSMVDTGVLSDREVARRSGLGFIGKNGFVINPELGTYSYLGEMIVSYPFAPDEELIDSCGDCNICVDRCPTGALVGNGQLDSNKCISFLTQIKGSMPDEYRFKIGNRLYGCDTCQQVCPRNKGINTDHHEDIVLEPEILKPELEPLLEISNRDFQDKYGHLAGVWRGKKPIQRNAIIALAHFKEESSIDTLKRVAENDPRPMIKGTAYWAIGQIQGSEAAPYINERYPVEQDTEVREEMLKGIQEVSH

SEQ ID NO: 80702 - protein, 376 aa, Salinicoccus roseus
  REGION 1..376: note = tr|A0A3N4THU9|A0A3N4THU9_9STAP Epoxyqueuosine reductase OS=Salinicoccus roseus OX=45670 GN=EDC33_0035; PE = 4 SV=1
MERSEFKKKVVDYAHSIGIDQIGFTHAEPFTEFREKLIDYHRRGYASGFEKGSVDERTEPRLSLGSARSIISIAVGYPNRLPDAPKSRKGERRGMFARASWGVDYHTLLNRRLARLEDYIKSLDPSIECRSMVDTGVLSDREVARRSGLGYIGKNGFVINPELGTYSYLGEMITSYPFPPDEELIDSCGDCNLCVDRCPTGALVGNGQLDSQKCISFLTQTKGFLPDEYRGKIGNRLYGCDTCQQVCPRNKGINTDHHADIVLEPEILKPELTGLLEISNRDFKETYGHLAGVWRGKKPIQRNAIIALAHFREESAVDTLKRVAENDPRPVIKGTAYWAIGRILGDRALDYISERYKMETDEAVRDEMLKGVQEVA

SEQ ID NO: 80703 - protein, 376 aa, Salinicoccus roseus
  REGION 1..376: note = tr|A0A265E809|A0A265E809_9STAP tRNA epoxyqueuosine(34) reductase QueG OS=Salinicoccus roseus; OX = 45670 GN=queG PE=4 SV=1
MERSEFKKKVVDYAHSIGIDQIGFTHAEPFTEFREKLIDYHRRGYASGFEKGSVDERTEPRLSLGSARSIISIAVGYPNRLPDAPKSRKGERRGMFARASWGVDYHTLLNRRLARLEDYIKSLDPSIECRSMVDTGVLSDREVARRSGLGYIGKNGFVINPELGTYSYLGEMITSYPFPPDEELIDSCGDCNLCVDRCPTGALVGNGQLDSKKCISFLTQTKGFLPDEYRGKIGNRLYGCDTCQQVCPRNKGINTDHHADIVLEPEILKPELTGLLEISNKDFKETYGHLAGVWRGKKPIQRNAIIALAHFREESAVDTLKRVAENDPRPVIKGTAYWAIGRILGDRALDYISERYKMETDEAVRDEMLKGVQEVA

SEQ ID NO: 80704 - protein, 376 aa, unidentified
  source 1..376: note = Salinicoccus sediminis
  REGION 1..376: note = tr|A0A0M2SMI8|A0A0M2SMI8_9STAP Iron-sulfur cluster-binding protein OS=Salinicoccus sediminis; OX = 1432562 GN=WN59_03535 PE=4 SV=1
MERSEFKQKVIDYARSIGIDEIGFTHAEPFLEFKEKLIDYHKRGYASGFEKGSVGERTEPRRSLGSAKSIISIAVGYPNRLPDAPKSRKGERRGLFARASWGMDYHTLLNNRLEKLEEYIKSLDPDVKTRSMVDTGVLSDREVARRSGLGYIGKNGFMINPKLGTYSYLGEMITSYPFPPDEELIDSCGDCNLCVDRCPTGALTGTGQLDSQKCISFLTQTKGFLPEEYRGKIGNRLYGCDTCQQVCPRNKGINTDHHEDIVLEPEILKPELTGLLEISNRDFKETYGHLAGVWRGKKPIQRNAIIALAHFKEKESVEVLKRVAENDQRPVIKGTAYWAIGRIMGNDALEYINERFQIETDGQVKEEMLNGIQEAV

SEQ ID NO: 80705 - protein, 376 aa, Salinicoccus sp.
  REGION 1..376: note = tr|A0A558AZX2|A0A558AZX2_9STAP tRNA epoxyqueuosine(34) reductase QueG OS=Salinicoccus sp. CT19; OX = 2493691 GN=queG PE=4 SV=1
MNRHEFKQKVIDYAHSIGIDEIGFTHAEPFHELREKLIDYHAKGYASGFEKGTIDERTDPKLSLSSAESIISIAVGYPNRLPDAPKSRKGERRGLFARASWGVDYHTLLNRRLEKLEAYIKSLDPDIETKSMVDTGVMSDREVARRSGLGYIGKNGFVINPELGTYSYLGEMLTSYPFPPDEELIDSCGDCNLCVDRCPTGALVGNGQLNSQKCISFLTQTKGFLPDEYRGKIGNRLYGCDTCQQVCPRNKGINTDHHDDIVLEPEILKPELAGLLEISNREFKETYGHLAGVWRGKKPIQRNAIIALAHFKETSAVDLLKRVAENDPRPVIKGTAYWAVGQIEGDRALDYINERFRMETDEAVRDEMLKGIQEVV

SEQ ID NO: 80706 - protein, 363 aa, Salinicola socius
  REGION 1..363: note = tr|A0A1Q8SSK6|A0A1Q8SSK6_9GAMM Epoxyqueuosine reductase OS=Salinicola socius OX=404433 GN=queG PE=3 SV=1
MSQPSSIDLNALASRIKQWGRELGFQAIGITDTDLSSHERYLQRWLEAGHHGEMHYMAKHGSKRTRPQELVPGTLRVISARMDYLPPEVETTRILGQPEKAYVSRYALGRDYHKLIRKRLDQLARQIEDEVGQIGYRAFVDSAPVMERALAQKAGLGWFGKNAMLLNPQAGSLFFLGELYTDLPLPVDPPFEREHCGSCSSCQTACPTNAIIDDKVIDARRCISYLTIELHGSIPTEFRRAMGNRVYGCDDCQLFCPFTRFTRASTEPDFAPRHDLDRAELIDLFAWSETEFLKRTEGSPIRRIGYERWLRNLAIGLGNAPWSERVESALRARLAYPSDLVREHVRWALEEQRTRREARIAST

SEQ ID NO: 80707 - protein, 363 aa, Salinicola sp.
  REGION 1..363: note = tr|A0A2D8NXE3|A0A2D8NXE3_9GAMM Epoxyqueuosine reductase OS=Salinicola sp. OX=1978524 GN=queG PE=3 SV=1
MSQRSSVDFNDLASRVKQWGRELGFQAIGITDTDLQTHERYLQRWLAAGHHGEMHYMARHGSKRTRPQQLVPGTLRVISARMDYLPPEVETTRTLGQPHKAYVSRYALGRDYHKLIRKRLDQLARKIENEVGQIGYRAFVDSAPVMERALAQKAGLGWFGKNAMLLDPQAGSLFFLGELYTDLPLPVDPPFEREHCGSCSSCQTACPTDAIIDDKVIDARRCISYLTIELHGNIPLEFRRAMGNRVYGCDDCQLFCPFTRFTRASAEPDFAPRHELDRAELIDLFAWGESEFLKRTEGSPIRRIGYERWLRNLAIGLGNAPWSERVEHALRARLAYPSDLVREHVRWALEEQRIKREARIASA

SEQ ID NO: 80708 - protein, 363 aa, Salinicola sp.
  REGION 1..363: note = tr|A0A1S2DB18|A0A1S2DB18_9GAMM Epoxyqueuosine reductase OS=Salinicola sp. MIT1003 OX=1882734 GN=queG; PE = 3 SV=1
MSQPSSIDFDELASCIKQWGRELGFQAIGITDTDLQTHERYLQRWLDAGHHGEMHYMAKHGSKRTRPQELVPRTLRVISARMDYLPPEVETTRILGQPQKAYVSRYALGRDYHKLIRKRLDQLARRIEDEVGPIGYRAFVDSAPVMERALAQKAGLGWFGKNAMLLNPQAGSLFFLGELYTDLPLPVDPPFEREHCGSCSSCQTACPTDAIIDDKVIDARRCISYLTIELHGSIPLEFRRAMGNRVYGCDDCQLFCPFTRFTRASAEPDFAPRHDLDRAELIELFAWSETEFLKRTEGSPIRRIGYERWLRNLAIGLGNAPWSERVESALRARLAYPSDLVREHVRWALEEQRRKREARIASA

SEQ ID NO: 80709 - protein, 346 aa, Salinihabitans flavidus
  REGION 1..346: note = tr|A0A1H8QZZ9|A0A1H8QZZ9_9RHOB Epoxyqueuosine reductase OS=Salinihabitans flavidus OX=569882 GN=queG; PE = 3 SV=1
MSADFKARLIAEAEAIGFDRVRLCRPDAVGHVAADLAGFLDKGYHGQMSWLERRSEWRGDPSALWPEARTVIMLGESYTPEHDPREILSQSDKGAISVYAQNRDYHDTVKKRLKRLARWLIAQEGGEVKVFVDTAPVPEKPLGEASGLGWQGKHTNLVSRELGSWFFIGSVFTTLELPVDAPEVDHCGSCRACLDICPTGAFPAPYKIDARRCISYLTIEHHGPVDPELRPLMGNRIYGCDDCLAACPWNKFAVEAREIRYHARGDLLAPDLEELAALDDAGFRAFFSGSPIKRIGRDRFVRNVLYAIGNSGQPRFLPRARALCADEDATVRDAAEWAVKRLEDAG

SEQ ID NO: 80710 - protein, 299 aa, Salinimicrobium catena
  REGION 1..299: note = tr|A0A1H5H8F5|A0A1H5H8F5_9FLAO Epoxyqueuosine reductase OS=Salinimicrobium catena OX=390640 GN=queG PE=3; SV = 1
MIKAEAKSLGFLSCGISKAEFLEEEAPRLENYLKKNMHGEMKYMENHFDKRLDPTKLVEGSKSVISLLLNYYPEERQREDSYKISKYAYGTDYHFVIKDKLKDLLRFIQEEIGEVEGRAFVDSAPVLDKAWAAKSGLGWIGKNSNLLSKQTGSFFFVAELIVDLDLEYDTPVTDHCGSCTACIDACPTNAIIEPYKVDGSKCISYFTIELKDQLPQEMKGKFDEWMFGCDVCQDVCPWNRFSKPHNEPLFDPHPDLLSMSKKDWEEITEDTFRKVFKKSAVKRTKFSGLTRNIDFLKED

SEQ ID NO: 80711 - protein, 308 aa, unidentified
  source 1..308: note = Salinimicrobium sediminis
  REGION 1..308: note = tr|A0A285X0S1|A0A285X0S1_9FLAO Epoxyqueuosine reductase OS=Salinimicrobium sediminis OX=1343891 GN=queG; PE = 3 SV=1
MDKKCQYSQLIKAEANRLGFLSCGISKAEFLEEEAPRLEEYLKKQRHGKMSFLENYFDKRLDPTKLVEGSKSVISLLLNYYPEETQREDTYKISKYAYGTDYHFVIKDKLKSLLEFIQQEIGEVEGRAFVDSAPVMDKAWAAKAGLGWVGKHTLLLSKQKGSFFFVAELIVDLELEYDTPVTDHCGSCTACIDACPTNAIVEPYKVDGSKCISYFTIELKDELPQEMKGKFEDWAFGCDICQDVCPWNRFSKPHNEPLFNPHPELLSMSKKDWEEITEETFRKVFKKSAVKRTKYSGLTRNISFLKEE

SEQ ID NO: 80712 - protein, 396 aa, unidentified
  source 1..396: note = Salinimonas sediminis
  REGION 1..396: note = tr|A0A346NR63|A0A346NR63_9ALTE Epoxyqueuosine reductase OS=Salinimonas sediminis OX=2303538 GN=queG PE=3; SV = 1
MSVSSISSVDLVKLTDDIKAWGQALGFQQVGISDIDLKQHEAALQQWLDNGYHGQMNYMEDRGMMRARPAELVPGTVRVISVRMDYLPPDASFARHLKDNHIAYISRYALGRDYHKVLRKRLKQLGEKITAALADTQYRPFVDSAPVLEHAIAEKAGLGWTGKHSLTLNRQAGSWFFLGELFINLPLPVDQPVEEGCGSCNACITMCPTGAIVAPYQVDARKCISYLTIEYDGVIPLALRPLMGNRIYGCDDCQLVCPWNRFASVTTETDFQPRKMLHGQSLLTLFEWDEAQFLRYTEGSPIRRIGYQKWQRNLAVALGNARPSLIILSALQKALPHAAALVATHLEWAIECQQEGLQEAGSGPPETATAVAKTAPQQRKTARLTRVIEKGLPRDA

SEQ ID NO: 80713 - protein, 379 aa, Salinimonas sp.
  REGION 1..379: note = tr|A0A5B7Y9E5|A0A5B7Y9E5_9ALTE Epoxyqueuosine reductase OS=Salinimonas sp. KX18D6 OX=2572577 GN=queG; PE = 3 SV=1
MSGIHSIDLGRLADDIKAWGRALGFQQVGISDIDLSKHEAHLQQWLDNGYHGEMDYMAAHGMKRARPAELLPGTLRVISVRMDYLPPDASFATHLRNDQVGYISRYALGRDYHKVLRKKLKQLGQKITETFSDTQFRPFVDSAPVLEHAIAEKAGLGWTGKHSLTLNRDAGSWFFLGELFVNLPLPTDSPVEEGCGTCNACITMCPTGAIVAPYQVDARKCISYLTIEHDGLIPESLRPLMGNRIYGCDDCQLVCPYNRFADITEQEDFHPRKVLHGQSLVTLFNWDEDTFLKNTEGSPIRRIGHAKWQRNIAVAMGNAKYDADIVKALEAARPVADALVKPHIEWALSRQKESASHQNDNRQLARLTRVVEKGLPRDA

SEQ ID NO: 80714 - protein, 353 aa, unidentified
  source 1..353: note = Saliniradius amylolyticus
  REGION 1..353: note = tr|A0A2S2E6N3|A0A2S2E6N3_9ALTE Epoxyqueuosine reductase OS=Saliniradius amylolyticus OX=2183582 GN=queG; PE = 3 SV=1
MGISDVDLSQHEAHLQAWLDRQMHGEMDYMAAHGMKRARPAELEPGTVRVVSVRMNYLPPDASFARTLKDPQKGYVSRYAVGRDYHKLLRKRLKQLGQKIQQHCEALNFRPFVDSAPVLEHAIAEKAGIGWTGKHSLTLSKDAGSWFFLGELFISLPLPVDQPVEEACGNCTACLTACPTGAIVEPYVVDARKCISYLTIELKGAIPEQYRPLLGNRIYGCDDCQLICPWNRYGQLTDEGDFHPRQNLHQQELLDLFAWDEETFLSKTQGSPIRRIGHESWQRNIAVALGNASYSIDITEALEQARPRSSELVREHIDWALAQQERRRYQATPVSRQQQRLIRSIEKGLPRDA

SEQ ID NO: 80715 - protein, 392 aa, unidentified
  source 1..392: note = Salinispira pacifica
  REGION 1..392: note = tr|V5WKB3|V5WKB3_9SPIO Epoxyqueuosine (OQ) reductase QueG OS=Salinispira pacifica OX=1307761 GN=L21SP2_2265; PE = 4 SV=1
MSDTGGKNQSNTVNRISDNERLGELIREQGIQYWGVCDADDGPQDLKAAAARDYQHWIAEGRHGSMQFLEVHEPMKFEPSAILPGTRSIISLALGYFPGRKRSRRKIDSAAAEEAAGEGGSAEGISAEGGRISLYARGRDYHKEFGRRIKKIAAALSTEYPGHNFRAFTDTAPLHERFYAEKAGMTFTGRNTLSLHRELGSYFFLGEILSTRRFVPTDVQPEARSHCPSGCTRCVDVCPTAALEAPYRINASTCISYLTIEHKGMIDPGLMEKMGTWIFGCDLCQDVCPFNIRAKITDVENFLNPITAGDVELKSILELKDHEEFTAMFAGTPVMRAGRVGMIRNAIIAAANGGRTDLLPLILERCSDGDEIISGTAKWAAARLTDGAAGKI

SEQ ID NO: 80716 - protein, 384 aa, unidentified
  source 1..384: note = Salinivibrio kushneri
  REGION 1..384: note = tr|A0A4P8H747|A0A4P8H747_9GAMM Epoxyqueuosine reductase OS=Salinivibrio kushneri OX=1908198 GN=queG PE=3; SV = 1
MSQPKSDASIDFDHLAQRIKQWGQALGFQQVGITDVDLKQHEAQLQRWLDNGYHGEMAWMARHGMMRARPDELVPGTVRVISVRMNYLPPNAGFAHTLAHPELGYISRYSLGRDYHKLIRNRLKKLGQQIEQAVGPYGYRPFVDSAPVLERPLAEKAGLGWTGKHSLILNDETGSWFFLGELLVDLPLPVDTPVENQCGKCVACMTSCPTQAIIAEGVVDARRCISYLTIEYDGVIPLEFRHAIGNRIYGCDDCQLVCPFNREAELTLEADFHCRPSLDQQPLTTLFNWDEDTFLSLTQGSAVRRIGIKKWRRNLAIAMGNAPFDQAIIDSLKARLGEDELVDEHIHWALSEQEKKRQRIDVKTLPTGTRRLVRIIEKGLPRDA

SEQ ID NO: 80717 - protein, 384 aa, unidentified
  source 1..384: note = Salinivibrio kushneri
  REGION 1..384: note = tr|A0A1V3GK66|A0A1V3GK66_9GAMM Epoxyqueuosine reductase OS=Salinivibrio kushneri OX=1908198 GN=queG PE=3; SV = 1
MSQPKSDASIDFDHLAQRIKQWGQALGFQQVGITDVDLKQHEAQLQRWLDNGYHGEMAWMARHGMMRARPYELVPGTVRVISVRMNYLPPNAGFAHTLAHPELGYISRYSLGRDYHKLIRNRLKKLGQQIEQAVGPYGYRPFVDSAPVLERPLAEKAGLGWTGKHSLILNDETGSWFFLGELLVDLPLPVDTPVENQCGKCVACMTSCPTQAIIAEGVVDARRCISYLTIEYDGVIPLEFRHAIGNRIYGCDDCQLVCPFNREAELTLEADFHCRPSLDQQPLTTLFNWDEDTFLSLTQGSAVRRIGIKKWRRNLAIAMGNAPFEQAIIDSLKARLGEDELVDEHIHWALSEQEKKRQRIDVKTLPTGTRRLVRIIEKGLPRDA

SEQ ID NO: 80718 - protein, 384 aa, Salinivibrio sharmensis
  REGION 1..384: note = tr|A0A1V3GYZ0|A0A1V3GYZ0_9GAMM Epoxyqueuosine reductase OS=Salinivibrio sharmensis OX=390883 GN=queG; PE = 3 SV=1
MSQPKSDASIDFDHLAQRIKQWGQALGFQQVGITDVDLKQHEAQLQRWLDNGYHGEMEWMARHGMMRARPDELVPGTVRVISVRMNYLPPNAGFAHTLAHPELGYISRYSLGRDYHKLIRNRLKKLGQQIEQAVGPYGYRPFVDSAPVLERPLAEKAGLGWTGKHSLILNDETGSWFFLGELLVDLPLPVDTPVENQCGKCVACMTSCPTQAIVADGVVDARRCISYLTIEYDGVIPLEFRHAIGNRIYGCDDCQLVCPFNREAELTLEADFHCRPSLDQQPLTTLFNWDEDTFLSLTQGSAVRRIGIKKWRRNLAIAMGNAPFNQDIIDSLKARLGEDELVDEHIHWALSEQEKKRQRIDVKTLPTGTRRLVRIIEKGLPRDA

SEQ ID NO: 80719 - protein, 384 aa, Salinivibrio sp.
  REGION 1..384: note = tr|A0A1N6I1Z4|A0A1N6I1Z4_9GAMM Epoxyqueuosine reductase OS=Salinivibrio sp. ES.052 OX=1882823 GN=queG; PE = 3 SV=1
MSQPTPDASIDFDQLAQRIKQWGQALGFQHVGITDVDLKQHEAQLQRWIDNGYHGEMDWMERHGMMRARPHELLPGTVRVISVRMNYLPPEAGFAKTLANPKLGYVSRYSLGRDYHKLIRNRLKKLGQQIEAEVGPYGYRPFVDSAPILERPLAEKAGLGWTGKHSLILNEDTGSWFFLGELLVDLPLPIDTPVDNQCGKCVACMTSCPTQAIVAEGVVDARRCISYLTIEYDGVIPMEFRHAIGNRIYGCDDCQLVCPFNREAEITLESDFQCRPSLEQQSLTTLFDWDEDTFLSLTQGSAIRRIGIKKWRRNLAIAMGNAPYDENIVTSLKARQGEDALVDEHIEWALKEQKNKQQRINIEPLPTGTRRLVRIIEKGLPRDA

SEQ ID NO: 80720 - protein, 384 aa, Salinivibrio sp.
  REGION 1..384: note = tr|A0A2A4GKF8|A0A2A4GKF8_9GAMM Epoxyqueuosine reductase OS=Salinivibrio sp. YCSC6 OX=2003370 GN=queG; PE = 3 SV=1
MSHPTPDASIDFNQLAQRIKQWGQALGFQHVGITDVDLTQHEAQLQRWLDLGYHGEMDWMARHGMMRARPQELVPGTVRVISVRMNYLPPNAGFATTLANPTLGYVSRYSLGRDYHKLIRNRLKKLGQQIEAEVGPFGYRPFVDSAPVLERPLAEKAGLGWTGKHSLILNKETGSWFFLGELLVDLPLPVDTPVENQCGKCVACMTSCPTQAIVAEGVVDARRCISYLTIEYDGVIPLEFRHAIGNRIYGCDDCQLVCPFNRDAELTLEADFHCRPSLEQQPLTTLFNWDEDTFLSLTQGSAIRRIGIRKWRRNLAIAMGNAPYDEDIVNSLSARLGEDALVDEHIQWALGEQEKKRLQIDVQLLPTGTKRLVRIIEKGLPRDA

SEQ ID NO: 80721 - protein, 309 aa, unidentified
  source 1..309: note = Salinivirga cyanobacteriivorans
  REGION 1..309: note = tr|A0A0S2I2S9|A0A0S2I2S9_9BACT Epoxyqueuosine reductase OS=Salinivirga cyanobacteriivorans OX=1307839; GN = queG PE=4 SV=1
MEKYSEDIKNKAIELGFHAAGFVDLSQISRELKKFYDTWLAKDFHGDMAYLKKNAAQRFQPDLLLHNAKSAIVVLAPYNHGKPRLASHYKISRYAVGVDYHFVVKQKLAELLSFIKSIDPKTEGRAFTDTAPVPERFLAAQAGLGFIGKNGMLINPELGSYVFIGELYINATLKYDKPLEGYSCGECTRCMQACPNNAIVAPGEVDSRRCISYKTIEHKGEFEAEANLSKHIFGCDICQNVCPFNKNAPKIGWQEFRGKPEILNLSDEEWKQIGSSKFKKQFGNTVLFRTGLRRLRRNMNRIEKQKPDK

SEQ ID NO: 80722 - protein, 329 aa, unidentified
  source 1..329: note = Salinivirgaceae bacterium
  REGION 1..329: note = tr|A0A2N5ZMX8|A0A2N5ZMX8_9BACT 4Fe-4S ferredoxin-type domain-containing protein; OS = Salinivirgaceae bacterium OX=2053305 GN=C0599_09870; PE = 4 SV=1
MPFQNQHTTQTIDKAIEIGFHAASIVDLTNTDPEFENFYKSWLQKGYHGEMTYMEKNAQQRFKPDMLLENAKSAIVVLASYNHEKPDLKSRYKISRYALGVDYHFILKQKLNTLLEYVKTIDPEINGRAFTDSAPVPERYLAVKSGLGFIGKNGMLINEKIGSMMFIGVLYLDKTINSADVIGRVNSTKEKGKLQYESRELGTSDFSHCTDCDLCMRACPNGAIIEPGIVDSNKCISYKTIEYKGEFADNDRLAGYIFGCDICQQECPYNKDVSITGMAELAPRKEITELTDDDWHQMGSSQFKRLFSDTVLFRTGLKRLRRNIEKNIK

SEQ ID NO: 80723 - protein, 391 aa, unidentified
  source 1..391: note = Salipaludibacillus aurantiacus
  REGION 1..391: note = tr|A0A1H9X8S8|A0A1H9X8S8_9BACI Epoxyqueuosine reductase OS=Salipaludibacillus aurantiacus OX=1601833; GN = queG PE=3 SV=1
MANTQLKKELIAYSKLIGIDKIGFASADPFVTLKSRLEVQQKSGFESGFEKGTIKERTEPDQLLPEAKTIIAIALAYPSKMKEAPKSKKGERRGIFCRASWGEDYHHILRRKLKLLEEFIQKRVPSSRNVSMVDTGELSDRAVAERAGIGWSGKNCAIITPEFGSYVYLGELITTVDIPDDQPLTDQCGTCNKCVDACPTGALVQGGQLDSNKCIAFLTQTKDFLPEQYRKKIGNRLYGCDTCQVVCPENKGKDTHNHPEMEPDPEVVKPKLEPLLTMSNREFKKTFGNISGAWRGKKPIQRNAIIALAHYKEHSALPLLYKLIREDPRPVIRGTAAWAAAEISQDNETLSELKRAKERENDSEAEFEIDNALKKLKMDSNRLGKHEKSSV

SEQ ID NO: 80724 - protein, 383 aa, unidentified
  source 1..383: note = Salipaludibacillus keqinensis
  REGION 1..383: note = tr|A0A323TIH7|A0A323TIH7_9BACI tRNA epoxyqueuosine(34) reductase QueG OS=Salipaludibacillus keqinensis OX=2045207 GN=queG PE=4 SV=1
MANTQLKKDLIAYSKLIGIDKIGFATADPFVTLKSRLKDQQKLAYQSGFEKGTLTERTEPDHLLPEAKTIISIALAYPSKMKNPPKSVKGDRRGIFCRASWGEDYHHILKRKLKLLEEYLQQAEPTARSKSMVDTGELADRAVAERAGIGWSGKNCAIITPEFGSYVYLGEMITTIDLPEDQPMFDQCGTCNKCVDACPTGALIQGGQLDSNKCIAFLTQTKEILPDKYRKKLGNRLYGCDTCQVVCPENKGKDTHHHPEMEPDPEVVKPRLLPILTMSNRDFKETFGQISGSWRGKKPIQRNAIIALAHYKEIESLPTLFNLLHEDPRPVIRGTAAWAVAEISQEEEVLKHLMTAKERERSPEVREEINKSLQKLKVQSGLV

SEQ ID NO: 80725 - protein, 387 aa, unidentified
  source 1..387: note = Salipaludibacillus neizhouensis
  REGION 1..387: note = tr|A0A3A9K2V9|A0A3A9K2V9_9BACI Epoxyqueuosine reductase OS=Salipaludibacillus neizhouensis OX=885475; GN = queG PE=3 SV=1
MMNAQLKNELIAYSKHVGIDKIGFTSADPFVTLKSRLKQQQELGYQSGFEKGSLKERTEPQMLLPEASTIISIALAYPSKMKNAPKSKRGDRRGIFCRASWGEDYHHVLRRKLNLLVEFIEKKVPGSKSTAMVDTGELSDRAVAERAGIGWSAKNCAIITPEFGSYVYLGEMITTVDIPEDQPLLDQCGSCNKCVDACPTDALIQGGQLDSNKCIAFLTQTKGMLPERYRKKIGNRLYGCDTCQVVCPKNKGKDAHNHPEMEPDPETVKPTLIPLLTISNREFKEKYGKMSGSWRGKKPIQRNAIIALGFFKEKEALETLYTLLLEDPRPVIRGTSAWAISQITSSNEAETKLKEAKKKENDLEAEAEIDKALKSQDKERGPLRTER

SEQ ID NO: 80726 - protein, 348 aa, unidentified
  source 1..348: note = Salipiger aestuarii
  REGION 1..348: note = tr|A0A327Y2J9|A0A327Y2J9_9RHOB Epoxyqueuosine reductase OS=Salipiger aestuarii OX=568098 GN=ATI53_102361; PE = 4 SV=1
MSLKQALMDEAIAVGFSACRVCRPGDVPQAAGRLADFLAAGHHGQMGWMAERTGWRGDPTALWPEARSVIMLAENYAPDQDPMQIVGQAERGAISVYAQNRDYHDVVKKKLKRLGRWLIDAAARSGESAPQIKVFVDTAPVMEKPLGQAAGLGWQGKHTNLVSRDLGSWFFLGAIFTTLTLPVDGAGRDACGSCRACLDACPTDAFPVPYRLDARRCISYLTIEHAGPVPEDMRPLLGNRIYGCDDCLAACPWNKFAQQAAEIKYHARPELVGPSLASLAALDDAAFRALFSGSPVKRIGRNRFLRNVCYAIGNSADASLRPSVQALCDDPDAALADAARWAVARLGA

SEQ ID NO: 80727 - protein, 344 aa, unidentified
  source 1..344: note = Salipiger bermudensis
  REGION 1..344: note = tr|Q0FR31|Q0FR31_SALBH Epoxyqueuosine reductase; OS = Salipiger bermudensis (strain DSM 26914 / JCM 13377 / KCTC 12554 / HTCC2601) OX=314265 GN=queG PE=3 SV=1
MKRKLVAEAAEVGFASCKVCRPGDVPQLAERLAAFLEAGRHGQMGWMAERTHWRGDPKALWPEARSVIMLAENYGPGHDPMAVLEQRDRAAISVYAQNRDYHDVVKKRLKRLGRWLIAEAEREGGGAEIKVFVDTAPVMEKPLGQAAGLGWQGKHTNLVSRELGSWFFLGAIFTTLELEPDGAERDHCGSCRACLDVCPTDAFPAPYQLDARRCISYLTIEHHGPVDEALRPGLGNRIYGCDDCLAACPWNKFAVQAQEMKYHARDELLAPELAELAALDDAAFRALFSGSPIKRIGRDRFVRNVCYAIGNSGDPALRSAVQALCEDGCETVRDAARWAVARLS

SEQ ID NO: 80728 - protein, 353 aa, unidentified
  source 1..353: note = Salipiger marinus
  REGION 1..353: note = tr|A0A1G8SA34|A0A1G8SA34_9RHOB Epoxyqueuosine reductase OS=Salipiger marinus OX=555512 GN=queG PE=3 SV=1
MNEQGQHDDLKARLVEEARAVGFSSCRICRPGDVPQVAERLAEFLAAGRHGQMGWMAERTGWRGDPTALWPEARSVIMLAENYGPDHDPRAVLARPERAAVSVYAQNRDYHDVVKKRLKRLGRWLMAAAEAEAPQIKVFVDTAPVMEKPLGQAAGLGWQGKHTNLVSRDLGSWFFLGSIFTTLALPVDGAERDHCGSCRACLDACPTDAFPAPYQLDARRCISYLTIEHAGPVAEDLRPLLGNRIYGCDDCLAACPWNKFAEQAAEIKYHARDDLRAPALADLARLDDAGFRALFSGSPIKRIGRDRFVRNVLYAIGNSGRGDLREVAQGLCADADDTVRDAAHWAVARLAQG

SEQ ID NO: 80729 - protein, 344 aa, Salipiger mucosus
  REGION 1..344: note = tr|S9R4P3|S9R4P3_9RHOB Epoxyqueuosine reductase; OS = Salipiger mucosus DSM 16094 OX=1123237 GN=queG PE=3 SV=1
MQELKDRLVAEAGAVGFSACRVCRPGDVPQVAERLRSFLEAGQHGQMGWMADRAQWRGDPTALWPEARSVIMLAENYGPGHDPLEVLERRERAAISVYAQNRDYHDVVKKRLKRLGRWLIEAAGGAPEIKVFVDTAPVMEKPLGEAAGLGWQGKHTNLVSRELGSWFFLGCIFTTLELPVDGAEADHCGSCRACLEVCPTDAFPAPYRLDARRCISYLTIEHRGPVDEELRGKLGNRIYGCDDCLAVCPWNKFAREASEAKYHARPDLVDPPLEELAQLDDAGFRARFSGSPIKRIGRDRFLRNVLYAIGNSGEGRLRAAAQAHCEDPDPAVADAARWAVARLG

SEQ ID NO: 80730 - protein, 347 aa, unidentified
  source 1..347: note = Salipiger profundus
  REGION 1..347: note = tr|A0A1U7D4S6|A0A1U7D4S6_9RHOB Epoxyqueuosine reductase OS=Salipiger profundus OX=1229727 GN=queG PE=3; SV = 1
MSLKARLVAEAEAVGFSACRVCRPGDTPQVAARLAQFLEAGRHGQMGWMAERTAWRGDPTALWPEARSVIMLAENYGPDHDPLAVLEQHDRAAISVYAQNRDYHDVVKKKLKRLGRWLIAEAERDGPAPEIKVFVDTAPVMEKPLGEAAGLGWQGKHTNLVSRSLGSWFFLGAIFTTLPLAPDEAERDHCGSCRACLDVCPTNAFPAPYQLDARRCISYLTIEHKGPVDEALRPGLGNRIYGCDDCLAVCPWNKFARASREVKYHARPDLLGPPLAELAALDDAGFRARFSGSPIKRIGRDRFVRNVCYAIGNSGDARLRPAVQALCEDVDDAVRDAARWAAARLPA

SEQ ID NO: 80731 - protein, 345 aa, Salipiger sp.
  REGION 1..345: note = tr|A0A4Q3Z337|A0A4Q3Z337_9RHOB Epoxyqueuosine reductase OS=Salipiger sp. IMCC34102 OX=2510647 GN=queG; PE = 3 SV=1
MKDLGARLRAFAQEAGFVKVGICRPDAVPDAGARLGAFVEAGHHGQMAWMGERMAWRGDPRALWPEARSIIMLAESYSPEHDPLEILERRDRAAISVYAQGRDYHDVVKKRLKRVGRWLIEQSPGAEIKVFVDTAPVMEKPLAQAAGLGWQGKHTNLLGRDLGNWVFLGAIFTTLELAPDAPEVEHCGSCRKCLDVCPTNAFPAPFKLDARRCISYLTIEHRGPIPEEFRAALGNRIYGCDDCLAVCPWNKFAVEARDQRLTARDDLRAPALADLAALDDAAFRERFSGSPIKRIGRDRFVRNVAYAIGNSGNPDLAAALAPLRDDSDPAVADAASWALSQLKRI

SEQ ID NO: 80732 - protein, 349 aa, unidentified
  source 1..349: note = Salipiger thiooxidans
  REGION 1..349: note = tr|A0A1G7ECE2|A0A1G7ECE2_9RHOB Epoxyqueuosine reductase OS=Salipiger thiooxidans OX=282683; GN = SAMN04488105_105261 PE=4 SV=1
MSLKERLVAEAGATGFAASRVCRPGDVPQAAGRLAAFLDAGRHGQMGWMAERTAWRGNPAALWPEARSVIMLAENYGPEGDPLAVLEQRDRAAISVYAQNRDYHDVVKKKLKRLGRWLLAAAEKELGLAAEIKVFVDTAPVMEKPLGQAAGLGWQGKHTNLVSREIGSWFFLGAIFTTLELAPDGAERDHCGSCRACLDICPTGAFPAPYQLDARRCISYLTIEHGGPVDEELRPLLGNRIYGCDDCLAVCPWNKFAHRAGEAKYHARPELLAPELSELAGLDDAGFRVLFSGSPIKRIGRDRFVRNVCYAIGNSGDAALRPAAQALCDDPDPALRDAARWAVERLDGV

SEQ ID NO: 80733 - protein, 391 aa, unidentified
  source 1..391: note = Salisediminibacterium haloalkalitolerans
  REGION 1..391: note = tr|A0A1H9TME3|A0A1H9TME3_9BACI Epoxyqueuosine reductase OS=Salisediminibacterium haloalkalitolerans; OX = 1464123 GN=SAMN05444126_11090 PE=4 SV=1
MKNADIKQEIIDFSESIGIDKIGFASADPFVTMKARLADQQANDYQSGFEKGTIEERTEPERLLPEAKSIISIALAYPSKMTSPPRSKKGERRGIFCRASWGEDYHHILRRKLEQLQTFIAERFPDESSTYMVDTGELPDRAVAERAGIGWSGKNCAIITPGFGSYVYLGELITTVDFAADTPLFDQCGTCNKCVDACPTGALIQGGQLDSGKCIAYLTQTKDVLPEQYRKKIGNRLYGCDTCQVVCPENKGVDVHHHPEMEPDPEVVKPLLVPLLTMSNREFKQKFGAISGAWRGKKPIQRNALIALGNFKDETALDAVFDRLENDPRPVIRATAAWAAAEISSEKLTAERIQTALEQEEDETAVTEMTNVLNRLKHETGEKRKSAESKA

SEQ ID NO: 80734 - protein, 381 aa, unidentified
  source 1..381: note = Saliterribacillus persicus
  REGION 1..381: note = tr|A0A368Y430|A0A368Y430_9BACI Epoxyqueuosine reductase OS=Saliterribacillus persicus OX=930114 GN=queG; PE = 3 SV=1
MAAYDDLKQELIKYSEEIGIDKIGFTSADVFSELKARLEIQQEKGYQSGFEKGLIEERTEPVRLLPGAESIVSIALAYPSRMKNPPKSKKGERRGMFARASWGEDYHLVLKEKLNLLATFLSERVEGFSAKIMVDTGELSDRAVAERAGVGFSGKNCAIITPEFGSYVYLGEMIINIPFTPDEPIDDGCGECTKCIDACPTGALVGPGQLNAQQCMAFLTQTKGYMPEEHRDKLGNIIYGYDTCQVVCPYNKGIDSHQHEEFEPDPDLVKPPLIEFLSISNREFKEKFGYMAGSWRGKKPLQRNAILALAHYKEKSAVPALIDVLTQDPRPVLRGTAGWALGKIGTEEAFQALQKAVEKEEDVQALEEINKGLQFFDNNFM

SEQ ID NO: 80735 - protein, 384 aa, unidentified
  source 1..384: note = Salmonella abony
  REGION 1..384: note = tr|A0A5H6T4Q8|A0A5H6T4Q8_SALAB tRNA epoxyqueuosine(34) reductase QueG OS=Salmonella abony; OX = 29482 GN=queG PE=4 SV=1
MLWSIMSKPLDLNQLAQNIKQWGLELGFQQVGITDTDLRASEPALQAWLDKQYHGEMAWMARHGMMRARPHELLPGTLRVISVRMNYLPANAAFASTLKDPTLGYVSRYALGRDYHKLLRSRLKKLGEQIQQYCGSLNFRPFVDSAPILERPLAEKAGLGWTGKHSLILNREAGSFFFLGELLIDLPLPVDQPVEEGCGKCVACMTICPTGAIVEPYTVDARRCISYLTIELEGAIPEAFRPLIGNRIYGCDDCQLICPWNRYSQLTDEADFSPRKALHNPDLLELFSWSEAQFLKVTEGSAIRRIGHLRWLRNVAVALGNAPWSNAVITALESRKGEHPLLDEHIEWAIAQQIEKRNACIIEVQLPKKQRLVRVIEKGLVRDA

SEQ ID NO: 80736 - protein, 384 aa, unidentified
  source 1..384: note = Salmonella agona
  REGION 1..384: note = tr|B5F381|B5F381_SALA4 Epoxyqueuosine reductase; OS = Salmonella agona (strain SL483) OX=454166 GN=queG PE=3; SV = 1
MLWSIMSKPLDLNQLAQNIKQWGLELGFQQVGITDTDLRASEPALQAWLDKQYHGEMAWMARHGMMRARPHELLPGTLRVISVRMNYLPANAAFASTLKDPTLGYVSRYALGRDYHKLLRSRLKKLGEQIQQYCGSLNFRPFVDSAPILERPLAEKAGLGWTGKHSLILNREAGSFFFLGELLIDLPLPVDQPVEEGCGKCVACMTICPTGAIVEPYTVDARRCISYLTIELEGAIPEAFRPLIGNRIYGCDDCQLICPWNRYSQLTDEADFSPRKALHNPDLVELFSWSEAQFLKVTEGSAIRRIGHLRWLRNVAVALGNAPWSNAVITALESRKGEHPLLDEHIEWAIAQQIEKRNACIIEVQLPKKQRLVRVIEKGLVRDA

SEQ ID NO: 80737 - protein, 384 aa, unidentified; identical to SEQ ID NO: 80736
  source 1..384: note = Salmonella anatum
  REGION 1..384: note = tr|A0A2T8MAI9|A0A2T8MAI9_SALAN Epoxyqueuosine reductase OS=Salmonella anatum OX=58712 GN=queG PE=3 SV=1

SEQ ID NO: 80738 - protein, 384 aa, unidentified; identical to SEQ ID NO: 80735
  source 1..384: note = Salmonella anatum
  REGION 1..384: note = tr|A0A3Y5SF25|A0A3Y5SF25_SALAN Epoxyqueuosine reductase OS=Salmonella anatum OX=58712 GN=queG PE=3 SV=1

SEQ ID NO: 80739 - protein, 384 aa, unidentified
  source 1..384: note = Salmonella arizonae
  REGION 1..384: note = tr|A9MFP6|A9MFP6_SALAR Epoxyqueuosine reductase; OS = Salmonella arizonae (strain ATCC BAA-731 / CDC346-86 / RSK2980) OX=41514 GN=queG PE=3 SV=1
MLWSIMSEPLDLNQLAQNIKQWGLELGFQQVGITDTDLSASEPALQAWLDKQYHGEMAWMARHGIMRARPHELLPGTLRVISVRMNYLPANAAFASTLKNPTLGYVSRYALGRDYHKLLRSRLKKLGERIQQHCGSLNFRPFVDSAPILERPLAEKAGLGWTGKHSLILNRDAGSFFFLGELLIDLPLPVDQPIEEGCGKCVACMTICPTGAIVEPYTVDARRCISYLTIELEGAIPVAFRPLIGNRIYGCDDCQLICPWNRYSQLTDEDDFSPRKALRAPELIDLFRWSETQFLKVTEGSAIRRIGHLRWLRNVAVALGNAPWSDAVIAALESRKGEHPLLDEHIEWAVAQQIEKRNACINEVQLPKKQRLVRVIEKGLVRDA

SEQ ID NO: 80740 - protein, 384 aa, unidentified
  source 1..384: note = Salmonella berta
  REGION 1..384: note = tr|A0A3U8PE19|A0A3U8PE19_SALBE Epoxyqueuosine reductase OS=Salmonella berta OX=28142 GN=queG PE=3 SV=1
MLWSIMSKPLDLNQLAQNIKQWGLELGFQQVGITDTDLRASEPALQAWLDKQYHGEMAWMARHGMMRARPHELLPGTLRVISVRMNYLPANAAFASTLKDPTLGYVSRYALGRDYHKLLRSRLKKLGEQIQQYCGSLNFRPFVDSAPILERPLAEKAGLGWTGKHSLILNREAGSFFFLGELLIDLPLPVDQPVEEGCGKCVACMTICPTGAIVEPYTVDARRCISYLTIELEGAIPEAFRPLIGNRIYGCDDCQLICPWNRYSQLTDEADFSPRKALHNPDLVELFSWSEAQFLKVTEGTAIRRIGHLRWLRNVAVALGNAPWSNAVITALESRKGEHPLLDEHIEWAIAQQIEKRNACIIEVQLPKKQRLVRVIEKGLVRDA

SEQ ID NO: 80741 - protein, 384 aa, unidentified; identical to SEQ ID NO: 80735
  source 1..384: note = Salmonella blockley
  REGION 1..384: note = tr|A0A5H8H750|A0A5H8H750_SALBL tRNA epoxyqueuosine(34) reductase QueG OS=Salmonella blockley; OX = 57741 GN=queG PE=4 SV=1

SEQ ID NO: 80742 - protein, 379 aa, Salmonella bongori
  REGION 1..379: note = tr|A0A447MBE8|A0A447MBE8_SALBN Epoxyqueuosine reductase OS=Salmonella bongori OX=54736 GN=yjeS PE=3 SV=1
MSEPLDLNQLAQNIKQWGLELGFQQVGITDTDLSASEPALQAWLAKQYHGEMEWMARHGMMRARPHELLPGTLRVISVRMNYLPANAAFASTLKNPTLGYVSRYALGRDYHKLLRSRLKKLGEQIQQHCGSLNFRPFVDSAPVLERPLAEKAGLGWTGKHSLILNREAGSFFFLGELLLDLPLPIDKPVGEGCGKCVACMTICPTGAIVEPYTVDARRCISYLTIELEGAIPEAFRPLIGNRIYGCDDCQLICPWNRYSQLTNEEDFSPRKPLHAPALIDLFSWSEAQFLKVTEGSAIRRIGHLRWLRNVAVALGNAPWSDAIITALQSRQGEHPLLDEHIEWAIAQQIEKRNACIIEVQLPKKQRLVRVIEKGLPRDA

SEQ ID NO: 80743 - protein, 384 aa, Salmonella bongori
  REGION 1..384: note = tr|A0A248KF92|A0A248KF92_SALBN Epoxyqueuosine reductase OS=Salmonella bongori serovar 66:z41:- str. SA19983605 OX=1243617 GN=queG PE=3 SV=1
MLWSIMSEPLDLNQLAQNIKQWGLELGFQQVGITDTDLSASEPALQAWLAKQYHGEMEWMARHGMMRARPHELLPGTLRVISVRMNYLPANAAFASTLKNPTLGYVSRYALGRDYHKLLRSRLKKLGEQIQQHCGSLNFRPFVDSAPVLERPLAEKAGLGWTGKHSLILNREAGSFFFLGELLLDLPLPIDKPVGEGCGKCVACMTICPTGAIVEPYTVDARRCISYLTIELEGAIPEAFRPLIGNRIYGCDDCQLICPWNRYSQLTNEEDFSPRKPLHAPALIDLFSWSEAQFLKVTEGSAIRRIGHLRWLRNVAVALGNAPWSDAIITALQSRQGEHPLLDEHIEWAIAQQIEKRNACIIEVQLPKKQRLVRVIEKGLPRDA

SEQ ID NO: 80744 - protein, 395 aa, unidentified
  source 1..395: note = Salmonella choleraesuis
  REGION 1..395: note = tr|Q57GM5|Q57GM5_SALCH Epoxyqueuosine reductase; OS = Salmonella choleraesuis (strain SC-B67) OX=321314; GN = yjeS PE=3 SV=1
MECGILTGFFFMLWSIMSKPLDLNQLAQNIKQWGLELGFQQVGITDTDLRASEPALQAWLDKQYHGEMAWMARHGMMRARPHELLPGTLRVISVRMNYLPANAAFASTLKDPTLGYVSRYALGRDYHKLLRSRLKKLGEQIQQYCGSLNFRPFVDSAPILERPLAEKAGLGWTGKHSLILNREAGSFFFLGELLIDLPLPVDQPVEEGCGKCVACMTICPTGAIVEPYTVDARRCISYLTIELEGAIPEAFRPLIGNRIYGCDDCQLICPWNRYSQLTDEADFSPRKALHNPDLLELFSWSEAQFLKVTEGSAIRRIGHLRWLRNVAVALGNAPWSNAVITALESRKGEHPLLDEHIEWAIAQQIEKRNACIIEVQLPKKQRLVRVIEKGLVRDA

SEQ ID NO: 80745 - protein, 384 aa, unidentified
  source 1..384: note = Salmonella derby
  REGION 1..384: note = tr|A0A4Z8VXM0|A0A4Z8VXM0_SALDE Epoxyqueuosine reductase OS=Salmonella derby OX=28144 GN=queG PE=3 SV=1
MLWSIMSKPLDLNQLAQNIKQCGLELGFQQVGITDTDLRASEPALQAWLDKQYHGEMAWMARHGMMRARPHELLPGTLRVISVRMNYLPANAAFASTLKDPTLGYVSRYALGRDYHKLLRSRLKKLGEQIQQYCGSLNFRPFVDSAPILERPLAEKAGLGWTGKHSLILNREAGSFFFLGELLIDLPLPVDQPVEEGCGKCVACMTICPTGAIVEPYTVDARRCISYLTIELEGAIPEAFRPLIGNRIYGCDDCQLICPWNRYSQLTDEADFSPRKALHNPDLVELFSWSEAQFLKVTEGSAIRRIGHLRWLRNVAVALGNAPWSNAVITALESRKGEHPLLDEHIEWAIAQQIEKRNACIIEVQLPKKQRLVRVIEKGLVRDA

SEQ ID NO: 80746 - protein, 384 aa, unidentified; identical to SEQ ID NO: 80735
  source 1..384: note = Salmonella derby
  REGION 1..384: note = tr|A0A3V6WBZ7|A0A3V6WBZ7_SALDE Epoxyqueuosine reductase OS=Salmonella derby OX=28144 GN=queG PE=3 SV=1

SEQ ID NO: 80747 - protein, 369 aa, unidentified
  source 1..369: note = Salmonella diarizonae
  REGION 1..369: note = tr|A0A379U4L3|A0A379U4L3_SALDZ Epoxyqueuosine reductase OS=Salmonella diarizonae OX=59204 GN=yjeS PE=3; SV = 1
MSKPLDLNQLAQNIKQWGLELGFQQVGITDTDLRASEPVLQAWLDKQYHGEMAWMARHGMMRARPHELLPGTLRVISVRMNYLPANAAFASTLKNPTLGYVSRYALGRDYHKLLRNRLKKLGEQIQQHCGSLNFRPFVDSAPILERPLAEKAGLGWTGKHSLILNREAGSFFFLGELLIDLPLPVDQPIEEGCGKCVACMTICPTGAIVEPYTVDARRCISYLTIELEGAIPEAFRPLIGNRIYGCDDCQLICPWNRYSQLTDEADFSPRKALHAPELLELFSWSEAQFLKVTEGSAIRRIGHLRWLRNVAVALGNAPWSNAVIAALESRKGEHPLLDEHIEWAVAQQIESGTPASLKCSYRKNNVWSG

SEQ ID NO: 80748 - protein, 384 aa, unidentified
  source 1..384: note = Salmonella diarizonae
  REGION 1..384: note = tr|A0A2I5HP88|A0A2I5HP88_SALDZ Epoxyqueuosine reductase OS=Salmonella diarizonae OX=59204 GN=queG PE=3; SV = 1
MLWSIMSKPLDLNQLAQNIKQWGLELGFQQVGITDTDLRASEPVLQAWLDKQYHGEMAWMARHGMMRARPHELLPGTLRVISVRMNYLPANAAFASTLKNPTLGYVSRYALGRDYHKLLRNRLKKLGEQIQQHCGSLNFRPFVDSAPILERPLAEKAGLGWTGKHSLILNREAGSFFFLGELLIDLPLPVDQPIEEGCGKCVACITICPTGAIVEPYTVDARRCISYLTIELEGAIPEAFRPLIGNRIYGCDDCQLICPWNRYSQLTDEADFSPRKALHAPELLELFSWSEAQFLKVTEGSAIRRIGHLRWLRNVAVALGNAPWSNAVIAALESRKGEHPLLDEHIEWAVAQQIEKRNACIIEVQLPKKQRLVRVIEKGLVRDA

SEQ ID NO: 80749 - protein, 384 aa, unidentified; identical to SEQ ID NO: 80736
  source 1..384: note = Salmonella dublin
  REGION 1..384: note = tr|A0A3T3IKF8|A0A3T3IKF8_SALDU Epoxyqueuosine reductase OS=Salmonella dublin OX=98360 GN=queG PE=3 SV=1

SEQ ID NO: 80750 - protein, 379 aa, Salmonella enterica
  REGION 1..379: note = tr|A0A3F3J2N7|A0A3F3J2N7_SALER Epoxyqueuosine reductase OS=Salmonella enterica OX=28901 GN=queG PE=3 SV=1
MSKPLDLNQLAQNIKQWGLELGFQQVGITDTDLRASEPVLQAWLDKQYHGEMAWMARHGMMRARPHELLPGTLRVISVRMNYLPANAAFASTLKNPTLGYVSRYALGRDYHKLLRNRLKKLGEQIQQHCGSLNFRPFVDSAPILERPLAEKAGLGWTGKHSLILNREAGSFFFLGELLIDLPLPVDQPIEEGCGKCVACMTICPTGAIVEPYTVDARRCISYLTIELEGAIPEAFRPLIGNRIYGCDDCQLICPWNRYSQLTDEADFSPRKALHAPELLELFSWSEAQFLKVTEGSAIRRIGHLRWLRNVAVALGNAPWSNAVIAALESRKGEHPLLDEHIEWAVAQQIEKRNACIIEVQLPKKQRLVRVIEKGLVRDA

SEQ ID NO: 80751 - protein, 384 aa, Salmonella enterica
  REGION 1..384: note = tr|A0A5I3NV98|A0A5I3NV98_SALER tRNA epoxyqueuosine(34) reductase QueG OS=Salmonella enterica subsp. salamae str. CFSAN000559 OX=1299293 GN=queG PE=4; SV = 1
MLWSIMSKPLDLNQLAQNIKQWGLELGFQQVGITDTDLRASEPALQAWLDKQYHGEMAWMARHGMMRARPHELLPGTLRVISVRMNYLPANAAFASTLKDPSLGYVSRYALGRDYHKLLRSRLKKLGEQIQQYCGSLNFRPFVDSAPILERPLAEKAGLGWTGKHSLILNREAGSFFFLGELLIDLPLPVDQSVEESCGKCVACMTICPTGAIVEPYTVDARRCISYLTIELEGAIPEAFRPLIGNRIYGCDDCQLICPWNRYSQLTDETDFSPRKALHAPELLELFSWSEAQFLKVTEGSAIRRIGHLRWLRNVAVALGNAPWSNAVIAALESRKGEHPLLDEHIEWAVAQQIEKRNACIIEVQLPKKQRLVRVIEKGLARDA

SEQ ID NO: 80752 - protein, 373 aa, unidentified
  source 1..373: note = Salmonella enteritidis
  REGION 1..373: note = tr|A0A5F1JFE8|A0A5F1JFE8_SALEN tRNA epoxyqueuosine(34) reductase QueG (Fragment) OS=Salmonella enteritidis OX=149539 GN=queG PE=3 SV=1
MLWSIMSKPLDLNQLAQNIKQWGLELGFQQVGITDTDLRASEPALQAWLDKQYHGEMAWMARHGMMRARPHELLPGTLRVISVRMNYLPANAAFASTLKDPTLGYVSRYALGRDYHKLLRSRLKKLGEQIQQYCGSLNFRPFVDSAPILERPLAEKAGLGWTGKHSLILNREAGSFFFLGELLIDLPLPVDQPVEEGCGKCVACMTICPTGAIVEPYTVDARRCISYLTIELEGAIPEAFRPLIGNRIYGCDDCQLICPWNRYSQLTDEADFSPRKALHNPDLVELFSWSEAQFLKVTEGTAIRRIGHLRWLRNVAVALGNAPWSNAVITALESRKGEHPLLDEHIEWAIAQQIEKRNACIIEVQLPKKQRLV

SEQ ID NO: 80753 - protein, 379 aa, unidentified
  source 1..379: note = Salmonella enteritidis
  REGION 1..379: note = tr|A0A1X8W8Q9|A0A1X8W8Q9_SALEN Epoxyqueuosine reductase OS=Salmonella enteritidis OX=149539 GN=queG PE=3; SV = 1
MSKPLDLNQLAQNIKQWGLELGFQQVGITDTDLRASEPALQAWLDKQYHGEMAWMARHGMMRARPHELLPGTLRVISVRMNYLPANAAFASTLKDPTLGYVSRYALGRDYHKLLRSRLKKLGEQIQQYCGSLNFRPFVDSAPILERPLAEKAGLGWTGKHSLILNREAGSFFFLGELLIDLPLPVDQPVEEGCGKCVACMTICPTGAIVEPYTVDARRCISYLTIELEGAIPEAFRPLIGNRIYGCDDCQLICPWNRYSQLTDEADFSPRKALHNPDLVELFSWSEAQFLKVTEGTAIRRIGHLRWLRNVAVALGNAPWSNAVITALESRKGEHPLLDEHIEWAIAQQIEKRNACIIEVQLPKKQRLVRVIEKGLVRDA

SEQ ID NO: 80754 - protein, 384 aa, unidentified
  source 1..384: note = Salmonella gallinarum
  REGION 1..384: note = tr|A0A3V9NJJ5|A0A3V9NJJ5_SALGL Epoxyqueuosine reductase OS=Salmonella gallinarum OX=594 GN=queG PE=3 SV=1
MLWSIMSKPLDLNQLAQNIKQWGLELGFQQVGITDTDLRASEPALQAWLDKQYHGEMAWMARHGMMRARPHELLPGTLRVISVRMNYLPANAAFASTLKDPTLGYVSRYALGRDYHKLLRSRLKKLGEQIQQYCGSLNFRPFVDSAPILERPLAEKAGLGWTGKHSLILNREAGSFFFLGELLIDLPLPVDQPVEEGCGKCVACMTICPTGAIVEPYTVDARRCISYLTIELEGAIPEAFRPLIGNRIYGCDDCQLICPWNRYSQLTDEADFSPRKTLHNPDLVELFSWSEAQFLKVTEGTAIRRIGHLRWLRNVAVALGNAPWSNAVITALESRKGEHPLLDEHIEWAIAQQIEKRNACIIEVQLPKKQRLVRVIEKGLVRDA

SEQ ID NO: 80755 - protein, 379 aa, unidentified
  source 1..379: note = Salmonella gallinarum
  REGION 1..379: note = tr|B5R9B3|B5R9B3_SALG2 Epoxyqueuosine reductase; OS = Salmonella gallinarum (strain 287/91 / NCTC 13346); OX = 550538 GN=yjeS PE=3 SV=1
MSKPLDLNQLAQNIKQWGLELGFQQVGITDTDLRASEPALQAWLDKQYHGEMAWMARHGMMRARPHELLPGTLRVISVRMNYLPANAAFASTLKDPTLGYVSRYALGRDYHKLLRSRLKKLGEQIQQYCGSLNFRPFVDSAPILERPLAEKAGLGWTGKHSLILNREAGSFFFLGELLIDLPLPVDQPVEEGCGKCVACMTICPTGAIVEPYTVDARRCISYLTIELEGAIPEAFRPLIGNRIYGCDDCQLICPWNRYSQLTDEADFSPRKTLHNPDLVELFSWSEAQFLKVTEGTAIRRIGHLRWLRNVAVALGNAPWSNAVITALESRKGEHPLLDEHIEWAIAQQIEKRNACIIEVQLPKKQRLVRVIEKGLVRDA

SEQ ID NO: 80756 - protein, 384 aa, unidentified; identical to SEQ ID NO: 80735
  source 1..384: note = Salmonella hadar
  REGION 1..384: note = tr|A0A3V2W0W2|A0A3V2W0W2_SALHA Epoxyqueuosine reductase OS=Salmonella hadar OX=149385 GN=queG PE=3 SV=1

SEQ ID NO: 80757 - protein, 384 aa, unidentified
  source 1..384: note = Salmonella houtenae
  REGION 1..384: note = tr|A0A2K0JKA5|A0A2K0JKA5_SALHO Epoxyqueuosine reductase OS=Salmonella houtenae OX=59205 GN=queG PE=3 SV=1
MLWSIMSKPLDLNQLAQNIKQWGLELGFQQVGITDTDLRASEPALQAWLDKQYHGEMSWMARHGMMRARPHELLPGTLRVISVRMNYLPANAAFASTLKNPMLGYVSRYALGRDYHKLLRSRLKKLGEQIQQHCGSLNFRPFVDSAPILERPLAEKAGLGWTGKHSLILNRDAGSFFFLGELLIDLPLPIDQPVEEGCGKCVACMTICPTGAIVEPYTVDARRCISYLTIELEGAIPETFRPLIGNRIYGCDDCQLICPWNRYSHLTDEEDFSPRKALHAPALIDLFSWSETQFLKVTEGSAIRRIGHLRWLRNVAVALGNAPWSNAIIAALESRKGEHPLLDEHIEWAVAQQIEKRNACIIEVQPPKKQRLVRAIEKGLVRDA

SEQ ID NO: 80758 - protein, 384 aa, unidentified
  source 1..384: note = Salmonella houtenae
  REGION 1..384: note = tr|A0A3Y1X3M7|A0A3Y1X3M7_SALHO Epoxyqueuosine reductase OS=Salmonella houtenae OX=59205 GN=queG PE=3 SV=1
MLWSIMSKPLDLNQLAQNIKQWGLELGFQQVGITDTDLRASEPALQAWLDKQYHGEMSWMARHGMMRARPHELLPGTLRVISVRMNYLPANAAFASTLKNPMLGYVSRYALGRDYHKLLRSRLKKLGEQIQQHCGSLNFRPFVDSAPILERPLAEKAGLGWTGKHSLILNRDAGSFFFLGELLIDLPLPIDQPVEEGCGKCVACMTICPTGAIVEPYTVDARRCISYLTIELEGAIPETFRPLIGNRIYGCDDCQLICPWNRYSQLTDEEDFSPRKALHAPALIDLFSWSETQFLKVTEGSAIRRIGHLRWLRNVAVALGNAPWSNAIIAALESRKGEHPLLDEHIEWAVAQQIEKRNACIIEVQPPKKQRLVRAIEKGLVRDA

SEQ ID NO: 80759 - protein, 384 aa, unidentified; identical to SEQ ID NO: 80736
  source 1..384: note = Salmonella infantis
  REGION 1..384: note = tr|A0A5F1J881|A0A5F1J881_SALIN Epoxyqueuosine reductase OS=Salmonella infantis OX=595 GN=queG PE=3 SV=1

SEQ ID NO: 80760 - protein, 384 aa, unidentified
  source 1..384: note = Salmonella infantis
  REGION 1..384: note = tr|A0A3V5LB96|A0A3V5LB96_SALIN Epoxyqueuosine reductase OS=Salmonella infantis OX=595 GN=queG PE=3 SV=1
MLWSIMSKPLDLNQLAQNIKQWGLELGFQQVGITDTDLRASEPALQAWLDKQYHGEMAWMARHGMMRARPHELLPGTLRVISVRMNYLPANAAFASTLKDPTLGYVSRYALGRDYHKLLRSRLKKLGEQIQQYCGSLNFRPFVDSAPILERPLAEKAGLGWTGKHSLILNRQAGSFFFLGELLIDLPLPVDQPVEEGCGKCVACMTICPTGAIVEPYTVDARRCISYLTIELEGAIPEAFRPLIGNRIYGCDDCQLICPWNRYSQLTDEADFSPRKALHNPDLLELFSWSEAQFLKVTEGSAIRRIGHLRWLRNVAVALGNAPWSNAVITALESRKGEHPLLDEHIEWAIAQQIEKRNACIIEVQLPKKQRLVRVIEKGLVRDA

SEQ ID NO: 80761 - protein, 384 aa, unidentified; identical to SEQ ID NO: 80735
  source 1..384: note = Salmonella montevideo
  REGION 1..384: note = tr|A0A3U8JG56|A0A3U8JG56_SALMO Epoxyqueuosine reductase OS=Salmonella montevideo OX=115981 GN=queG PE=3; SV = 1

SEQ ID NO: 80762 - protein, 384 aa, unidentified
  source 1..384: note = Salmonella montevideo
  REGION 1..384: note = tr|A0A3Y0EE27|A0A3Y0EE27_SALMO Epoxyqueuosine reductase OS=Salmonella montevideo OX=115981 GN=queG PE=3; SV = 1
MLWSIMSKPLDLNQLAQNIKQWGLELGFQQVGITDTDLRASEPALQAWLDKQYHGEMAWMARHGMMRARPHELLPGTLRVISVRMNYLPANAAFASTLKDPTLGYVSRYALGRDYHKLLRSRLKKLGEQIQQYCGSLNFRPFVDSAPILERPLAEKAGLGWTGKHSLILNREAGSFFFLGELLIDLPLPVDQPVEEGCGKCVACMTICPTGAIVEPYTVDARRCISYLTIELEGAIPEAFRPLIGNRIYGCDDCQLICPWNRYSQLTDEADFSPRKALHNPDLLELFSWSEAQFLKVTEGSAIRRIGHLRWLRNVAVALGNAPWSNAVITGLESRKGEHPLLDEHIEWAIAQQIEKRNACIIEVQLPKKQRLVRVIEKGLVRDA

SEQ ID NO: 80763 - protein, 384 aa, unidentified; identical to SEQ ID NO: 80740
  source 1..384: note = Salmonella moscow
  REGION 1..384: note = tr|A0A5H7LJK8|A0A5H7LJK8_SALMC tRNA epoxyqueuosine(34) reductase QueG OS=Salmonella moscow; OX = 28146 GN=queG PE=4 SV=1

SEQ ID NO: 80764 - protein, 384 aa, unidentified
  source 1..384: note = Salmonella muenchen
  REGION 1..384: note = tr|A0A3Z3HZT2|A0A3Z3HZT2_SALMU tRNA epoxyqueuosine(34) reductase QueG OS=Salmonella muenchen; OX = 596 GN=queG PE=3 SV=1
MLWSIMSKPLDLNQLAQNIKQWGLELGFQQVGITDTDLRASEPALQAWLDKQYHGEMAWMARHGMMRARPHELLPGTLRVISVRMNYLPANAAFASTLKDPTLGYVSRYALGRDYHKLLRSRLKKLGEQIQQYCGSLNFRPFVDSAPILERPLAEKAGLGWTGKHSLILNREAGSFFFLGELLIDLPLPVDQPVEEGCGKCVACMTICPTGAIVEPYTVDARRCISYLTIELEGAIPEAFRPLIGNRIYGCDDCQLICPWNRYSQLTDEADFSPRKALHNPDLVELFSWSEAQFLKVTEGSAIRRIGHLRWLRNVAVALGNAPCSNAVITALESRKGEHPLLDEHIEWAIAQQIEKRNACIIEVQLPKKQRLVRVIEKGLVRDA

SEQ ID NO: 80765 - protein, 384 aa, unidentified; identical to SEQ ID NO: 80736
  source 1..384: note = Salmonella muenchen
  REGION 1..384: note = tr|A0A3T3ER12|A0A3T3ER12_SALMU Epoxyqueuosine reductase OS=Salmonella muenchen OX=596 GN=queG PE=3 SV=1

SEQ ID NO: 80766 - protein, 384 aa, unidentified
  source 1..384: note = Salmonella muenster
  REGION 1..384: note = tr|A0A5J1ASF5|A0A5J1ASF5_SALMS tRNA epoxyqueuosine(34) reductase QueG OS=Salmonella muenster; OX = 82689 GN=queG PE=4 SV=1
MLWSIMSKPLDLNQLAQNIKQWGLELGFQQVGITDTDLRASEPALQAWLDKQYHGEMAWMARHGMMRARPHELLPGTLRVISVRMNYLPANAAFASTLKDPTLGYVSRYALGRDYHKLLRSRLKKLGEQIQQYCGSLNFRPFVDSAPILERPLAEKAGLGWTGKHSLILNREAGSFFFLGELLIDLPLPVDQPVEEGCGKCVACMTICPTGAIVEPYTVDARRCISYLTIELEGAIPEAFRPLIGNRIYGCDDCQLICPWNRYSQLTDEADFSPRKALHNPDLVELFSWSEAQFLKVTEGSAIRRIGHLRWLRNVAVALGNAPWSNAVITALESRKGEHPLLDEHIKWAIAQQIEKRNACIIEVQLPKKQRLVRVIEKGLVRDA

SEQ ID NO: 80767 - protein, 384 aa, unidentified; identical to SEQ ID NO: 80735
  source 1..384: note = Salmonella muenster
  REGION 1..384: note = tr|A0A5J1PSN3|A0A5J1PSN3_SALMS tRNA epoxyqueuosine(34) reductase QueG OS=Salmonella muenster; OX = 82689 GN=queG PE=3 SV=1

SEQ ID NO: 80768 - protein, 384 aa, unidentified
  source 1..384: note = Salmonella newport
  REGION 1..384: note = tr|A0A3Y6VAV3|A0A3Y6VAV3_SALNE tRNA epoxyqueuosine(34) reductase QueG OS=Salmonella newport; OX = 108619 GN=queG PE=3 SV=1
MLWSIMSKPLDLNQLAQNIKQWGLELGFQQVGITDTDLRASEPALQAWLDKQYHGEMAWMARHGMMRARPHELLPGTLRVISVRMNYLPANAAFASTLKDPTLGYVSRYALGRDYHKLLRSRLKKLGEQIQQYCGSLNFRPFVDSAPILERPLAEKAGLGWTGKHSLILNRETGSFFFLGELLIDLPLPVDQPVEEGCGKCVACMTICPTGAIVEPYTVDARRCISYLTIELEGAIPEAFRPLIGNRIYGCDDCQLICPWNRYSQLTDEADFSPRKALHNPDLLELFSWSEAQFLKVTEGSAIRRIGHLRWLRNVAVALGNAPWSNAVITALESRKGEHPLLDEHIEWAIAQQIEKRNACIIEVQLPKKQRLVRVIEKGLVRDA

SEQ ID NO: 80769 - protein, 384 aa, unidentified; identical to SEQ ID NO: 80735
  source 1..384: note = Salmonella newport
  REGION 1..384: note = tr|A0A0H3BKX9|A0A0H3BKX9_SALNS Epoxyqueuosine reductase OS=Salmonella newport (strain SL254) OX=423368; GN = queG PE=3 SV=1

SEQ ID NO: 80770 - protein, 384 aa, unidentified
  source 1..384: note = Salmonella oranienberg
  REGION 1..384: note = tr|A0A3V8YWK7|A0A3V8YWK7_SALON Epoxyqueuosine reductase OS=Salmonella oranienberg OX=28147 GN=queG PE=3; SV = 1
MLWSIMSKPLDLNQLAQNIKQWGLELGFQQVGITDTDLRASEPALQAWLDKQYHGEMAWMARHGMMRARPHKLLPGTLRVISVRMNYLPANAAFASTLKDPTLGYISRYALGRDYHKLLRSRLKKLGEQIQQYCGSLNFRPFVDSAPILERPLAEKAGLGWTGKHSLILNREAGSFFFLGELLIDLPLPVDQPVEEGCGKCVACMTICPTGAIVEPYTVDARRCISYLTIELEGAIPEAFRPLIGNRIYGCDDCQLICPWNRYSQLTDEADFSPRKALHNPDLLELFSWSEAQFLKVTEGSAIRRIGHLRWLRNVAVALGNAPWSNAVITALESRKGEHPLLDEHIEWAIAQQIEKRNACIIEVQLPKKQRLVRVIEKGLVRDA

SEQ ID NO: 80771 - protein, 384 aa, unidentified
  source 1..384: note = Salmonella oranienberg
  REGION 1..384: note = tr|A0A4S3DY66|A0A4S3DY66_SALON Epoxyqueuosine reductase OS=Salmonella oranienberg OX=28147 GN=queG PE=3; SV = 1
MLWSIMSKPLDLNQLAQNIKQWGLELGFQQVGITDTDLRASEPALQAWLDKQYHGEMAWMARHGMMRARPHELLPGTLRVISVRMNYLPANAAFASTLKDPTLGYISRYALGRDYHKLLRSRLKKLGEQIQQYCGSLNFRPFVDSAPILERPLAEKAGLGWTGKHSLILNREAGSFFFLGELLIDLPLPVDQPVEEGCGKCVACMTICPTGAIVEPYTVDARRCISYLTIELEGAIPEAFRPLIGNRIYGCDDCQLICPWNRYSQLTDEADFSPRKALHNPDLLELFSWSEAQFLKVTEGSAIRRIGHLRWLRNVAVALGNAPWSNAVITALESRKGEHPLLDEHIEWAIAQQIEKRNACIIEVQLPKKQRLVRVIEKGLVRDA

SEQ ID NO: 80772 - protein, 384 aa, unidentified
  source 1..384: note = Salmonella paratyphi
  REGION 1..384: note = tr|A0A5H9MZD9|A0A5H9MZD9_SALPT tRNA epoxyqueuosine(34) reductase QueG OS=Salmonella paratyphi A OX=54388 GN=queG PE=4 SV=1
MLWSIMSKPLDLNQLAQNIKQWGLELGFQQVGITDTDLRASEPALQAWLDKQYHGEMAWMARHGMMRARPHELLPGTLRVISVRMNYLPANAAFASTLKDPTLGYVSRYALGRDYHKLLRSRLKKLGEQIQQYCGSLNFRPFVDSAPILERPLAEKAGLGWTGKHSLILNREAGSFFFLGELLIDLPLPVDQPVEEGCGKCVACMTICPTGAIVEPYTVDARRCISYLTIELEGAIPEAFRPLIGNRIYGCDDCQLICPWNRYSQLTDEADFSPRKALHNPDLLELFSWSEAQFLKVTEGSAIRRIGHLRWLRNVAVALGNAPWSNAVITALESRKGEHPLLDEHIEWAIAQQIEKRNSCIIEVQLPKKQRLVRVIEKGLVRDA

SEQ ID NO: 80773 - protein, 384 aa, unidentified; identical to SEQ ID NO: 80735
  source 1..384: note = Salmonella paratyphi
  REGION 1..384: note = tr|C0Q6C4|C0Q6C4_SALPC Epoxyqueuosine reductase; OS = Salmonella paratyphi C (strain RKS4594) OX=476213; GN = yjeS PE=3 SV=1

SEQ ID NO: 80774 - protein, 384 aa, unidentified
  source 1..384: note = Salmonella potsdam
  REGION 1..384: note = tr|A0A5I6S0F0|A0A5I6S0F0_SALPO tRNA epoxyqueuosine(34) reductase QueG OS=Salmonella potsdam; OX = 597 GN=queG PE=4 SV=1
MLWSIMSKPLDLNQLAQNIKQWGLELGFQQVGITDTDLRASEPALQAWLDKQYHGEMAWMARHGMMRARPHELLPGTLRVISVRMNYLPANAAFASTLKDPTLGYVSRYALGRDYHKLLRSRLKKLGEQIQQYCGSLNFRPFVDSAPILERPLAEKAGLGWTGKHSLILNREAGSFFFLGELLIDLPLPVDQPVEEGCGKCVACMTICPTGAIVEPYTVDARRCISYLTIELEGAIPEAFRPLIGNRIYGCDDCQLICPWNRYSQLTDEADFSPRKALHNPDLLELFSWSEAQFLKVTEGSAIRRIGHLRWLRNVAVALGNAPWSNAIITALESRKGEHPLLDEHIEWAIAQQIEKRNACIIEVQLPKKQRLVRVIEKGLVRDA

SEQ ID NO: 80775 - protein, 384 aa, unidentified; identical to SEQ ID NO: 80735
  source 1..384: note = Salmonella potsdam
  REGION 1..384: note = tr|A0A5H6BZK7|A0A5H6BZK7_SALPO tRNA epoxyqueuosine(34) reductase QueG OS=Salmonella potsdam; OX = 597 GN=queG PE=4 SV=1

SEQ ID NO: 80776 - protein, 384 aa, unidentified; identical to SEQ ID NO: 80735
  source 1..384: note = Salmonella rubislaw
  REGION 1..384: note = tr|A0A3V7IQE9|A0A3V7IQE9_SALRU Epoxyqueuosine reductase OS=Salmonella rubislaw OX=598 GN=queG PE=3 SV=1

SEQ ID NO: 80777 - protein, 384 aa, unidentified; identical to SEQ ID NO: 80736
  source 1..384: note = Salmonella rubislaw
  REGION 1..384: note = tr|A0A5J2JV42|A0A5J2JV42_SALRU tRNA epoxyqueuosine(34) reductase QueG OS=Salmonella rubislaw; OX = 598 GN=queG PE=4 SV=1

SEQ ID NO: 80778 - protein, 384 aa, unidentified; identical to SEQ ID NO: 80736
  source 1..384: note = Salmonella schwarzengrund
  REGION 1..384: note = tr|A0A0N1QY86|A0A0N1QY86_SALSV Epoxyqueuosine reductase OS=Salmonella schwarzengrund (strain CVM19633); OX = 439843 GN=queG PE=3 SV=1

SEQ ID NO: 80779 - protein, 384 aa, unidentified
  source 1..384: note = Salmonella senftenberg
  REGION 1..384: note = tr|A0A3U8RPI6|A0A3U8RPI6_SALSE Epoxyqueuosine reductase OS=Salmonella senftenberg OX=28150 GN=queG PE=3; SV = 1
MLWSIMSKPLDLNQLAQNIKQWGLELGFQQVGITDTDLRASEPALQAWLDKQYHGEMAWMARHGMMRARPHELLPGTLRVISVRMNYLPANAAFASTLKDPTLGYVSRYALGRDYHKLLRSRLKKLGEQIQQYCGSLNFRPFVDSAPILERPLAEKAGLGWTGKHSLILNREAGSFFFLGELLIDLPLPVDQPVEEGCGKCVACMTICPTGAIVEPYTVDARRCISYLTIELEGAIPEAFRPLIGNRIYGCDDCQLICPWNRYSQLTDEADFSPRKALHNPDLVELFSWSEAQFLKVTEGSAIRRIGHLRWLRNVAVALGNAPWSNAVITALESRKGEHPLLDEHIEWAIAQQIEKRNACIIEVQLPKKQRLVRAIEKGLVRDA

SEQ ID NO: 80780 - protein, 384 aa, unidentified; identical to SEQ ID NO: 80736
  source 1..384: note = Salmonella senftenberg
  REGION 1..384: note = tr|A0A3V9FI67|A0A3V9FI67_SALSE Epoxyqueuosine reductase OS=Salmonella senftenberg OX=28150 GN=queG PE=3; SV = 1

SEQ ID NO: 80781 - protein, 379 aa, Salmonella sp.
  REGION 1..379: note = tr|A0A1F2JXK3|A0A1F2JXK3_9ENTR Epoxyqueuosine reductase OS=Salmonella sp. HMSC13B08 OX=1581094 GN=queG; PE = 3 SV=1
MSEPLDLNQLAQNIKQWGLELGFQQVGITDTDLSASEPKLQAWLDKQYHGEMDWMARHGMMRARPHELLPGTLRVISVRMNYLPANAAFASTLKNPSLGYVSRYALGRDYHKLLRNRLKKLGERIQQHCVSLNFRPFVDSAPILERPLAEKAGLGWTGKHSLILNREAGSFFFLGELLIDLPLPIDTPVEEGCGKCVACLTICPTGAIVEPYTVDARRCISYLTIELEGAIPEALRPLMGNRIYGCDDCQLICPWNRYSQLTDEEDFSPRKHLHAPELIELFGWSEAWFLKVTEGSAIRRIGHLRWLRNIAVALGNAPWDNAVITALESRRGEHPLLDEHIEWAIAQQIEKRNACVVEVQLPKKQRLVRVIEKGLPRDA

SEQ ID NO: 80782 - protein, 379 aa, Salmonella sp.
  REGION 1..379: note = tr|A0A509CQS9|A0A509CQS9_9ENTR Epoxyqueuosine reductase OS=Salmonella sp. NCTC 6947 OX=2583581 GN=yjeS; PE = 3 SV=1
MSKPLDLNQLAQNIKQWGLELGFQQVGITDTDLRASEPALQAWLDKQYHGEMAWMARHGMMRARPHELLPGTLRVISVRMNYLPANAAFASTLKDPTLGYVSRYALGRDYHKLLRSRLKKLGEQIQQYCGSLNFRPFVDSAPILERPLAEKAGLGWTGKHSLILNREAGSFFFLGELLIDLPLPVDQPVEEGCGKCVACMTICPTGAIVEPYTVDARRCISYLTIELEGAIPEAFRPLIGNRIYGCDDCQLICPWNRYSQLTDEADFSPRKALHNPDLVELFSWSEAQFLKVTEGSAIRRIGHLRWLRNVAVALGNAPWSNAVITALESRKGEHPLLDEHIEWAIAQQIEKRNACIIEVQLPKKQRLVRVIEKGLVRDA

SEQ ID NO: 80783 - protein, 384 aa, unidentified
  source 1..384: note = Salmonella thompson
  REGION 1..384: note = tr|A0A3V3FZ86|A0A3V3FZ86_SALTH Epoxyqueuosine reductase OS=Salmonella thompson OX=600 GN=queG PE=3 SV=1
MLWSIMSKPLDLNQLAQNIKQWGLELGFQQVGITDTDLRASEPALQAWLDKQYHGEMAWMARHGMMRARPHELLPGTLRIISVRMNYLPANAAFASTLKDPTLGYVSRYALGRDYHKLLRSRLKKLGEQIQQYCGSLNFRPFVDSAPILERPLAEKAGLGWTGKHSLILNREAGSFFFLGELLIDLPLPVDQPVEEGCGKCVACMTICPTGAIVEPYTVDARRCISYLTIELEGAIPEAFRPLIGNRIYGCDDCQLICPWNRYSQLTDEADFSPRKALHNPDLLELFSWSEAQFLKVTEGSAIRRIGHLRWLRNVAVALGNAPWSNAVITALESRKGEHPLLDEHIEWAIAQQIEKRNACIIEVQLPKKQRLVRVIEKGLVRDA

SEQ ID NO: 80784 - protein, 384 aa, unidentified; identical to SEQ ID NO: 80736
  source 1..384: note = Salmonella thompson
  REGION 1..384: note = tr|A0A403SJ68|A0A403SJ68_SALTH Epoxyqueuosine reductase OS=Salmonella thompson OX=600 GN=queG PE=3 SV=1

SEQ ID NO: 80785 - protein, 384 aa, unidentified
  source 1..384: note = Salmonella typhi
  REGION 1..384: note = tr|Q8Z191|Q8Z191_SALTI Epoxyqueuosine reductase; OS = Salmonella typhi OX=90370 GN=yjeS PE=3 SV=1
MLWSIMSKPLDLNQLAQNIKQWGLELGFQQVGITDTDLRASEPALQAWLDKQYHGEMAWMARHGMMRARPHELLPGTLRVISVRMNYLPANAAFASTLKDPTLGYVSRYALGRDYHKLLRSRLKKLGEQIQQYCGSLNFRPFVDSAPILERPLAEKAGLGWTGKHSLILNREAGSFFFLGELLIDLPLPVDQPVEEGCGKCVACMTICPTGAIVEPYTVDARRCISYLTIELEGAIPEAFRPLIGNRIYGCDDCQLICPWNRYSQLTDEADFSPRKALHNPDLLELFSWSEAQFLKVTEGSAIRRIGHLRWLRNVAVALGNAPWSNAVITALESRKGEHPLLDENIEWAIAQQIEKRNACIIEVQLPKKQRLVRVIEKGLVRDA

SEQ ID NO: 80786 - protein, 384 aa, unidentified; identical to SEQ ID NO: 80740
  source 1..384: note = Salmonella typhimurium
  REGION 1..384: note = tr|A0A5D3QVK8|A0A5D3QVK8_SALTM Epoxyqueuosine reductase OS=Salmonella typhimurium OX=90371 GN=queG PE=3; SV = 1

SEQ ID NO: 80787 - protein, 379 aa, unidentified
  source 1..379: note = Salmonella typhimurium
  REGION 1..379: note = tr|A0A0H3NKS4|A0A0H3NKS4_SALTS Epoxyqueuosine reductase OS=Salmonella typhimurium (strain SL1344); OX = 216597 GN=yjeS PE=3 SV=1
MSKPLDLNQLAQNIKQWGLELGFQQVGITDTDLRASEPALQAWLDKQYHGEMAWMARHGMMRARPHELLPGTLRVISVRMNYLPANAAFASTLKDPTLGYVSRYALGRDYHKLLRSRLKKLGEQIQQYCGSLNFRPFVDSAPILERPLAEKAGLGWTGKHSLILNREAGSFFFLGELLIDLPLPVDQPVEEGCGKCVACMTICPTGAIVEPYTVDARRCISYLTIELEGAIPEAFRPLIGNRIYGCDDCQLICPWNRYSQLTDEADFSPRKALHNPDLLELFSWSEAQFLKVTEGSAIRRIGHLRWLRNVAVALGNAPWSNAVITALESRKGEHPLLDEHIEWAIAQQIEKRNACIIEVQLPKKQRLVRVIEKGLVRDA

SEQ ID NO: 80788 - protein, 384 aa, unidentified; identical to SEQ ID NO: 80735
  source 1..384: note = Salmonella virchow
  REGION 1..384: note = tr|A0A5I5YBV0|A0A5I5YBV0_SALVI tRNA epoxyqueuosine(34) reductase QueG OS=Salmonella virchow; OX = 48409 GN=queG PE=4 SV=1

SEQ ID NO: 80789 - protein, 384 aa, unidentified
  source 1..384: note = Salmonella virchow
  REGION 1..384: note = tr|A0A5H5S9E1|A0A5H5S9E1_SALVI tRNA epoxyqueuosine(34) reductase QueG OS=Salmonella virchow; OX = 48409 GN=queG PE=4 SV=1
MLWSIMSKPLDLNQLAQNIKQWGLELGFQQVGITDTDLRASEPALQAWLDKQYHGEMAWMARHGMMRARPHELLPGTLRVISVRMNYLPANAAFASTLKDPTLGYVSRYALGRDYHKLLRSRLKKLGEQIQQYCGSLNFRPFVDSAPILERPLAEKAGLGWTGKHSLILNREAGSFFFLGELLIDLPLPVDQPVEEGCGKCVACMTICPTGAIVEPYTVDARRCISYLTIELEGAIPEAFRPLIGNRIYGCDDCQLICPWNRYSQLTNEADFSPRKALHNPDLLELFSWSEAQFLKVTEGSAIRRIGHLRWLRNVAVALGNAPWNNAVITALESRKGEHPLLDEHIEWAIAQQIEKRNACIIEVQLPKKQRLVRVIEKGLVRDA

SEQ ID NO: 80790 - protein, 378 aa, Salsuginibacillus halophilus
  REGION 1..378: note = tr|A0A2P8HG78|A0A2P8HG78_9BACI Epoxyqueuosine reductase OS=Salsuginibacillus halophilus OX=517424; GN = queG PE=3 SV=1
MTSAQLKEEIIAYSKDIGIDKIGFASADPFLTLKDRLIRHRENGYESGFEEPDLDKRTEPERLLPKARTIISIALAYPSRMKDAPQSKRGDRRGVFCRASWGRDYHHVLNEKLAQLEAFIAEKVPGAKSTSMVDTGELSDRAVAERAGIGWSAKNCAIITPEFGSYVYLGEMVTTIELPPDTPLEDQCGTCNKCVDACPTGALIQGGQLDSTKCIAYLTQTKTMLPKQYRKKLGNRLYGCDTCQTVCPENKGKDFHHHEAFEPDPENVKPQLLPLLSISNREFKERFGSMAGSWRGKKPIQRNAVIALGHFKEESAVPELGRLLLNDPRPVIRGTAAWALGEIQTSEAVALLEQGEALEEDEQSLKEIHEALNRHEVS

SEQ ID NO: 80791 - protein, 379 aa, Samsonia erythrinae
  REGION 1..379: note = tr|A0A4R3VIS3|A0A4R3VIS3_9GAMM Epoxyqueuosine reductase OS=Samsonia erythrinae OX=160434 GN=queG PE=3; SV = 1
MSYPYDLNELAQHIKQWGKALGFQQVGICDTDLSAEEPRLQAWLDKQYHGEMEWMARHGMLRARPHELLPGTLRVISVRMNYLPAKAAFASTLKNPQLGYVSRYALGRDYHKLLRQRLKKLGDQIQAYCGDLNFRPFVDSAPIIERPLAAKAGLGWVGKHSLILNRESGSWFFLGELLIDLPLPIDQPQEEQCGRCVACLTTCPTGAIVAPYTVDARRCISYLTIELEGPIPEEFRPLMGNRIYGCDDCQLICPWNRFSQLTDEADFSPRAALHTPELLTLFSWSEEKFLRITEGSAIRRIGHLRWLRNIAVALGNAPYQDNIVLALQARLGENELLDEHIHWALHQQLERRASQEIDIQPAQKKRLTRAVEKGLPRDA

SEQ ID NO: 80792 - protein, 350 aa, Sandaracinobacter sp.
  REGION 1..350: note = tr|A0A501XDE2|A0A501XDE2_9SPHN Epoxyqueuosine reductase OS=Sandaracinobacter sp. PAMC 28131 OX=1715348; GN = queG PE=3 SV=1
MTSSISEVLRAEAQALGFAAFGIAPADAAPETGERLRQWLAEGRHGDMLWMESRADERAHPAGLWPDVRSVIALGLPYTPALDPARNLSHPELATISVYALGRDYHDVVKSKLKALARFLAERSGEQVKVFVDTAPVMEKPLAEAAGLGWQGKHSNLLSRKAGNWLFLGAIYTTADLPPFREPGTSASCGSCTACITACPTQAITAPYRVDARRCISYLTIEHKGPIPPEFRAQLGNRIYGCDDCLNACPWNSHAQFPADPAFAPRAELTAPYLADLLALDDPSFRSIFAGSPIKRIGRNRFVRNCLYAAGNSGLADLRTPVSALLNDPDPGVADAAQWALARLSGVGGE

SEQ ID NO: 80793 - protein, 345 aa, Sandaracinus amylolyticus
  REGION 1..345: note = tr|A0A0F6W3S4|A0A0F6W3S4_9DELT Epoxyqueuosine (OQ) reductase QueG OS=Sandaracinus amylolyticus OX=927083; GN = DB32_003867 PE=4 SV=1
MTLTDEVKARARELGFARIGIARAEALGPEGERLRAWLAEGRHAAMAWMEQTCEVRVDPRDERMLAGARSVIVMATPYARHEERVGPAPGVVARYARGRDYHNVIGKRAKKLADWLRASGHLARGSTDSTPVFERAWAVRAGLGFIGKNCCLIIPGLGSHVLLATVVTTAELEPDAPMGERCGSCTRCLDACPTRAFVGPRELDARRCISYLTIEHEGAIDEALREGIGDRFLGCDVCQDVCPFTRTAPPDPATTEPFAPDARWRDHDAVSVLRMDEATFDAYSLGSPVRRLKRAGAARNAAIVLGNVGGKVHLPVLRDARERDADDAVRDAAAWAITRIESREK

SEQ ID NO: 80794 - protein, 655 aa, Sandaracinus sp.
  REGION 1..655: note = tr|A0A2E0TD94|A0A2E0TD94_9DELT tRNA epoxyqueuosine(34) reductase QueG OS=Sandaracinus sp.; OX = 2024858 GN=queG PE=4 SV=1
MPACIQDVGSSRVVPSTSRSGECNTSSSSRAAWLFPRSKVRTTTGPIADMSSPKPIVKPGMPSWRLLWLGRIQAASSRRKLLSCICVRSPAPTSTASSSRSTSAMTRSQLASSSTLSRSRSTSGKGGTSGSKRERTVRRSSMAPASAVSRSVGVCFAPGVRVARCPVPFRSATISISSVQPAARRATRMFCSAAPQLMTSSRSSGSTTGSPRLMSAWTSMAPAFVTRKSQGCELCELGAAAPASRIGSRNGGGSPSTGRCVLMGSVTPRDSARTVPAQAAQRREGRSPRAVRGRARGPRSAHPLRVSEALEARVKALARELGFARVGIARAEALEPEGAQLRAFVAKGRHGGMGWLADTVEVRADPRHPGMVPGAESVVVLVAPYARPGGEARVGPAPGRVARYARERDYHNVLRKKVRKIEALLREAGHRARWSVDSRPVLERAWAERAGVGFVGKNCCLIVPGLGSHVFLATVVTTARLEADAPMARRCGACRLCLDRCPTEAFAGPRELDARRCVSYLTIEHEGPVDPALREGLEDWIFGCDACQDVCPYNRTAPPEPSVTEPYAAHGRWEAVDAEGLLAMEEEAFLAWAEGSPARRSGRTRMARNAAYVLGNVGERRHLPVLREAARGHEDEGVREAARWAGERIEERGEE

SEQ ID NO: 80795 - protein, 319 aa, Sandaracinus sp.
  REGION 1..319: note = tr|A0A2D9TD50|A0A2D9TD50_9DELT tRNA epoxyqueuosine(34) reductase QueG OS=Sandaracinus sp.; OX = 2024858 GN=queG PE=4 SV=1
MNDVEALDGEVRRRMEELGFARVGIARAEALEPEGAQLRAWLAAGRQGQMDWMERTADVRADPRHPGMVEGAVSVVVGAFPYAREADRVGPAPGRVARYARGRDYHNVLSKRLRKVVAFLRERGHEARFSVDSRPVLERAWAERAGLGFVGKNSCLIVPGLGSHVFLATVVTTAALRVDAPIKRRCGTCRACLDACPTDAFVGPRELDARRCISYLTIEHEGPIPPEHADQMGDWIFGCDACQDVCPYNRTSLPDPAATEPFAPHRRFQDVDAEALLAMDEPTYLRWAEGSPLRRAGLERMQRNARIVLANGKRRLPVV

SEQ ID NO: 80796 - protein, 342 aa, unidentified
  source 1..342: note = Sandarakinorhabdus cyanobacteriorum
  REGION 1..342: note = tr|A0A255YZV0|A0A255YZV0_9SPHN Epoxyqueuosine reductase OS=Sandarakinorhabdus cyanobacteriorum; OX = 1981098 GN=queG PE=3 SV=1
MIAALKAEAHRQGFADIGICAADAVPEAGQRLRAWLDDGCHGDMIWMEGRSRERASPQGLWPAVKSVIMLGTSYAPALDPLRLAGVGDTGVISVYAWNRDYHDLIKKRLKTLARWLVAQRPEAGVKVFVDTAPVMEKPLAAAAGLGWQGKHANLVSRQHGSWLFLGAIYTTLELPADAPHPDRCGSCTRCQTACPTQAFPAPYRLDARRCLAYLTIEHAGPIPEEFRAPMANRIYGCDDCLSVCPWNRFAQATEEPAFLPRAELTAPKLAELLALDDAAFRALFSGSAIKRIGVKRFLRNCLYAAGNSEEPALIPAVQVYVGSADPVVAEAARWAMTRLAAI

SEQ ID NO: 80797 - protein, 344 aa, Sandarakinorhabdus sp.
  REGION 1..344: note = tr|A0A552UFT6|A0A552UFT6_9SPHN Epoxyqueuosine reductase OS=Sandarakinorhabdus sp. LB1R16 OX=2593303; GN = queG PE=3 SV=1
MTPAALRTALEARAHALGFAAFGVAPATAAPLAGARLRQWLSEGRHGDMIWMADTADRRASPQGLWPEVRSVVMLGTSYAPALDPLRHAGNPDTGVISVYAQGKDYHDTIKGRLKQLGNWLGSTGNDLKVFVDTAPVMEKPLAEAAGLGWQGKHTNLVSRAHGSWLFLGSIYTTAELPYDAVHRDLCGSCDRCQRACPTDAFPAPYRLDARRCISYLTIEHKGPIPVEFRAAIGNRIYGCDDCLAVCPWNRFAQASADLAFAARPDLAAPSLAELLALDDTGFRARFAGSPVKRIGRGRFVRNVCIAAGNSGDAALLPVLVGLAEDGDAVVAEAAAWATTQIRA

SEQ ID NO: 80798 - protein, 308 aa, unidentified
  source 1..308: note = Sanguibacteroides justesenii
  REGION 1..308: note = tr|A0A0C3MJG4|A0A0C3MJG4_9PORP Iron-sulfur cluster-binding protein OS=Sanguibacteroides justesenii; OX = 1547597 GN=queG PE=4 SV=1
MVLSSSTLEKYAKETGFDACGVALAGALPREKERLLEWLGEGKHGGMSYMANNIEKRGDPRLLVEGARSVIVTLTNYYPCRRQAEGTPVFARYAYGKDYHFVLKERLHRLFALLKEEANRSVNGRVFVDSAPVFEHEWARRAGLGWIGKNTLLIHRKWGSFCFIGVIISNLEFDTYSSSFESRFCGNCNRCVEACPTGALTAYSLDARRCISYNTIENKGNIPDVVRQRMGMRVFGCDICQEVCPWNRKGIFNEVSEFQPGKEIMEWTKEQWLQLDEKTFETRFKDSPLARAGLNKLRDNLVDTSFYD

SEQ ID NO: 80799 - protein, 363 aa, unidentified
  source 1..363: note = Sapientia aquatica
  REGION 1..363: note = tr|A0A4V3AUW0|A0A4V3AUW0_9BURK Epoxyqueuosine reductase OS=Sapientia aquatica OX=1549640 GN=queG PE=3; SV = 1
MINDKYAILARSIKSWGQDLGFSDVRISDIDLSAHEAGLAAWLEAGFHGEMDYMAAHGMKRARPAELVPNAVRAIVVRMDYLAPSTSPNWRAAEQARGQLSDQAVISVYARGRDYHKVLRNRLQQLAQKIEAEVGQFGYRAFTDSAPVMEVALAEKAGLGWRGKHTLLLNREAGSTFFLGEIITDLPLPIDAPISNHCGNCTACLSSCPTQAIIAPYQLDARRCISYLTIELKSSIPEEFRPLIGNRVYGCDDCQTCCPWNKFAQISQEPDFAVRNGLDNSSLIELFSWSEEDFMRRMEGSPIRRIGYVSWLRNLAVGLGNARRARLAQQLDCELIDAALCRHLQHPSDIVREHVSWALRQGA

SEQ ID NO: 80800 - protein, 309 aa, Saprospira grandis
  REGION 1..309: note = tr|H6L351|H6L351_SAPGL Epoxyqueuosine reductase; OS = Saprospira grandis (strain Lewin) OX=984262 GN=queG; PE = 3 SV=1
MDKYELTAKLRAAALAEGFDNLRIAQARELTEEGRRLEAWLNKGYQGKMQYLENHFEKRIDPRKLVDGAKSVVSLSFNYFPEEQQVEGAPKLAKYAYGEDYHYVLKAKLRHLLALLETELGRPINGRAFVDSAPVLERDWAKHSGLGWIGKNTLLISKQRGSFFFLAELIIDVDLVYDGPIKDYCGRCRRCIDACPTQAISEKGYIMDGSKCISYFTIELRDELPAEYKGQFADWMFGCDICQDVCPWNRFSRPHQEEAFRPKENLLEMRREDWMELTEEVFRKVFKKSAVKRTKYKGLMRNLAFLEEA

SEQ ID NO: 80801 - protein, 309 aa, Saprospira grandis
  REGION 1..309: note = tr|J0P062|J0P062_9BACT Epoxyqueuosine reductase; OS = Saprospira grandis DSM 2844 OX=694433 GN=queG PE=3 SV=1
MDKYELTAKLRSAALAEGFDNLRVAQARELTEEGRRLEAWLNKGYQGKMQYLENHFEKRIDPRKLVDGAKSVVSLSFNYFPEEQQVEGAPKLAKYAYGEDYHYVLKAKLRRLLALLESELGRPINGRAFVDSAPVLERDWAKHSGLGWIGKNTLLISKQRGSFFFLAELIIDIDLVYDGPIKDYCGRCRRCIDACPTQAISEKGYLMDGSKCISYFTIELRDELPAEYKGQFADWMFGCDICQDVCPWNRFSRPHQEEAFRPKENLLEMRREDWMELTEEVFRKVFKKSAVKRTKYKGLLRNLAFLKEE

SEQ ID NO: 80802 - protein, 342 aa, unidentified
  source 1..342: note = Saprospiraceae bacterium
  REGION 1..342: note = tr|A0A521UH06|A0A521UH06_9BACT Epoxyqueuosine reductase OS=Saprospiraceae bacterium OX=2202734 GN=queG; PE = 3 SV=1
MLQLQPFCGHHFLHHHPIRPRGSALARRQCFKNTALTRQRHSLLIRQEAARLGFSFTGIAKAGPLDEEARHLEEWLHHGFHGQMQYMENNFDTRTDPTKLVPGAKSVIVLLHNYFPKEKQEDPDAPKLARYAYGEDYHFILKRKLKDLLAFIRQEIGEVQGRCFVDSAPVMERDWAKRAGLGWTGKNTLLIHPKAGSYFFLAELILNLELPPDQPMKDYCGTCRRCINACPTAAISPSGYLLDASRCISYLTIELRDETLPDEFRGKMDNWMFGCDVCQEVCPWNRFASPHNEPAFEPKLELMKMKNSEWRELTKEVFQQVFKKSAVKRTKYEGLKRNIDFL

SEQ ID NO: 80803 - protein, 255 aa, unidentified
  source 1..255: note = Saprospirales bacterium
  REGION 1..255: note = tr|A0A3C0HEU5|A0A3C0HEU5_9BACT tRNA epoxyqueuosine(34) reductase QueG (Fragment); OS = Saprospirales bacterium OX=2026790 GN=queG PE=4 SV=1
LRTDPTKLVPGAKTVISLMFNYYNEDTQHDPEAPKLAMYAYGRDYHKVVKKKLKYLMKYVKEEIGDIDGRAFVDSAPILERDWARRSGMGWVGKHSLLLNPKEGSYFFLSEIICDLEIEPDSPIKDHCGTCTRCIEACPTDAISEEGYVMDGSKCISYLTIERKEEIPIEYKDLLGNYMFGCDICQQVCPWNRFAKQHNEPDFQPKAGMLDMSRKDWMEITEEVFDRIFFGSPVKRTGFEGLQRNLRFLNDRPND

SEQ ID NO: 80804 - protein, 312 aa, unidentified
  source 1..312: note = Saprospirales bacterium
  REGION 1..312: note = tr|A0A2E4IBV5|A0A2E4IBV5_9BACT Epoxyqueuosine reductase OS=Saprospirales bacterium OX=2026790 GN=queG; PE = 3 SV=1
MNKSQYKFIIQQKARELGFSGVSFAKAEHMDVEALRLEKWLGGGNHGTMGYMENHFELRTDPTKLVPGAKTVISLMFNYYNEDTQHDPEAPKLAMYAYGRDYHKVVKKKLKYLMKYVKEEIGDIDGRAFVDSAPILERDWARRSGMGWVGKHSLLLNPKEGSYFFLSEIICDLEIEPDSPIKDHCGTCTRCIEACPTDAISEEGYVMDGSKCISYLTIERKEEIPIEYKDLLGNYMFGCDICQQVCPWNRFAKQHNEPDFQPKAGMLDMSRKDWMEITEEVFDRIFFGSPVKRTGFEGLQRNLRFLNDRPND

SEQ ID NO: 80805 - protein, 398 aa, unidentified
  source 1..398: note = Unknown
  REGION 1..398: note = tr|G5ZVK0|G5ZVK0_9PROT Uncharacterized Fe-S protein; OS = SAR116 cluster alpha proteobacterium HIMB100 OX=909943; GN = HIMB100_00000320 PE=4 SV=1
MILQLPLTRSRRAAIFRRYRVMADHTPQKTRDWLATAGAAEGFDICAVTTADLPSSVAAGLDDYIGAGHHGDMGWLAETRDRRITPSAMWPDARSAVIFGCNYGPDHDPMENLDAASSANISVYARGRDYHDVLKGRLKQLAGRLAARTGWQVKIFVDTAPLMEKPLAARAGLGWQGKHTNLVSRRYGSWLFLGTILTDGLLPADTPASDFCGSCTSCLDICPTDAFPAPYQLDARRCISYLTIEFDGHIPREFRTATGNRVFGCDDCLAVCPWNKFASASADLKLAAQDGRSLPSLQDMLSLDEPAFRQYFSASPVKRTGYIRFMRNCLIAAGNAGDAALIGVIRPYLDHKDARLRAMAVWGLSHYMNRCELAALYPAGETDETVRAEWQTALNQTD

SEQ ID NO: 80806 - protein, 77 aa, unidentified
  source 1..77: note = Unknown
  REGION 1..77: note = tr|A0A2A5YC19|A0A2A5YC19_9PROT tRNA epoxyqueuosine(34) reductase QueG (Fragment) OS=SAR116 cluster bacterium MED-G05 OX=1986234 GN=CNE92_06510 PE=4; SV = 1
MDAARLRSWLDDAGKAAGFADIFVTDARLGDRSGKGLDAFLADQFEGDMAWLRDTAARRRQPAAMWDGARTAIVTVM

SEQ ID NO: 80807 - protein, 420 aa, unidentified
  source 1..420: note = Unknown
  REGION 1..420: note = tr|A0A2A4SI51|A0A2A4SI51_9CHLR tRNA epoxyqueuosine(34) reductase QueG OS=SAR202 cluster bacterium OX=2030829 GN=queG PE=4 SV=1
MPEARQWIFPKGARDLHRWDNRSGASVNNLKQTVTGYALELGFDLVRITSTDDFVQDREIALERLRDGLMDGLPWYHQARVMRGTSPQELLPGARSIICLGLSYYRPVLSDGTAPRSAGKVAQYARLQDYHKVMKTRMRDYVRGLSSQLETPIDARWYVDDGPMLDRAAAARSGLGWFGKNTNILTPTHGSWIFLGQVITDLALEPDPPLKKTCGSCVRCIDACPTGAIVAPYVIDNTRCISYLTIEHRGPIPRELRPKMLDWVFGCDICQDVCPVNRNALTGDSAMWKQGSRGDSHEAKMGTLDLLDLLRITEEEFRQRFKGSPILRAKREGLQRNACVALGNLGDPSAVPALNEALSHSSPLVRGHAAWALGQIGTFDAREALKAIRSNEVDPEVLEEIQAALDDTVGRDPVSVIEHI

SEQ ID NO: 80808 - protein, 385 aa, unidentified
  source 1..385: note = Unknown
  REGION 1..385: note = tr|A0A2N0MKJ5|A0A2N0MKJ5_9CHLR tRNA epoxyqueuosine(34) reductase QueG OS=SAR202 cluster bacterium MP-SInd-SRR3963457-G1 OX=1926621 GN=BZY84_01760; PE = 4 SV=1
MQDLKAHISSYAIQCGFDLVRITSADVFAQDRDAALSRIKAGQMDGLPWFTESRVRRGSDPQELLPGARSIICLGQSYLDPEDEEKAISGTGKVARYARVKDYHRAMKRRMKAFVRGLEEKLDSPVAAKWYVDDGPMLDRAAAARSGLGWFGKNTNILTPSHGSWILLGQVITDLELEPDPPLKKTCGSCVRCIDDCPTGAIVAPYVVDNARCISYQTIENRGIIPLEMRPLIGDLVFGCDICQDVCPVNRRAESPLLPIQKAAAVGPSGQLDLVELLDLTEEEFRDRFQGTSIMRAKRVGMQKNACVALGNNRDESGVPALVATLKESEALVRGHAAWALGQISSPDAIGALEQATTSEVDPYVLEEIGMALAEALQRLTVSKA

SEQ ID NO: 80809 - protein, 439 aa, unidentified
  source 1..439: note = Unknown
  REGION 1..439: note = tr|A0A2D6YND9|A0A2D6YND9_9DELT tRNA epoxyqueuosine(34) reductase QueG OS=SAR324 cluster bacterium OX=2024889 GN=queG PE=4 SV=1
MNKNLKEAQNFNEADIQLREKIRKKGLSLGFDWVGFTGTTENLTHPHYSAWLEQGFAGEMQYLHKHAPQKISSQKVLGNAQTVISVACNYLHDDTSTKKYQDSSRGRFSRYSQGNDYHLILKDRLEEFRKWLLDEKLASGFEQTRVYVDTGPLLERELAWRAGLGWFGKHSNLIHAKLGSWLLLAEVIIDSKIPPDQPFSGIDCGSCTRCIEACPTDAIVSDRKVDARRCLSYLTIELKNTIPKQFRSKFQNWIFGCDICQEVCPWNRKAPKTTDATWKARKGLKDRKLWDWVRLEQEEFSNQFRKSAVKRTKRRGLLRNVVTALSACSHPQALSGLQIGLKDEEELVRQHAAWGLGFRRQRITKSILWRHLRVETVEKVIIEIQEALASKEKLFSKRERACLLTRQVPLALARKHRLGLSGGNHQRSSHNRRTKLLQG

SEQ ID NO: 80810 - protein, 375 aa, unidentified
  source 1..375: note = Unknown
  REGION 1..375: note = tr|A0A432GDU1|A0A432GDU1_9DELT Epoxyqueuosine reductase OS=SAR324 cluster bacterium OX=2024889 GN=queG; PE = 3 SV=1
MRTPTLTSLIRKKASELGFELIGAIPVSRSKTIDIYNAWLKKGYAGSMDYLERHSVLKEDPRQLLPETISLLALGFNYCTVDPPALVHNPEIGCISRYAWGDDYHELIRTKLRVLENYICQELNAGNLSRSFVDSGPVLEREIAQRAGLGWIGKHSNLINMEKGSWFFLAELLVDVPLETNLPFTRVDCGTCTICIEACPTEAIIADRTVDARLCISYLTIELKGAIPVELRPKMSNMIFGCDICQEVCPWNQNASKSPESGLRPRPENVAPELTELMKLDQSAFKKRFRKSPIKRTKRRGLLRNVAVALGNWAHESAIPALSLGLQDSEPLVRSHAAWALGRISASQAKINLKAAKITEKDPAVLEEIEAALGA

SEQ ID NO: 80811 - protein, 350 aa, unidentified
  source 1..350: note = Unknown
  REGION 1..350: note = tr|A0A2A4X211|A0A2A4X211_9GAMM Epoxyqueuosine reductase OS=SAR86 cluster bacterium OX=2030880 GN=queG; PE = 3 SV=1
MTDIDFKQFATDIKDWGVELGFQEVSITDIDLSEYEHHLEDWIGRNYHGAMSYMAENHDKRCHPEQLVPGTIRVVCVRMDYALDSEDSLDSMKNTGKAYVSRYARGRDYHKLIRKRLQKLARRIQDIAGPFGYRAFVDSAPVLERALAEKSGMGWIGKNTMLINKQAGSWFFLGELFTDLPLPVDEQVSDHCGSCSACLDICPTNAFVKPNLLDATRCISYLTIELRSSIPVEFRKPMGNRIFGCDDCQLVCPWNKFSKPSIEKDFTPRHSLDDAQLVDLFGWSEREFLKRTEGSAIRRIGYDCWLRNIAVALGNAPSSKEIVGALQSRLNNVSDMVNEHIEWALLQHES

SEQ ID NO: 80812 - protein, 356 aa, unidentified
  source 1..356: note = Unknown
  REGION 1..356: note = tr|A0A2A4MT57|A0A2A4MT57_9GAMM Epoxyqueuosine reductase OS=SAR86 cluster bacterium OX=2030880 GN=queG; PE = 3 SV=1
MNNLNIEQLTEDIHNWSSELGFQQLTISNVDLGEYQPLLESWLKNDYHGDMHYMAKHGEMRSHPEQLLPGTVKIISVRMDYSLDQKNSLEPLKNTSKAYIARYARGRDYHKLMRNRLQKLANKIQTATGSFGYRAFVDSAPVLERALAEKSGMGWIGKNTMLINKKAGSWFFLGELFTDLPLLETLAGDEPIQKHCGSCTACLDICPTQAFVAANTLDARRCISYLTIELRTSIPIELRPLMGNRIFGCDDCQLICPWNKFTQKTGEQDFSPRHQLDDCDLLSLFDWSEAEFYQNTAGSPIRRIGYECWLRNIAVALGNAQKSDAIEFALQEKQNHSSELVREHVQWALLQHTQKG

SEQ ID NO: 80813 - protein, 374 aa, unidentified
  source 1..374: note = Unknown
  REGION 1..374: note = tr|A0A0R2WE17|A0A0R2WE17_9GAMM Epoxyqueuosine reductase OS=SAR92 bacterium BACL16 MAG-120619-bin48; OX = 1655625 GN=queG PE=3 SV=1
MTETEKLADLAKNIKAWGETLGFQQVAISKPNLEQASERLLQWLEKGFQGSMQWMGAHGDKRYHIDKLVEKTVRVISVRMDYLTDSNMIAVLKDNNKAYISRYALGRDYHKLIRRRLADLSQKIEAEIMKLELCDLEVFQRPFVDSAPVMEKPIAEQAGLGWIGKNTLLLNDKVGSWFFLGEIYISLELPVDKSDQSNKCGNCRACLKICPTDAFPEPYVLDARRCISYLTIESQDPIPEALRPLMGNRVFGCDDCQIICPWNRYPSTTQEIDFSPRHNLDNADLLTLFEWTEETFERNTQGSPIRRIGYQRWLRNLSVGLGNAPASLDIMAALTKQLDNPSALVREHVQWALNEQQRNHSSAKLWPTEGVKGE

SEQ ID NO: 80814 - protein, 362 aa, unidentified
  source 1..362: note = Unknown
  REGION 1..362: note = tr|A0A2A5W2Z4|A0A2A5W2Z4_9GAMM Epoxyqueuosine reductase OS=SAR92 bacterium MED-G29 OX=1986232 GN=queG; PE = 3 SV=1
MHEIETGTDKLQKLAKKIKSWGASYGFQQVSIVEPDLTQASDHLHDWLSKGFQGSMHWMSEHKDKRYVVSKLVDHTVRVISVRMDYLADDNMIAVLKNDQKAYISRYALGRDYHKVIRHRLADLVKKIEGELPELSLSQRPFVDSAPVMEKPIAEQAGLGWIGKNTLLLNESAGSWFFLGEIYTSLKLPVDSSHQENKCGNCRACLTVCPTNAFPEPYVLDARRCISYLTIESKDAIPVELRPLMGNRVFGCDDCQIRCPWNRFSSPTKEDDFSPRNNLDNTSLVSLFNWERSEFLDKTEGSPIRRIGHERWLRNIAVGLGNASGSQEILNQLIKKRNHPSELVREHVNWAIERQKEKLNIA

SEQ ID NO: 80815 - protein, 362 aa, unidentified
  source 1..362: note = Unknown
  REGION 1..362: note = tr|A0A520MNW6|A0A520MNW6_9GAMM Epoxyqueuosine reductase OS=SAR92 clade bacterium OX=2315479 GN=queG PE=3; SV = 1
MHEIEGDVENLENLATKIKSWGAAFGFQQVSIIEPDLNNASKRLQEWLAKGFQGSMGWMGEHGDKRYVVDKLVDHTVRVISVRMDYLADTNMIAVLRDDNKAYISRYALGRDYHKVIRNRLAALIKKIEQELPELNLSQRPFVDSAPVMEKPIAEQAGLGWIGKNTLLLNESAGSWFFLGEIYTSLKLPVDNQKQENKCGNCRSCLKVCPTDAFPEPYVLDARRCISYLTIESKDAIPEELRPLMGNRVFGCDDCQIRCPWNRFASLTQEDDFTPRHNLDDPSLVTLFNWDAEDFLEKTQGSPIRRIGHERWLRNIAVGLGNASGSNTILDELKAKANHPSALVREHVEWAIAQQKEKLSLE

SEQ ID NO: 80816 - protein, 361 aa, unidentified
  source 1..361: note = Unknown
  REGION 1..361: note = tr|A0A520LMI5|A0A520LMI5_9GAMM Epoxyqueuosine reductase OS=SAR92 clade bacterium OX=2315479 GN=queG PE=3; SV = 1
MPEFAQNKIDLDQLAANIKHWGGNLGFQRVSIIAPDLKYASEKLKTWLDNKYHGSMDWMAKHEEKRCTPEKLVLGTIRVISVRMNYLSDPNMIATLKDDNKAYISRYALGKDYHKIIRKKLGSLTKRIAEEIPKEQFNHRPFVDSAPVLEKPLAEQAGLGWIGKNTLLIDKSVGSWFFLGEIYTSIPLPVDNAKEANLCGKCKACINVCPTNAFPEPYVLDAKKCISYQTIENKGIIPKELRSPMGNRVFGCDDCQIWCPWNRDPAITSEEVFQPRHKLDNASLLELFNWSESEFQEKTLGSPIRRIGYERWLRNLAIGLGNAPGCSNIVKSLKARMVNSSEMLKEHLHWALEEQNRKLNN

SEQ ID NO: 80817 - protein, 366 aa, Schlegelella thermodepolymerans
  REGION 1..366: note = tr|A0A2S5T2I9|A0A2S5T2I9_9BURK Epoxyqueuosine reductase OS=Schlegelella thermodepolymerans OX=215580; GN = queG PE=3 SV=1
MHQSKVVDHAALLDDIRQWAHELGFSQIGVSGVDLREAEPGLLAWLAAGFHGSMDYMAAHGLKRARPAELVPGTVSVITARMDYLPRGTPSGWQAVELARLQRPGEAVVSIYARGRDYHKVLRQRLQKLADRIAGRLGPFGHRVFTDSAPVLEVELASRSGLGWRGKHTLALHREAGSMFFLGEIYVDLALPASAATTAHCGSCTACLQACPTQAIVAPYRLDARRCISYLTIEHDGPIPPELRPLIGNRIYGCDDCQLACPWNKYAQVATLPDFDARPALTGRSLLELWAWSEADFLRHTEGSAIRRIGWRRWRRNLAVALGNALRHEPSAAIVQALQAARDDADALVREHVEWALAQRAQPQAS

SEQ ID NO: 80818 - protein, 337 aa, Schlegelella thermodepolymerans
  REGION 1..337: note = tr|A0A4R2MQA6|A0A4R2MQA6_9BURK Epoxyqueuosine reductase OS=Schlegelella thermodepolymerans OX=215580; GN = queG PE=3 SV=1
MSGVDLREAEPGLLAWLAAGFHGSMDYMAAHGLKRARPAELVPGTVSVITARMDYLPRGTPSGWQAVELARLQRPGEAVVSIYARGRDYHKVLRQRLQKLADRIAGRLGPFGHRVFTDSAPVLEVELASRSGLGWRGKHTLALHREAGSMFFLGEIYVDLALPASAATTAHCGSCTACLQACPTQAIVAPYRLDARRCISYLTIEHDGPIPPELRPLIGNRIYGCDDCQLACPWNKYAQVATLPDFDARPALTGRSLLELWAWSEADFLRHTEGSAIRRIGWRRWRRNLAVALGNALRHEPSAAIVQALQAARDDADALVREHVEWALAQRAQPQAS

SEQ ID NO: 80819 - protein, 315 aa, Schleiferia sp.
  REGION 1..315: note = tr|A0A401XNA3|A0A401XNA3_9FLAO Epoxyqueuosine reductase OS=Schleiferia sp. LA OX=2173829 GN=queG PE=3; SV = 1
MYYNSDIKNYLKKRAVELGFNDVRFSKAEFLTEEAPRLERWLKAGYHGEMLWMENHFDKRLDPRKLLDGCKTIAVLSHNYFPSQNLSLEKYKISKYAYGEDYHRVLKDKLHQLMAEVQEKFGSIGFKTFVDSAPVLERAWASRAGIGWVGKHSLMLTKGLGSFYFLATLLLDVALEADDPVTDHCGTCTRCIDACPTQAIVKPYIIDSNRCISYLTIEYRKELPQEYQDKMNGWIFGCDICQDVCPWNRFATPHSEPRFHPSSAIKQTKDEVIEQMEKELFDQLFSKSAVKRTKFQGLKRNIDFAVKGEENTQSL

SEQ ID NO: 80820 - protein, 321 aa, Schleiferia thermophila
  REGION 1..321: note = tr|A0A369A2Z5|A0A369A2Z5_9FLAO Epoxyqueuosine reductase OS=Schleiferia thermophila OX=884107 GN=queG; PE = 3 SV=1
MSNKIKEFIQKSAFKLGFFKIGFARAEFLEKEASLLETWLMRGYHGDMLWMENHFDKRLDPRLLLNGCKTVIMFAHNYYPSEKLKLNRFKISKYAYGEDYHNVLKDKLYKIASETTEKFGSFAYKIFVDSAPVMERAWAERSGIGWVGKHSLLLTKSTGSFYFLATMLVDLDLEPDAPVPDHCGNCTKCIDACPTEAILMPKLVDSNKCISYLTIEYRKELPDEYQSKMNGWIFGCDICQDVCPWNRFSTPHSEERFNPSEQLKQVTDDELYQMEKELYNQIFAKSAVKRTKFQGLRRNIDFIEDEDRKQKSRPDGRLPSL

SEQ ID NO: 80821 - protein, 323 aa, Schleiferia thermophila
  REGION 1..323: note = tr|A0A085L0I1|A0A085L0I1_9FLAO Epoxyqueuosine reductase OS=Schleiferia thermophila str. Yellowstone; OX = 1453500 GN=queG PE=3 SV=1
MSMSNKIKEFIQKSAFKLGFFKIGFARAEFLEKEASLLETWLMRGYHGDMLWMENHFDKRLDPRLLLNGCKTVIMFAHNYYPSEKLKLNRFKISKYAYGEDYHNVLKDKLYKIASETTEKFGSFAYKIFVDSAPVMERAWAERSGIGWVGKHSLLLTKSTGSFYFLATMLVDLDLEPDAPVPDHCGNCTKCIDACPTEAILMPKLVDSNKCISYLTIEYRKELPDEYQSKMNGWIFGCDICQDVCPWNRFSTPHSEERFNPSEQLKQVTDDELYQMEKELYNQIFAKSAVKRTKFQGLRRNIDFIEDEDRKQKSRPDGRLPSL

SEQ ID NO: 80822 - protein, 282 aa, Schwartzia succinivorans
  REGION 1..282: note = tr|A0A1M4SG79|A0A1M4SG79_9FIRM Epoxyqueuosine reductase QueG (Queuosine biosynthesis) OS=Schwartzia succinivorans DSM 10502 OX=1123243 GN=SAMN02745190_00125; PE = 4 SV= 1
MASEKARLKDKIVRKAKALDINLIGVAPVKRWQEQHLNDEEFWPQNIWPWAKNVIVLAMQIFPGMIETTPSVVYSELYNTTNRLLDDVSYRIANFLNEEGYRAHFFPRDCYGDISALVKRPEAAFSHVIAGYYAGLGTIGLNHTLITKKYGPRIRLVSIITDAELPASRMLKEDVCIRCQACIRACPMQAFTWKKGEPVANMDKHKCALYHQQLKQEFHYPCGRCAAACPVGLDKKRYGANAISAEGILHCRDFGAADAGEIKKQKGSVVRIAGRAAKKNFG

SEQ ID NO: 80823 - protein, 385 aa, unidentified
  source 1..385: note = Scopulibacillus darangshiensis
  REGION 1..385: note = tr|A0A4R2NB31|A0A4R2NB31_9BACL Epoxyqueuosine reductase OS=Scopulibacillus darangshiensis OX=442528; GN = queG PE=3 SV=1
MNDFRELKQKVIEHSKEIGIDKIGFTTADPFAELRARLYRQQSLGYQSGFEEDDIEKRVNPTLVMDGAQSVIAIALAYPAKMVERPKNTRSSRRGSFCRASWGKDYHAILRDRLTKLGDFIRKEVPEVKLKSMVDTGELSDRAVAERAGLGHAGKHTNVITKEYGSYVYLGEMITNIPFEPDEPATDLCGSCNLCVDHCPTGALVQGGQLNAQKCIAFLTQTKQDVPEYYKKAIGNRLYGCDTCQQVCPYNRGIDNHFHGEMEPEPEYVKPLLQPLLKMSNREFKEKYGHMAGSWRGKKPIQRNAIIALGNYKDVTAADTLMDVLKNDPRPVIRKSAAWALGNMIGRIPSGKKSGIFVGLKEVVYNEQDEDVFSEINNVLESMSD

SEQ ID NO: 80824 - protein, 322 aa, Scytonema hofmannii
  REGION 1..322: note = tr|A0A139XE76|A0A139XE76_9CYAN Epoxyqueuosine reductase OS=Scytonema hofmannii PCC 7110 OX=128403; GN = queG PE=3 SV=1
MNRSPGTRSSEIKEKALSLGFHKVGIVAVDGAESAENQRLQAWLALGYHSSMEWMTNPKRQDIFSVMPEVRSVICVALNYYTSHQRPEGQEYAKISRYAWGRDYHKVMHKKLKALTTWLQESDETVQARYYADTGPVQDKVWAQKAGIGWIAKNGNVITREYGSWVFLGEVLTNLELECDRPHTQHCGNCTRCMDACPTGAIIEPFVIDANRCIAYHTIENRNEELPETVKSNLQGWVAGCDICQDVCPWNQRFAKETDIPEFQPYPGNIAPKLVELAEISDRDWDKRFPASALRRIKPEMLRRNSRVNLDALKSMKGKDKA

SEQ ID NO: 80825 - protein, 319 aa, unidentified
  source 1..319: note = Scytonema millei
  REGION 1..319: note = tr|A0A4R4IQN2|A0A4R4IQN2_9CYAN Epoxyqueuosine reductase OS=Scytonema millei VB511283 OX=1245923 GN=queG; PE = 3 SV=1
MTNLTSDQIKQKALELGFHKVGIAAVEAVGTAERQRLQAWLQLGYQANMAWMANPKREDIRLVMPEVRSLICVALNYYTPHQHSTDLANAKISRYGWGRDYHKVLHKKLKALTQWLRSQAADIQTRFYADTGPIQDKAWAQQAGIGWIAKNGNVITREYGSWVFLGEVLTDLVLTPDRPHTQHCGNCTRCLEACPTQAITQPFVVDANRCIAYHTIENRAEQLPEAISSRLNGWVAGCDICQDVCPWNQRFARTTDINEFHPYPHNLAPKLTELATIEDGEWDRRFTGSALRRIKPEMLRRNARANLESSATIVYSDSL

SEQ ID NO: 80826 - protein, 318 aa, unidentified
  source 1..318: note = Scytonema millei
  REGION 1..318: note = tr|A0A1D2P6N5|A0A1D2P6N5_9CYAN Epoxyqueuosine reductase OS=Scytonema millei VB511283 OX=1245923 GN=queG; PE = 3 SV=1
MNRSPGTNSSEVKKKALELGFHKVGIAAVDGEEATQTQRLQAWLALGYQADMEWMANPKRQDIRQVMPEVQTIISVALNYYTPDQRPETEEYAKISRYAWGRDYHKVMHKKLKALTSWLQELHEGIQARYYADTGPVQDKVWAQKAGIGWIAKNGNVITREYGSWVFLGEVLTNLELESDRPHTEHCGSCTRCIEACPTGAITNPFVVDANRCIAYHTIENRNEELPQTLTPHLQGWVAGCDICQEVCPWNQRFANQTDVAEFEPYSGNLAPKLVELAQISDQEWDSQFPASALRRIKPEMLRRNARANLNALHKAKE

SEQ ID NO: 80827 - protein, 318 aa, Scytonema sp.
  REGION 1..318: note = tr|A0A1Z4ISW4|A0A1Z4ISW4_9CYAN Epoxyqueuosine reductase OS=Scytonema sp. HK-05 OX=1137095 GN=queG PE=3; SV = 1
MNRSPGTNSTEVKKKALELGFHKVGIAAVDGEDVTHRQRLQAWLALGYGADMEWMANPKRQDIRQVMPEVQTIISVALNYYTPQKRPEGTEYAKISRYAWGRDYHKVMHKKLKALTTWLQGLDEGIQGRYYADTGPVQDKVWAQKAGIGWIAKNGNVITREYGSWVFLGEVLTNLELESDRPHTEHCGSCTRCMEACPTGAITQPFVVDANRCIAYHTIENRNEELPQTVAPHLHGWVAGCDICQEVCPWNQRFAKETDVAEFEPYSGNVAPKLVELAQISDQEWDRQFPASALRRIKPEMLRRNARANLNAFHQGKE

SEQ ID NO: 80828 - protein, 318 aa, Scytonema sp.
  REGION 1..318: note = tr|A0A1Z4Q5E9|A0A1Z4Q5E9_9CYAN Epoxyqueuosine reductase OS=Scytonema sp. NIES-4073 OX=2005464 GN=queG; PE = 3 SV=1
MNRSPGTNSTEVKKKALELGFHKVGIAAVDGENVTQTQRLQAWLALGYGADMEWMANPKRQDIRQVMPEVQTIISVALNYYTAQKRPEGREYAKISRYAWGRDYHKVMHKKLKALTAWLQGLHEGIQARYYADTGPVQDKVWAQKAGIGWIAKNGNVITREYGSWVFLGEVLTNLQLESDRPHTEHCGSCTRCMEACPTAAITQPFVVDANRCIAYHTIENRNEELPQTVAPHLQGWVAGCDICQEVCPWNQRFAKETDVAEFEPYSGNVAPKLVELAQISDQEWDRQFPASALRRIKPEMLRRNARANLNAFHQGKE

SEQ ID NO: 80829 - protein, 318 aa, Scytonema tolypothrichoides
  REGION 1..318: note = tr|A0A0C2Q9W3|A0A0C2Q9W3_9CYAN Epoxyqueuosine reductase OS=Scytonema tolypothrichoides VB-61278; OX = 1233231 GN=queG PE=3 SV=1
MNQSPRTNSSEVKKKALELGFQKVGIAAINGENITETQKLQTWLALGYHADMEWMANPKRQDIRKVMPDVRTIISVALNYYTHHQRPETEEYAKISRYAWGRDYHKVMHKKLKALTTWLQELDEGIQARYYADTGPVQDKVWAQKAGLGWIAKNGNLITREYGSWVFLGEVLTNLELESDRPHTEHCGTCTRCIDACPTGAITQPFVVDANRCIAYHTIENRNEKLPQTVTSHLQGWVAGCDICQEVCPWNQRFAKETDVAEFEPYPGNVAPKLVELAQISDQQWDRQFPASALRRIKPDMLRRNARANLDAFPQAKE

SEQ ID NO: 80830 - protein, 305 aa, Sedimentibacter saalensis
  REGION 1..305: note = tr|A0A562J3M0|A0A562J3M0_9FIRM Epoxyqueuosine reductase OS=Sedimentibacter saalensis OX=130788; GN = LY60_03251 PE=4 SV=1
MLTYIQEALAGQGHKAAMTGIDILEKLQEDLRNLQNKEKLNDYQNRLIEERYDWELPKVDFEIKSILLVGKKNTITKLKFEYKGKEIPVIMPPGYNEYFNAPDRIEHFMQQLLGEKGYKCKATPMLPNKLLAARSGFAKYGRNNIVYIDGMGSFCQVYLFYTDIPVEEHPFSKELIMKRCATCGACIKVCPTGAIMKDRFLLDSKRCLTFLNENGGYPFPAWVDPKIHHALYGCNRCQEICPANREQLMNPVEEVLFSEEETKILLEGESIDTFPDRLKNEIKRLNIEEYLSVVPRNLNAIFDQS

SEQ ID NO: 80831 - protein, 367 aa, Sedimentibacter saalensis
  REGION 1..367: note = tr|A0A562JHA4|A0A562JHA4_9FIRM Epoxyqueuosine reductase OS=Sedimentibacter saalensis OX=130788; GN = LY60_00940 PE=4 SV=1
MKNIIADIAKKIGIDVIGFTDVVDYSYLQELLVSRKNNGLNSEFEEQNIKKRLDARNILPGCKSIIAIAVPYAEGYKKSQAPNKGLLSVVSYKEDYHRNVKKLLESLAFEMKNFFSFEYAACVDTTPLVDREICKNAGIGHYGKNSLLINENFGSFINLGYLLTDLEIKCVNSQSVDICNDCTICIKSCPNSAILKGGTIDATRCISGLTQTKKYIPLDYRKNMKNQIYGCDVCQLVCPKNKKILEKKTNEDYKILELNLEELLKISNAEFEQKYSSMSGSWRGKNVWKRNALISIANLKLVSLFEDVENELDNTSDMIKTYAYWALMELDSKKASDILNKRYDYENDIIKCEILKLLEVYHDSGNM

SEQ ID NO: 80832 - protein, 385 aa, Sedimentibacter sp.
  REGION 1..385: note = tr|A0A252CLE0|A0A252CLE0_9FIRM tRNA epoxyqueuosine(34) reductase QueG OS=Sedimentibacter sp. SX930 OX=1955060 GN=B0533_07050 PE=4 SV=1
MNFAALKAEIIEESKKLGIDKLGFTTAEPFEYMLESLKEQHSKGHTVGFEHPVLDERIYPDRIFEKPQSILSIALAYPSRMTEKAERTRGERRGNFSRASWGTDYHVILRERMDRLIAFIQEKIPEARFKPMVDTGELIDTVVAQRAGLGFIGRNGLLITREFGSYVYLGEIITDIPFPADDPGVFGCGECTRCVDFCPTGAILGNGQLNPKICLSYQTQTKGYMPEEYRKKISHVIYGCDICQQVCPYNRGMDHHLHPEMEPEPESVTPVLQPMLTISNREFKEQFGHLAGSWRGKKPLQRNAVIALANYRDRTAIPELLRMVEQDPRPVLRGTAAWAIAEIVREANPELLAFFSERLIIETDEETKAEMEKAYLKILDIKEAD

SEQ ID NO: 80833 - protein, 353 aa, Sedimenticola selenatireducens
  REGION 1..353: note = tr|A0A557SF16|A0A557SF16_9GAMM Epoxyqueuosine reductase OS=Sedimenticola selenatireducens OX=191960; GN = queG PE=3 SV=1
MSDTTITNYQTLAEQIRQWGVELGFQQVGIADTDLTLAEQHLHHWLDQGMHGNMTYMSQHGLKRSRPEALVPGTLRIISVRMDYLPPNDQPERVLADTQRAFISRYALGRDYHKLMRNRLQKLAKKIEDSVGPFGYRAFVDSAPVLERALAEKAGLGWTGKHSNIVNRKAGSWFFLGELYTTLPLPIDQAESDHCGRCTDCIDICPTQAIVAPYQVDARRCISYLTIELDGPIPESLRPLMGNRIFGCDDCLMACPWNRFATPAQADEFLPRHGLDNATLCSLFAWDEETFLKRFEGSPIRRIGYERWLRNIAVALGNAHTTPAVIDALKSRREDHSALVREHISWALQQHGE

SEQ ID NO: 80834 - protein, 355 aa, Sedimenticola selenatireducens
  REGION 1..355: note = tr|A0A2N6CVP7|A0A2N6CVP7_9GAMM Epoxyqueuosine reductase OS=Sedimenticola selenatireducens OX=191960; GN = queG PE=3 SV=1
MSEQTTTDYQALAEQIRQWGAALGFQQVGFADTDLTLAEQHLHQWLDHGMHGNMEYMASHGLKRSRPAELVPGTLRIISVRMDYLPPDDDPEAVLADSQRAFISRYALGRDYHTLMRNRLQKLANRIEAAVGPFGYRAFVDSAPVLERALAEKAGLGWTGKHSNIVNRQAGSWFFLGELYTTLPLPVDQPEADHCGRCAACIDICPTQAIIAPYQVDARRCISYLTIELDGPIPEELRPLMGNRIYGCDDCLMACPWNRFATAADEADFSPRNGLDNATLRSLFAWDEETFLKRLEGSPIRRIGHQRWLRNIAVALGNARTSAETLAALNSRRDDPSELVREHVRWALARHGEPQ

SEQ ID NO: 80835 - protein, 361 aa, Sedimenticola sp.
  REGION 1..361: note = tr|A0A2N6GEI5|A0A2N6GEI5_9GAMM Epoxyqueuosine reductase OS=Sedimenticola sp. OX=1940285 GN=queG PE=3 SV=1
MTPLDPNRASADPDQYHALARMIRQWAEELGFQQLGIADTNLAVAESHFEQWLDQGFHGEMEYMARHGQKRTRPQQLVPDTLRILSVRMDYLPANDNPWQVLEDDQLAYVSRYALGRDYHKLMRNRLQTLAKRIERQIGPFGYRVFVDSAPVLEKPLAEMAGLGWQGKHSNVLNRKAGGWFFLGEIYTDLPLPVDTAEHNHCGRCTACIDICPTAAIVEPYRVDARRCISYLTSEHPGSIPETLRPLMGNRIYGCDDCLLVCPWNRFATPSAEADFTPRNGLQSAKLTELFLWSEDDFLKRLEGSPIRRIGHTRWLRNIAVALGNTKADQAVTTALRQQAEHHSELVREHVLWALMQHPAT

SEQ ID NO: 80836 - protein, 353 aa, unidentified
  source 1..353: note = Sedimenticola thiotaurini
  REGION 1..353: note = tr|A0A0F7JYB7|A0A0F7JYB7_9GAMM Epoxyqueuosine reductase OS=Sedimenticola thiotaurini OX=1543721 GN=queG; PE = 3 SV=1
MSQQPSTDYQALAEQIRHWGAELGFQQVGFADTDLTLAEQHLHQWLDRGMHGSMTYMASHGVKRSRPAELVPGTLRIISVRMDYLPPDDDPRAALADPQRAFISRYALGRDYHKLMRNRLQKLANRIETAVGPFGYRAFVDSAPVLERALAEKAGLGWIGKHSNMVNRQAGSWFFLGELYTTLPLPTDRPEADHCGRCSACIDICPTQAIVAPYQVDARRCISYLTIELDGPIPEPLRPLMGNRIYGCDDCLMACPWNRFAKATKEADFHPRNGLDSATLCALFAWEEETFLKRLEGSPIRRIGHQRWLRNIAVALGNGETTAETLEALNSRRNDPSELVREHVQWALAQHLD

SEQ ID NO: 80837 - protein, 306 aa, unidentified
  source 1..306: note = Sedimentisphaera cyanobacteriorum
  REGION 1..306: note = tr|A0A1Q2HLI9|A0A1Q2HLI9_9BACT Epoxyqueuosine reductase OS=Sedimentisphaera cyanobacteriorum OX=1940790; GN = queG PE=4 SV=1
MKEDIRKYALEQGFLRAGFASAEDLPAENRQRFGKWLEAEMHENTGYLERNLDKRFSPAKLFKDAKSVIVFAAGYNKAQGEKPDSEQAGKICDYACFEDYHSKIKSRIFNIADFIRNKYKSDLKIKACVDSVPINERSEAVLAGLGFIGKNGMLIIPGKGCRVLLGLLISNLEIEPDEGVIENRCGSCRRCIEACPSGALGENGLLDCTKCISFQTIEKKTEMNREAEEALSEELFGCDRCIDVCPFNENQQSSFLKQRLNKWLLIDEILEMDSDTFSASFGGTVVERTGLEKLKRNAEAISGKKR

SEQ ID NO: 80838 - protein, 308 aa, unidentified
  source 1..308: note = Sedimentisphaera salicampi
  REGION 1..308: note = tr|A0A1W6LQC6|A0A1W6LQC6_9BACT Epoxyqueuosine reductase OS=Sedimentisphaera salicampi OX=1941349 GN=queG; PE = 4 SV=1
MKEEIRKYAMEQGFLKAGFTSAEDLPEQSRHRFVKWLEADMHEKTGYLERNIDKRFSPRILFKDAKSVIVFAAGYNKAEGEKPCFDLEGKICDYACFEDYHRKIKSKILNIAGFIRDNWKSDLKIKACVDSVPINERSEAVRAGLGFIGKNGMLIVPRAGCRILLGVLISNLEIEADEGIIEHSCGSCRRCIEACPSGALGEDGLLDCRKCISFQTIEKQAQMNPEAEAAVSDELFGCDKCIDVCPFNVKGQNSFLNQRLNKWLRIDDVLGMSSETFSASFGGTAIERTGLEKLKRNAEVIAGKKRQN

SEQ ID NO: 80839 - protein, 358 aa, unidentified
  source 1..358: note = Sedimentitalea nanhaiensis
  REGION 1..358: note = tr|A0A1I7DDW5|A0A1I7DDW5_9RHOB Epoxyqueuosine reductase OS=Sedimentitalea nanhaiensis OX=999627 GN=queG; PE = 3 SV=1
MGESLKQRLVARALQEGFVACRVCRPWDVPQVPERLAAFLQAGYHGQMGWMAERSHWRGDPSVLWPEARSAIMLAESYAPEHDPTGVLAQRERGAISVYAQNRDYHDLVKKRLKRLARWLIAECETVNATVAPARALRSPEVKVFVDTAPVPEKALGQAAGLGWQGKHTNLVSRDWGNWAFIGSIFTTLELPVDAPERDHCGSCRACMDVCPTEAFPAPYRLDARRCISYLTIEYKGPVDEDLRGKLGNHIYGCDDCLAACPWNKFAVAASDMRYAARDELIAPRLAELAVLDDAGFRALFSGSPIKRIGRDRFVRNVLYAIGNSGDAGLRAVARGLVEDADAAVADAARWAVKRLSA

SEQ ID NO: 80840 - protein, 350 aa, unidentified
  source 1..350: note = Sedimentitalea sp.
  REGION 1..350: note = tr|A0A3T0N7N7|A0A3T0N7N7_9RHOB Epoxyqueuosine reductase OS=Sedimentitalea sp. W43 OX=2483033 GN=queG; PE = 3 SV=1
MNMGSMLKKALVERALDEGFVSCRICRPWDVPEVPNRLAAYIDAEYHGQMGWMAERTHWRGDPALLWPEAQSVIMLAESYAPEHDPTEILQHRERGAISVYAQNKDYHDLVKKRLKRLARWLIETAKAKGSEAEVKVFVDTAPVPEKALGQAAGLGWQGKHSNLVSRDWGNWAFIGSVFTTLELPVDPAEPDRCGSCRSCLDACPTDAFVAPYQLDARRCISYLSIEYKGPVEEELRVKLGNRIYGCDDCLAACPWNKFAVAASDMRYAAREELKAPKLAELAMLDDAAFRAMFSGSPIKRIGRDRFIRNVLYAIGNSQDPSLRPVAQVLVDDPDAAVADAARWAAQRLA

SEQ ID NO: 80841 - protein, 379 aa, Sediminibacillus albus
  REGION 1..379: note = tr|A0A1G9C8V0|A0A1G9C8V0_9BACI Epoxyqueuosine reductase OS=Sediminibacillus albus OX=407036 GN=queG PE=3; SV = 1
MAYEELKQEIIDYSKSIGIDKIGFASVDVFTELKSRLEQQQDLGYQSGFEKGSIEERTNPAKLMPEAQSIVSIALAYPSRLKDAPKSKKGERRGLFCRASWGKDYHHILREKLEMLAEFIAGKVYAFNYKSMVDTGELSDRAVAERSGIGFSGKNTTIITPEFGSYVYLGEMITNIPFPPDQPVEDSCGECTKCIDSCPTGALIQGGQLNAQKCIAFLTQTKDFLPDEYRTKLGNRIYGCDTCQLVCPKNQKKDFHLHPEMEPDPEVVKPKLIPLLSMSNREFKEKFGEIAGSWRGKKPIQRNAIIALGHYREESSVNELIRLMESDPRPVIRGTAAWSLGKIGTEKAFAAIEAAKQKETDEQVLFEMEKGLRFQTVYS

SEQ ID NO: 80842 - protein, 382 aa, Sediminibacillus halophilus
  REGION 1..382: note = tr|A0A1G9W3M9|A0A1G9W3M9_9BACI Epoxyqueuosine reductase OS=Sediminibacillus halophilus OX=482461 GN=queG; PE = 3 SV=1
MAYEELKQEIIDYSKSIGIDKVGFASVDVFTELKSRLERQQDLGYQSGFEKGSVEERTNPVKLMPEAQSIISIALAYPSRLKDAPKSKKGERRGLFCRASWGKDYHDILRDKLEKLAAFLSEKVYGFNYRSMVDTGELSDRAVAERAGIGFSGKNTTLITPEFGSYVYLGEMITNVPFTPDEPVEDSCGECTKCIDACPTGALVQGGQLNAQKCIAFLTQTKDFLPDEYRGKLGNRIYGCDTCQLVCPKNRKKDFHLHPEMEPDPEVVKPKLVPLLSMSNREFKEKFGDIAGSWRGKKPIQRNAIIALGHYKEESAVEELIRLMKKDPRPVIRGTAAWSLGKIGTEEAFEAIEAAKQIETDEQVQFEMDKGLEFKETARQHA

SEQ ID NO: 80843 - protein, 310 aa, unidentified
  source 1..310: note = Sediminibacterium ginsengisoli
  REGION 1..310: note = tr|A0A1T4QHL9|A0A1T4QHL9_9BACT Epoxyqueuosine reductase OS=Sediminibacterium ginsengisoli OX=413434; GN = queG PE=3 SV=1
MDSTASHTTLIKSLAQELGFHYCGIAKAVRLDDDARRLEAWLNKGFHGQMQYMENHFDLRIDPSRLVPGAKSVITLLKNYYPSQEQKAGTPHIARYAFGKDYHEVIREQLNHFLHILRGKIGEIQGRGFVDSAPVLERSWATRSGAGWIGKNGNLITRQSGSFFFIATLIVDLPLEYDDPFAKDYCGSCRKCIDACPTDAIEPDKEINGSKCISYYTIELKDAMLPDNMKDKFDNWMFGCDVCQEVCPWNRFSKPHTEPAFTPIPEILNLSTSEWLEMSEITFREVFRHSPLKRSKFNGIRRNLNFLKND

SEQ ID NO: 80844 - protein, 313 aa, unidentified
  source 1..313: note = Sediminibacterium goheungense
  REGION 1..313: note = tr|A0A4R6J2H1|A0A4R6J2H1_9BACT Epoxyqueuosine reductase OS=Sediminibacterium goheungense OX=1086393; GN = queG PE=3 SV=1
MNTTNAYNHPVKQTAYKLGFDYCGIAKACVLDEDARRLEKWLHQNHHGSMQYMEKHFDLRIDPSKLVPGAKSVITVLKNYFPSKEQSSEAPRISKYAWGKDYHEVIRTQLQEFLNELRITYGDIQGRGFVDSAPVLERSWATRSGAGWIGKNGNLITKSSGSFFFIATLIVDIELPYDDPFAKDFCGTCRKCIDACPTDAILEDKTINGSKCISYFTIELKDALIPAEMKGKFENWMFGCDTCQDVCPWNRFSKPHTEENFDPIPAILNLSTREWETLSEDTFKKIFKDSPLKRSKFRGIQRNLHFLQNESHH

SEQ ID NO: 80845 - protein, 310 aa, Sediminibacterium sp.
  REGION 1..310: note = tr|A0A2M8JW81|A0A2M8JW81_9BACT Epoxyqueuosine reductase OS=Sediminibacterium sp. FEMGT703S OX=2080766; GN = queG PE=3 SV=1
MLQIQSNTQFVKSLSNELGFSYCGIAKAEQLTEDARKLEHWLNKGMHGKMQYMENHFDLRIDPTKLVPGALSVITLLKNYYPTEEQKPNTPLIAKYAWGKDYHEVIRATLKTFLASLRQKIGDINGRGFVDSAPVLERAWAVKSGLGWVGKNGNLIHKNAGSFFFIATLIVDIPLVYDDPLVKDYCGTCTKCITACPTEAILPNKQIDGSKCISYYTIELKDAMLNEGMKDQFQNWLFGCDICQDICPWNRFSKPHQEPAFEPIPAILNLSTSEWEELTEETFKTVFKDSPLKRAKFSGIKRNLRMIQSH

SEQ ID NO: 80846 - protein, 312 aa, Sediminicola luteus
  REGION 1..312: note = tr|A0A2A4G5G7|A0A2A4G5G7_9FLAO Epoxyqueuosine reductase OS=Sediminicola luteus OX=319238 GN=queG PE=3; SV = 1
MNLKQTYSDLIKTEAKRLGFLACGVSKADFLEEEAPRLEQWLQKGMHGQMGYMENHFDKRLDPRKLVPGAKSVVSLLLNYFPENQQRQDAYKISKYAYGQDYHHVIKGKLRELHHFITTEIGEVGGRAFVDSAPVLDKAWAAKSGLGWIGKHSNLLSKQTGSFYFIAELILDLDLEPDGPTTDHCGQCTACIDACPTQAIVAPYVVDGSRCISYFTIELKEAIPAEFKNQLDDWMFGCDVCQDVCPWNRFATPHNQSEFEPHPDLLNMGKSDWDEITEEVFRTVFKKSAVKRTKFSGLTRNIRFLHNHQNGK

SEQ ID NO: 80847 - protein, 306 aa, Sediminicola sp.
  REGION 1..306: note = tr|A0A0S1SG66|A0A0S1SG66_9FLAO Epoxyqueuosine reductase OS=Sediminicola sp. YIK13 OX=1453352 GN=queG; PE = 3 SV=1
MGTIQKHTELIKAEAKRLGFLSCGISKAEFLEEEAPRLEQWLNKNMHGEMGYMENHFDKRLDPRLLVDGAKSVISLLLNYYPQKEQNDDSYKLSKYAYGQDYHHVIKTKLKSLQEFITQEIGEVNGRAFVDSAPVLDKAWAAKSGLGWIGKHSNLLTQQVGSFYFIAELIVDLDLEYDSKVTDHCGTCTACLDACPTQAIVEPYVVDGSKCISYLTIELKNQIPSDFKGKMDDWMFGCDVCQDVCPWNRFSKSHNEPLFNPHPDLLSMTKKDWEEITEDVFKKVFQKSAVKRTKFSGLTRNIDFLK

SEQ ID NO: 80848 - protein, 317 aa, Sediminitomix flava
  REGION 1..317: note = tr|A0A315Z6S6|A0A315Z6S6_9BACT Epoxyqueuosine reductase OS=Sediminitomix flava OX=379075 GN=queG PE=3; SV = 1
MNHQLRKRTEWIKHKANELGFDFCGIAKADFLEEEAQGLEKWLTQGMHGKMSYMENHFDKRLDPRKLVPGAKSVVMLMLNYYPEKDLAQENELKIAKYAYGKDYHFIIKDKLKTFVDDIQAEIGEVDGRVFVDSAPVMERAWAQKSGLGWIGKNSLLLSKQNGSFYFLAELILDLELEADTPFTKDFCGRCTRCIDACPTDAIVKEGVVDGSKCLSYLTIELKDNIPSEFKGKTDNWIFGCDTCQDVCPWNRFSKPHSTSEFLPHEQLSQMKKEDWQEITREVFNEIFRKSAVKRTKLEGLERNIRFSLSPKEENLD

SEQ ID NO: 80849 - protein, 307 aa, Segetibacter aerophilus
  REGION 1..307: note = tr|A0A512BK52|A0A512BK52_9BACT Epoxyqueuosine reductase OS=Segetibacter aerophilus OX=670293 GN=queG; PE = 3 SV=1
MREKDTIWIKNKCRELGFDYCGIARAEKLDDDARRLETWLSEGMQGNMQYMENYFDLRTDPARLVPGAKSVITVLMNYFPSQTQSAEVPKIAKYAYGQDYHEVIREKLKQLLMMMKQEIGEVNGRGFVDSAPVLERAWATKSGLGWIGKNGNLLNKQAGSFFFIATLIVDLELVYDDPFAKDYCGSCRRCIAACPTDAILENKVVDGSKCISYFTIELKDALLPEHLKSQFSDWMFGCDVCQDVCPWNRFSKPNSEKQFTPLPQVLNFSSNDWEELTEESFKQIFKNSPLKRRKFEGIKRNLRFIKN

SEQ ID NO: 80850 - protein, 381 aa, Seinonella peptonophila
  REGION 1..381: note = tr|A0A1M4VH62|A0A1M4VH62_9BACL Epoxyqueuosine reductase OS=Seinonella peptonophila OX=112248; GN = SAMN05444392_102365 PE=4 SV=1
MKGQRLKDWIMKQAADIGIDQIGFASADPFDELRQRLVQHRELGYESGFEESDLDLRTSPSKNLPSVKTIIAIALAYPSRMKNPPQSAPGAYRGIFARASWGKDYHHVLRQKLDELANRIKERIPTAELMSMVDTGALSDRAVAQRAGIGWSGKNTSIITHKFGSWVYLGEMLTNLSIPPDQPIEDGCGDCNRCIEACPTGALVGPGQLNAKACIAFLTQTKESIPTAWRKKIGNRLYGCDTCQTVCPKNRKLSFTHQKDFAPDPERVKPLLKPLLKMSNREFRQQYCEMAGSWRGKKPIQRNAIIALAHFRDQSAIPDLAELLAYDPRPVIRQTAAWALGEIGGSQAEKALRKAEHEEDEQVVREEINQALQTLEQQNEK

SEQ ID NO: 80851 - protein, 372 aa, Selenihalanaerobacter shriftii
  REGION 1..372: note = tr|A0A1T4JQY0|A0A1T4JQY0_9FIRM Epoxyqueuosine reductase OS=Selenihalanaerobacter shriftii OX=142842; GN = SAMN02745118_00335 PE=4 SV=1
MTLTEEIKRHAKEIGIDDIRITDTEPFLEIREFLKKAKEQGYLSKFVHDDLELITDPKQVISKAKTVIVCAISYKVELEDDEQSNSGLRGKLSRFAWGQDYHRVLGDKLDQLIDFLHTKSDQVQAKKFVDTGPTVDRALARRSGIGWQGKNCSIINPEYGSWIFIGGVITNLELEIDSELEKECGECRECIESCPTGALKDDYTLDSNRCLGYITLSKGYLDEKDRKKIGTRLWGCDTCQEVCCHNQEVKSGNHPEFLPQTIEAYPHLPSLLKLTNKEYKEKFMPTPMNWRGKRSIQRNAAVILGNLKDDKAVPHLIEGLNDPKPIVRAHSAWALGEIGEVIAVEALKKALDKEKDQEVIGELEKAINRLTR

SEQ ID NO: 80852 - protein, 282 aa, unidentified
  source 1..282: note = Seleniivibrio woodruffii
  REGION 1..282: note = tr|A0A4R1K9A4|A0A4R1K9A4_9BACT Epoxyqueuosine reductase QueG OS=Seleniivibrio woodruffii OX=1078050; GN = C8D98_1804 PE=4 SV=1
MKQQLIKRIKDFLFNHPENLHPATGKKFYDEPDVFFASADDPIFEKFKDVVSPEHLTPKEIIELEYGEGSYSGGTVIVIVQAIQEDVRKSNRSRTEMASAEWAMSRAYGDEIFLKTRIKEIAGQLKEEGYKAVMPWLSDWFRVMRNKRDLTSNWSERHAAYAAGAGTFGLNDGFISDKGMSIRIMTIVTDLVIEPDVRQEGSHTRSCLFLSKGLCGACIKRCPADAISKDGHDKMKCYMFVYGEASKKFAVEAGGLEKAGSGCGLCQTKVPCEFRNPMAKIA

SEQ ID NO: 80853 - protein, 278 aa, unidentified
  source 1..278: note = Selenomonadales bacterium
  REGION 1..278: note = tr|A0A316QA77|A0A316QA77_9FIRM 4Fe-4S ferredoxin-type domain-containing protein; OS = Selenomonadales bacterium OX=2137878 GN=DBY09_07020; PE = 4 SV=1
MEEILERLGAFYACQILKDGKFFLLSAYGYNPFSEIPDNCIKIDAYYPASHRVYLTCRDFAAEIGGRVTNDISYKAAAYSTGEFFRGQNDLLIHRAYGSYFILNMIELEKPLEWPPVIFKETGEINCARCGRCQANCPSGAITPFGFKRASCLRDMADRMPEKDSFALLGDSLLGCEICRECCPYNAGIKKVPPPEELVRLAALDRILNFERETREGLSALIGSNMARASVLLPAAVAGVLRRRAWEYIPLVERLLEHGSEKVREAARLGMEFYKENA

SEQ ID NO: 80854 - protein, 265 aa, Selenomonas ruminantium
  REGION 1..265: note = tr|A0A1H0TJX2|A0A1H0TJX2_SELRU Epoxyqueuosine reductase QueG (Queuosine biosynthesis) OS=Selenomonas ruminantium OX=971 GN=SAMN05216366_12425 PE=4 SV=1
MPRSDRVKLKEKIKRRAKAMDINMLGIAPVERWEQEPHQSPDFWPQNIWPWSRNVIVMGMQIFPSMIETTPSVVYSELYNTTNRLLDHAAYRIANFLNEEGYRAHFFPRDCYGDISALVKRPEAAFSQVLAGLYAGLGTVGMNHTLLTKKYGSRIRLVSVITDADLPADKMLKEDICLGCKICVKACPMQVFSPVKGQIIARMDKHKCALCHQQLKQEFHYPCGRCIAACPVGEDKGRYGKEAISKEGILHCRDFGAADAGQVIA

SEQ ID NO: 80855 - protein, 265 aa, Selenomonas ruminantium
  REGION 1..265: note = tr|A0A1H3W8P5|A0A1H3W8P5_SELRU Epoxyqueuosine reductase QueG (Queuosine biosynthesis) OS=Selenomonas ruminantium OX=971 GN=SAMN05660648_00735 PE=4 SV=1
MPRSDRVKLKEAIKRRAKAMDINMLGIAPVERWEQEPHQSADFWPQNIWPWSRNVIVMGMQIMPSMIETTPSVVYSELYNTTNRLLDNAAYRIANFLNEAGYRAHFFPRDCYGDISALVKRPEAAFSQVLAGLYAGLGTVGMNHTLLTKKYGSRIRLVSVITDADLPADHMIKKDICVGCQICVRACPQQVFSPVPGQVIAKMDKHKCALCHQQLKQEFHYPCGRCIAACPVGEDKKRYGREAISAAGVLHCRDFGAADVGTIVR

SEQ ID NO: 80856 - protein, 307 aa, unidentified
  source 1..307: note = Seonamhaeicola algicola
  REGION 1..307: note = tr|A0A5C7AD39|A0A5C7AD39_9FLAO Epoxyqueuosine reductase OS=Seonamhaeicola algicola OX=1719036 GN=queG; PE = 3 SV=1
MNNKKQHYTTLIKTEAKRLGFLSCGISKATFLEEEAPRLEKWLNNNMHGEMRYMENHFDKRLDPTKLVEGSKSVVSLLLNYFPEETQTDSTLKLSKYAYGTDYHFVIKDKLKALLHFIHDEIGDVNGRAFVDSAPVLDKAWAAKSGLGWVGKHSNLLTQKVGSFYFIAELIIDLDLEYDAPTTNHCGTCTACIDACPTQAITEPYVVDGSKCISYFTIELKDNIPSEFKGKFDDWMFGCDVCQDVCPWNRFSKAHNEPLFNPHPELLSMSKKDWQEITEETFRKVFKKSAVKRTKFSGLTRNINFLK

SEQ ID NO: 80857 - protein, 307 aa, unidentified
  source 1..307: note = Seonamhaeicola aphaedonensis
  REGION 1..307: note = tr|A0A3D9HGW3|A0A3D9HGW3_9FLAO Epoxyqueuosine reductase OS=Seonamhaeicola aphaedonensis OX=1461338; GN = queG PE=3 SV=1
MTSKTKHTHLIKTEAKRLGFLSCGISKARFLEEEAPRLEKWLQQNMQGGMHYMENHFDKRLDPTKLVEGSKSIISLLLNYYPKQVQNPDSYKLSKYAYGTDYHFVIKDKLKSLLHFIQAEIGEVNGRAFVDSAPVLDKAWAAKSGLGWIGKHSNLLTQQVGSFYFIAELIIDLELEYDTPVTDHCGTCTACIDACPTEAIVEPYVVDGSKCISYFTIELKENIPSEFKGKFEDWMFGCDVCQDVCPWNRFSKAHSEPLFNPHPELLSMSKKDWEEITKETFQKFFKKSAVKRTKFSGLKRNIKFLKD

SEQ ID NO: 80858 - protein, 72 aa, unidentified
  source 1..72: note = Seonamhaeicola marinus
  REGION 1..72: note = tr|A0A5D0HJL6|A0A5D0HJL6_9FLAO DUF1730 domain-containing protein (Fragment) OS=Seonamhaeicola marinus OX=1912246 GN=FUA24_23220 PE=4 SV=1
RYMENHFDKRLDPTKLVEGSKSVVSLLLNYFPEETQTDSTLKLSKYAYGTDYHFVIKDKLKALLHFIHDEIG

SEQ ID NO: 80859 - protein, 64 aa, unidentified
  source 1..64: note = Seonamhaeicola marinus
  REGION 1..64: note = tr|A0A5D0J526|A0A5D0J526_9FLAO tRNA epoxyqueuosine(34) reductase QueG (Fragment); OS = Seonamhaeicola marinus OX=1912246 GN=FUA24_02880 PE=4; SV = 1
MNNKKQHYTTLIKTEAKRLGFLSCGISKATFLEEEAPRLEKWLNNNMHGEMRYMENHFDKRLDP

SEQ ID NO: 80860 - protein, 306 aa, unidentified
  source 1..306: note = Seonamhaeicola sp.
  REGION 1..306: note = tr|A0A5C7GIT0|A0A5C7GIT0_9FLAO Epoxyqueuosine reductase OS=Seonamhaeicola sp. 1505 OX=2591822 GN=queG; PE = 3 SV=1
MNNKSKYTQLIKTEAKRLGFLSCGISKAAFLEEEAPRLEHWLNQNMHGEMHYMENHFDKRLDPTKLVEGSKSVVSLLLNYFPEETQNKDSYKLSKYAYGTDYHFVIKDKLKSLLQFIKEEIGEVHGRAFVDSAPVLDKAWAAKSGLGWIGKHSNLLTQHFGSFYFIAELIIDLELDYDTPITDHCGTCTACIDACPTQAIVDPYVVDGSKCISYFTIELKDNIPSEFKGKFDDWMFGCDVCQDVCPWNRFSKSHNEPLFNPHPELLSMSKQDWEEITEQTFRKVFKKSAVKRTKFSGLQRNIDFLK

SEQ ID NO: 80861 - protein, 308 aa, unidentified
  source 1..308: note = Seonamhaeicola sp.
  REGION 1..308: note = tr|A0A562YFY9|A0A562YFY9_9FLAO Epoxyqueuosine reductase OS=Seonamhaeicola sp. W255 OX=2528206 GN=queG; PE = 3 SV=1
MMGAKSKYTKLIKTEAKRLGFLSCGISKAEFLEEEAPRLEKWLNQNMHGEMQYMENHFDKRLDPTKLVEDSKSVVSLLLNYFPSQEQTANSYKLSKYAYGTDYHFVIKDKLTALLHFIQDEIGEVHGRAFVDSAPVLDKAWAAKSGLGWIGKHSNLLTQQVGSFYFIAELIIDLELEYDTPVTGHCGTCTACIDACPTEAITEPYVVDGSKCISYFTIELKENIPSEFKGKFDDWIFGCDVCQDVCPWNRFSKPHNEPLFNPHPELLSMSKQDWEEITEETFRKVFKNSAVKRTKFNGLKRNINFLKD

SEQ ID NO: 80862 - protein, 297 aa, unidentified
  source 1..297: note = Serpentinicella alkaliphila
  REGION 1..297: note = tr|A0A4R2TDW4|A0A4R2TDW4_9CLOT Epoxyqueuosine reductase OS=Serpentinicella alkaliphila OX=1734049; GN = EDD79_102738 PE=4 SV=1
MKETLREYCLNLNIDSVGIAPIGPYGELKKILMARVNSNHLTGLEEQNIELRIDPKLTMAEAKSIIVCLFPYYICEQLESNLSKYTYGKDYHIVIKEKLDSIGQFLTNKIEGFKFQSYVDTGPLSDRYLAYLAGLGYFGINSHIITDKYGSYVFIGYIINNYYFEPDKPIEKTCIKCCDCIKMCPGQIILGNFDIDPRMCRAYITQIKRELSDDEVEVLKKGTLIYGCDICQEVCPHNKYIHTTNIDEFKENLIVNLNEEELRNISNKEFIRRYKDRAFAWRGKNVLLRNLEIMKNK

SEQ ID NO: 80863 - protein, 151 aa, unidentified
  source 1..151: note = Serpentinicella alkaliphila
  REGION 1..151: note = tr|A0A4R2T7E2|A0A4R2T7E2_9CLOT HEAT repeat protein; OS = Serpentinicella alkaliphila OX=1734049 GN=EDD79_103732; PE = 4 SV=1
MEIREVNGGRIHGCDVCQEVCPRKKKFLQTATKGDSFLDLLANELDLEKLLLMEDTYYEKIVHPIMYNYIKSKKVFQRNAAIALGNSQDEKHVLALTTALNTCDPMVREYAAWALGNIGGEMAKAKLEKELEHEQTDIVKEAINTALAKFQ

SEQ ID NO: 80864 - protein, 396 aa, unidentified
  source 1..396: note = Serpentinomonas mccroryi
  REGION 1..396: note = tr|A0A060NX09|A0A060NX09_9BURK Epoxyqueuosine reductase OS=Serpentinomonas mccroryi OX=1458426 GN=queG; PE = 3 SV=1
MFDAAQFVTQIQGWGRELGFSQIGVASVDLSSAEDGLRRWLEAGFHGEMGYMAAHGLKRARPAELVPGTLSVISARMDYLPSSHGPDWREQEWHGLQQPLQGSVALYARGRDYHKVLRQRLQRLAQRIEQGLQEQGGPTAAAPTDSSAAAQNPVSWRVFTDSAPVLEVELAQRSGLGWRGKHTLALSRDAGSMFFLGEIFLNFELPPSAAVSGHCGHCRACLDVCPTQAIVAPYRLDARRCIAYLTIEHAGPIAPELRPLIGSRIYGCDDCQLVCPWNKYAQRARVPDFEPREPLQAPELLRVWGWSQADFERHTEGTPIRRIGHERWLRNVAVALGNALAGGGLEPEQVQAIRAALASRLEDPSALVREHVRWALVPERGIEPPTFSLRMSCSTD

SEQ ID NO: 80865 - protein, 371 aa, unidentified
  source 1..371: note = Serpentinomonas raichei
  REGION 1..371: note = tr|A0A060NMJ1|A0A060NMJ1_9BURK Epoxyqueuosine reductase OS=Serpentinomonas raichei OX=1458425 GN=queG; PE = 3 SV=1
MGFSQIGVAGVDLRHAEAGLLQWLQAGFHGQMHYMAAHGLKRARPAELVPGTLSVITARMDYLPASGNPGWREQEWKTLQQPLQANVALYARGRDYHKVLRQRLRRLAERIEQSLREQGGPCESMFKAAGQAAQQAPSWRVFTDSAPVLEVELAQRSGLGWRGKHTLALSREAGSMFFLGEIFLNFELPPTAPTSAHCGQCQACLEVCPTQAIVAPYRLDARRCIAYLTIEHTGPIAPELRPLIGNRIYGCDDCQLVCPWNKYAQRTSVPDFEPRAALQAPELLRVWAWSRAEFERHTEGSPIRRIGHERWLRNVAVALGNALASDGLEPQQAAAIQAALHARIEDTSPLVREHVRWALAQHPANPVEQDP

SEQ ID NO: 80866 - protein, 354 aa, Serratia ficaria
  REGION 1..354: note = tr|A0A240ANP6|A0A240ANP6_SERFI Epoxyqueuosine reductase OS=Serratia ficaria OX=61651 GN=queG PE=3 SV=1
MGICDTDLSAEEPRLQAWLDKQYHGEMAWMARHGMLRARPHELLPGTLRVISVRMNYLPAKAAFASTLQNPELGYVSRYALGRDYHKLLRQRLKKLGDQIQVYCGELNFRPFVDSAPVMERALASKAGIGWVGKHSLILNREAGSWFFLGELLIDLPLPVDKPQEEQCGRCVACITTCPTGAIVAPYTVDARRCISYLTIELEGAIPEEFRPLLGNRIYGCDDCQLICPWNRFSQLTDEDDFSPRAALHAPQLIDLFGWTEEKFLRITEGSAIRRIGHLRWLRNIAVALGNAPYQDEIVIALRARLKQDAMLDEHIDWALAQQLARREAQGVEVQTAQKKRLIRAVEKGLPRDA

SEQ ID NO: 80867 - protein, 414 aa, Serratia fonticola
  REGION 1..414: note = tr|A0A542BIL2|A0A542BIL2_SERFO Epoxyqueuosine reductase OS=Serratia fonticola OX=47917 GN=queG PE=3 SV=1
MPSVAAALDSACLIQSADQTECGKLVLYGFSLWLGMTHPLDLNQLAQHIKQWGQSLGFQQVGICDTDLSAEEPKLQAWLDKQYHGEMEWMARHGMLRARPHELLPGTLRVISVRMNYLPAKAAFATTLKNPELGYVSRYALGRDYHKLLRQRLKKLGDQIQAYCGELNFRPFVDSAPIMERALASKAGIGWVGKHSLLLNREAGSWFFLGELLIDLPLPVDPPQEEQCGRCVACITTCPTGAIVAPYTVDARRCISYLTIELEGAIPEAFRPLMGNRIYGCDDCQLICPWNRFAQLTDEEDFSPRAALHAPQLIELFGWSEEKFLRITEGSSIRRIGHLRWLRNIAVALGNAPYLDLIVGALQTRQGQDPMLDEHIDWALAQQLMRREALGIEVQTAQKKRLVRAIEKGLPRDA

SEQ ID NO: 80868 - protein, 379 aa, Serratia fonticola
  REGION 1..379: note = tr|U2MAW6|U2MAW6_SERFO Epoxyqueuosine reductase; OS = Serratia fonticola AU-P3(3) OX=1332070 GN=queG PE=3 SV=1
MTHPLDLDQLAQHIKQWGQSLGFQQVGICDTDLSTEEPRLQAWLDKQYHGEMEWMARHGMMRARPHELLPGTLRVISVRMNYLPAKAAFASTLNNSQLGYVSRYALGRDYHKLLRQRLKKLGDQIQAYCGELNFRPFVDSAPIMERALASKAGIGWVGKHSLILNRDAGSWFFLGELLIDLPLPVDKPQEEQCGRCVACITTCPTGAIVAPYTVDARRCISYLTIELEGAIPEEFRSLMGNRIYGCDDCQLICPWNRFSQLTDEDDFSPRAALHAPQLIELFGWNEEKFLRITEGSAIRRIGHLRWLRNIAVALGNAPYLDQIVISLQTRQGQDPMLDEHISWALAQQLARREALAVEVQTMQKKRLIRAVEKGLPRDA

SEQ ID NO: 80869 - protein, 379 aa, Serratia liquefaciens
  REGION 1..379: note = tr|A0A515D1M9|A0A515D1M9_SERLI Epoxyqueuosine reductase OS=Serratia liquefaciens OX=614 GN=queG PE=3 SV=1
MTHPLDLNQLAQHIKQWGQSLGFQQVGICDTDLSAEEPKLQAWLDKQYHGEMEWMARHGMLRARPHELLPGTLRVISVRMNYLPAKAAFASTLNNPELGYVSRYALGRDYHKLLRQRLKKLGDQIQAYCGELNFRPFVDSAPVMERALASKAGIGWVGKHSLILNREAGSWFFLGELLIDLPLPVDKPQDEQCGRCVACITTCPTGAIVAPYTVDARRCISYLTIELEGAIPEEFRPLLGNRIYGCDDCQLICPWNRFSQLTDEDDFSPRAALHAPQLIELFGWTEEKFLRITEGSAIRRIGHLRWLRNIAVALGNAPYQDAAVVALRSRLEQDAMLDEHIHWALEQQLARREAQGIEVQTTQKKRLIRAVEKGLPRDA

SEQ ID NO: 80870 - protein, 379 aa, Serratia liquefaciens
  REGION 1..379: note = tr|A0A484YTG6|A0A484YTG6_SERLI Epoxyqueuosine reductase OS=Serratia liquefaciens OX=614 GN=queG PE=3 SV=1
MSQPLDLVQLAQQIKQWGTELGFQQVGIADTDLSASEPKLQAWLDKQYHGEMEWMARHGMMRARPHELLPGTLRVISVRMNYLPANAAFARTLKDPTLGYVSRYALGRDYHKLLRNRLKKLGEKIQEHCASLNFRPFVDSAPILERPIAEKAGLGWTGKHSLILSHDAGSFFFLGELLIDLPLPVDSPVAEECGRCVACMTICPTGAIVEPYTVDARRCISYLTIELEGAIPEEFRPLIGNRIYGCDDCQLICPWNRFSQLTDEEDFSPRKALHAPPLVELFAWSEAWFLKVTEGSAIRRIGHLRWLRNIAVALGNAPWDEAHLRALESRRGEHPLLDEHIEWAIAQQLKKRNADAVEVQLPKKLRLVRVVEKGLPRDA

SEQ ID NO: 80871 - protein, 379 aa, Serratia marcescens
  REGION 1..379: note = tr|A0A1C3HM37|A0A1C3HM37_SERMA Epoxyqueuosine reductase OS=Serratia marcescens OX=615 GN=queG PE=3 SV=1
MTHPLDLHQLAQHIKQWGQSLGFQQVGICDTDLSLEEPKLQAWLDKQYHGEMEWMARHGMLRARPHELLPGTLRVISVRMNYLPAKAAFASTLQNPQMGYVSRYALGRDYHKLLRQRLKKLGDQIQEYCGELNFRPFVDSAPVMERALAAKAGIGWVGKHSLILNREAGSWFFLGELLIDLPLPVDKPQEEQCGRCVACITTCPTGAIVAPYTVDARRCISYLTIELEGAIPEEFRPLLGNRIYGCDDCQLICPWNRFSQLTDEDDFSPRAALHAPQLLDLFNWTEEKFLRITEGSAIRRIGHLRWLRNIAVALGNAPYEDGIVLALRARLGQDAMLDEHIHWALAQQLARREAQGIEVQTAQKKRLIRAVEKGLPRDA

SEQ ID NO: 80872 - protein, 379 aa, Serratia marcescens
  REGION 1..379: note = tr|A0A3E2EFB7|A0A3E2EFB7_SERMA Epoxyqueuosine reductase OS=Serratia marcescens subsp. sakuensis; OX = 211760 GN=queG PE=3 SV=1
MTHPLDLHQLAQHIKQWGQSLGFQQVGICDTDLSLEEPKLQAWLDKQYHGEMEWMARHGMLRARPHELLPGTLRVISVRMNYLPAKAAFASTLQDSQLGYVSRYALGRDYHKLLRQRLKKLGDQIQEYCGELNFRPFVDSAPVMERALAAKAGIGWVGKHSLILNREAGSWFFLGELLIDLPLPVDQPQEEQCGRCVACITTCPTGAIVAPYTVDARRCISYLTIELEGAIPEEFRPLLGNRIYGCDDCQLICPWNRFSQLTDEDDFSPRAALHAPQLIDLFNWTEEKFLRITEGSAIRRIGHLRWLRNIAVALGNAPYEDGVVLALRTRLGQDSMLDEHIHWALAQQLARREAQGIEVQTAQKKRLIRAVEKGLPRDA

SEQ ID NO: 80873 - protein, 379 aa, Serratia nematodiphila
  REGION 1..379: note = tr|A0A5C7D820|A0A5C7D820_9GAMM Epoxyqueuosine reductase OS=Serratia nematodiphila OX=458197 GN=queG PE=3; SV = 1
MTHPLDLHQLAQHIKQWGQSLGFQQVGICDTDLSLEEPKLQAWLDKQYHGEMEWMARHGMLRARPHELLPGTLRVISVRMNYLPAKAAFASTLQNPQLGYVSRYALGRDYHKLLRQRLKKLGDQIQEYCGELNFRPFVDSAPVMERALAAKAGIGWVGKHSLILNREAGSWFFLGELLIDLPLPVDQPQEEQCGRCVACITTCPTGAIVAPYTVDARRCISYLTIELEGAIPEEFRPLLGNRIYGCDDCQLICPWNRFSQLTDEDDFSPRAALHAPQLLDLFNWTEEKFLRITEGSAIRRIGHLRWLRNIAVALGNAPYEDGVVLALRTRLGQDSMLDEHIHWALAQQLARREAQGIEVQTAQKKRLIRAVEKGLPRDA

SEQ ID NO: 80874 - protein, 345 aa, Serratia odorifera
  REGION 1..345: note = tr|A0A3S4E676|A0A3S4E676_SEROD Epoxyqueuosine reductase OS=Serratia odorifera OX=618 GN=queG PE=3 SV=1
MEEPKLQAWLDKQYHGEMEWMARHGMLRARPHELLPGTLRVISVRMNYLPAKAAFATTLNNPQLGYVSRYALGRDYHKLLRQRLKKLGEQIQDYCGELNFRPFVDSAPVMERALASKAGIGWVGKHSLILNREAGSWFFLGELLIDLPLPVDQPQEEQCGRCVACITTCPTGAIVAPYTVDARRCISYLTIELEGAIPEEFRPLLGNRIYGCDDCQLICPWNRFSQLTDEDDFSPRAALHAPQLIDLFGWSEEKFLRITEGSAIRRIGHLRWLRNIAVALGNAPYQDSVVLALRSRVGEHPLLDEHIHWALEQQLARRAQQGVEVQGSQKKRLIRAVQKGLPRDA

SEQ ID NO: 80875 - protein, 366 aa, Serratia odorifera
  REGION 1..366: note = tr|D4DY88|D4DY88_SEROD Epoxyqueuosine reductase; OS = Serratia odorifera DSM 4582 OX=667129 GN=yjeS PE=3 SV=1
MTHPLDLNQLAQHIKQWGQSLGFQQVGICDTDLSMEEPKLQAWLDKQYHGEMEWMARHGMLRARPHELLPGTLRVISVRMNYLPAKAAFATTLNNPQLGYVSRYALGRDYHKLLRQRLKKLGEQIQDYCGELNFRPFVDSAPVMERALASKAGIGWVGKHSLILNREAGSWFFLGELLIDLPLPVDQPQEEQCGRCVACITTCPTGAIVAPYTVDARRCISYLTIELEGAIPEEFRPLLGNRIYGCDDCQLICPWNRFSQLTDEDDFSPRAALHAPQLIDLFGWSEEKFLRITEGSAIRRIGHLRWLRNIAVALGNAPYQDSVVLALRSRVGEHPLLDEHIHWALEQQLARRAQQGVEVQGSQKND

SEQ ID NO: 80876 - protein, 379 aa, unidentified
  source 1..379: note = Serratia oryzae
  REGION 1..379: note = tr|A0A1S8CIM2|A0A1S8CIM2_9GAMM Epoxyqueuosine reductase OS=Serratia oryzae OX=2034155 GN=queG PE=3 SV=1
MTHPLDLAQLAQHIKQWGQSLGFQQVGICDTDLSVEEPKLQAWLDKQYHGEMAWMARHGMLRARPHELLPGTLRVISVRMNYLPAKAAFASTLQNAQLGYVSRYALGRDYHKLLRQRLKKLGEQIQAYCGELNFRPFVDSAPVMERALAAKARIGWVGKHSLILNREAGSWFFLGELLIDLPLPVDRPQEEQCGRCVACITTCPTGAIVAPYTVDARRCISYLTIELEGPIPEEFRSLMGNRIYGCDDCQLICPWNRFSQLTDEDDFSPRAALHAPQLIDLFSWNEEKFLRITEGSAIRRIGHLRWLRNIAVALGNAPYQDRIVIALRARQGENAMLDEHIHWALQQQLARREAQGITVQSQQKKRLIRAVEKGLPRDA

SEQ ID NO: 80877 - protein, 232 aa, Serratia plymuthica
  REGION 1..232: note = tr|A0A2X4U4C2|A0A2X4U4C2_SERPL Epoxyqueuosine reductase OS=Serratia plymuthica OX=82996 GN=queG_1 PE=4; SV = 1
MASKAGIGWVGKHSLILNREAGSWFFLGELLIDLPLPVDEPQPEQCGRCVACITTCPTGAIVAPYTVDARRCISYLTIELEGAIPEEFRPLLGNRIYGCDDCQLICPWNRFSQLTDEDDFSPRAALHAPQLIELFGWTEEKFLRITEGSAIRRIGHLRWLRNIAVALGNAPYQDAVVIALRSRLSQNPMLDEHIDWALEQQLARREAQGIEVQTTQKKRLIRAVEKGLPRDA

SEQ ID NO: 80878 - protein, 379 aa, Serratia plymuthica
  REGION 1..379: note = tr|S4YAZ4|S4YAZ4_SERPL Epoxyqueuosine reductase; OS = Serratia plymuthica S13 OX=1348660 GN=queG PE=3 SV=1
MTHPLDLNQLAQHIKQWGQSLGFQQVGICDTDLSAEEPKLQAWLDKQYHGEMEWMARHGMLRARPHELLPGTLRVISVRMNYLPAKAAFASTLNNPQLGYVSRYALGRDYHKLLRQRLKKLGDQIQAYCGELNFRPFVDSAPVMERALASKAGIGWVGKHSLILNREAGSWFFLGELLIDLPLPVDEPQPEQCGRCVACITTCPTGAIVAPYTVDARRCISYLTIELEGAIPEEFRPLLGNRIYGCDDCQLICPWNRFSQLTDEDDFSPRAALHAPQLIELFGWTEEKFLRITEGSAIRRIGHLRWLRNIAVALGNAPYQDAVVIALRSRLSQDPMLDEHIDWALEQQLARREAQGIEVQTTQKKRLIRAVEKGLPRDA

SEQ ID NO: 80879 - protein, 379 aa, Serratia proteamaculans
  REGION 1..379: note = tr|A0A4Z0E2W4|A0A4Z0E2W4_9GAMM Epoxyqueuosine reductase OS=Serratia proteamaculans OX=28151 GN=queG PE=3; SV = 1
MTHPLDLNQLAQHIKQWGQSLGFQQVGICDTDLSAEEPKLQAWLDKQYHGEMEWMARHGMLRARPHELLPGTLRVISVRMNYLPAKAAFASTLQNPELGYVSRYALGRDYHKLLRQRLKKLGDQIQAYCGELNFRPFVDSAPVMERALASKAGIGWVGKHSLILNREAGSWFFLGELLIDLPLPVDEPQQEQCGRCVACITTCPTGAIVAPYTVDARRCISYLTIELEGAIPEEFRPLLGNRIYGCDDCQLICPWNRFSQLTDEDDFSPRAALHAPQLIELFDWTEEKFLRITEGSAIRRIGHLRWLRNIAVALGNAPYQDAIVMALRSRLEQDAMLDEHIHWALKQQLARREAQGIEVQTMQKKRLIRAVEKGLPRDA

SEQ ID NO: 80880 - protein, 379 aa, Serratia proteamaculans
  REGION 1..379: note = tr|A8G8U3|A8G8U3_SERP5 Epoxyqueuosine reductase; OS = Serratia proteamaculans (strain 568) OX=399741 GN=queG; PE = 3 SV=1
MTHPLDLNQLAQHIKQWGQSLGFQQVGICDTDLSAEEPKLQAWLDKQYHGEMEWMARHGMLRARPHELLPGTLRVISVRMNYLPAKAAFASTLQNPELGYVSRYALGRDYHKLLRQRLKKLGDQIQAYCGELNFRPFVDSAPVMERALASKAGIGWVGKHSLILNREAGSWFFLGELLIDLPLPVDEPQQEQCGRCVACITTCPTGAIVAPYTVDARRCISYLTIELEGAIPEEFRPLLGNRIYGCDDCQLICPWNRFSQLTDEDDFSPRAALHAPQLIELFAWTEEKFLRITEGSAIRRIGHLRWLRNIAVALGNAPYQDAIVIALRSRLEQDAMLDEHIHWALKQQLGRREEQGIEVQTMQKKRLIRAVEKGLPRDA

SEQ ID NO: 80881 - protein, 379 aa, Serratia quinivorans
  REGION 1..379: note = tr|A0A2X2GE84|A0A2X2GE84_9GAMM Epoxyqueuosine reductase OS=Serratia quinivorans OX=137545 GN=queG PE=3; SV = 1
MTHPLDLNQLAQHIKQWGQSLGFQQVGICDTDLSAEEPKLQAWLDKQYHGEMEWMARHGMLRARPHELLPGTLRVISVRMNYLPAKAAFASTLQNPELGYVSRYALGRDYHKLLRQRLKKLGDQIQAYCGELNFRPFVDSAPVMERALASKAGIGWVGKHSLILNREAGSWFFLGELLIDLPLPVDKPQQEQCGRCVACITTCPTGAIVAPYTVDARRCISYLTIELEGAIPEEFRPLLGNRIYGCDDCQLICPWNRFSQLTDEDDFSPRAALHAPQLIELFDWTEEKFLRITEGSAIRRIGHLRWLRNIAVALGNAPYQDAIVIALRSRLEQDAMLDEHIHWALEQQLGRREAQGIEVQTTQKKRLIRAVEKGLPRDA

SEQ ID NO: 80882 - protein, 379 aa, Serratia quinivorans
  REGION 1..379: note = tr|A0A4Q8DDN7|A0A4Q8DDN7_9GAMM Epoxyqueuosine reductase OS=Serratia quinivorans OX=137545 GN=queG PE=3; SV = 1
MTHPLDLNQLAQHIKQWGQSLGFQQVGICDTDLSAEEPKLQAWLDKQYHGEMEWMARHGMLRARPHELLPGTLRVISVRMNYLPAKAAFASTLQNPNLGYISRYALGRDYHKLLRQRLKKLGDQIQAYCGELNFRPFVDSAPVMERALASKAGIGWVGKHSLILNREAGSWFFLGELLIDLPLPVDEPQQEQCGRCVACITTCPTGAIVAPYTVDARRCISYLTIELEGAIPEEFRPLLGNRIYGCDDCQLICPWNRFSQLTDEDDFSPRAALHAPQLIDLFGWTEEKFLRITEGSAIRRIGHLRWLRNIAVALGNAPYQDAVVMALRSRLEQNAMLDEHIHWAIEQQWIRREAQGVEVQTMQKKRLVRAVEKGLPRDA

SEQ ID NO: 80883 - protein, 340 aa, Serratia rubidaea
  REGION 1..340: note = tr|A0A2X5FH09|A0A2X5FH09_SERRU Epoxyqueuosine reductase OS=Serratia rubidaea OX=61652 GN=queG PE=3 SV=1
MQAWLDKQYHGEMEWMARHGMLRARPHELLPGTLRVISVRMNYLPAKAAFASTLNNPQLGYVSRYALGRDYHKLLRQRLKKLGEQIQQYCGELNFRPFVDSAPIMERPLAAKAGIGWVGKHSLILNREAGSWFFLGELLVDLPLPVDQPQEEQCGRCVACITTCPTGAIVEPYTVDARRCISYLTIELEGAIPEEFRPLMGNRIYGCDDCQLICPWNRFSQLTDETDFSPRAALHAPQLIDLFSWSEEKFLRITEGSAIRRIGHLRWLRNIAVALGNAPYQEAILSALRTRLGQSELLDEHIEWALQQQLARRTEHRIEVQSPQKKRLIRAVEKGLPRDA

SEQ ID NO: 80884 - protein, 104 aa, Serratia rubidaea
  REGION 1..104: note = tr|A0A4U9HAD1|A0A4U9HAD1_SERRU Epoxyqueuosine reductase OS=Serratia rubidaea OX=61652 GN=queG_2 PE=4 SV=1
MARHGMLRARPHELLPGTLRVISVRMNYLPAKAAFASTLNNPQLGYVSRYALGRDYHKLLRQRLKKLGEQIQQYCGELNFRPFVDSAPIMERPLAAKAGIWLGW

SEQ ID NO: 80885 - protein, 379 aa, Serratia sp.
  REGION 1..379: note = tr|A0A2I5TGH4|A0A2I5TGH4_SERS3 Epoxyqueuosine reductase OS=Serratia sp. (strain ATCC 39006) OX=104623; GN = queG PE=3 SV=1
MTYPYDLNELAQLIKQWGQSLGFQQVGICDTDLSHEEPRLQAWLDKQYHGEMAWMARHGMLRTRPHELLPGTLRVISVRMNYLPAKAAFANTLKNPHLGYVSRYALGRDYHKLLRQRLKKLGDMIQAYCGKLQFRPFVDSAPIMERPLAAKAGLGWVGKHSLILNRSAGSWFFLGELLIDLPLPLDNPVKEACGKCVACMTICPTGAIVEPYTVDARRCISYLTIELEGVIPEALRPLIGNRIYGCDDCQLICPWNRFSQLTDEVDFSPRAALHAPELLDLFGWDEDKFLRITEGSSIRRIGHLRWLRNIAVALGNAPYEDHIVLALRSRLGENNVLDEHIQWAIAQQLSRREQSALDILPAQKKRLIRAIEKGLPRDG

SEQ ID NO: 80886 - protein, 379 aa, Serratia sp.
  REGION 1..379: note = tr|A0A1B3FJB6|A0A1B3FJB6_9GAMM Epoxyqueuosine reductase OS=Serratia sp. YD25 OX=1759437 GN=queG PE=3 SV=1
MTHPLDLHQLAQHIKQWGQSLGFQQVGICDTDLSLEEPKLQAWLDKQYHGEMEWMARHGMLRARPHELLPGTLRVISVRMNYLPAKAAFASTLQNPQLGYVSRYALGRDYHKLLRQRLKKLGDQIQEYCGELNFRPFVDSAPVMERALAAKAGIGWVGKHSLILNREAGSWFFLGELLIDLPLPVDQPQEEQCGRCVACITTCPTGAIVAPYTVDARRCISYLTIELEGAIPEEFRPLLGNRIYGCDDCQLICPWNRFSQLTDEDDFSPRAALHTPQLIDLFNWTEEKFLRITEGSAIRRIGHLRWLRNIAVALGNAPYEDSIVLALRARLEQDAMLDEHIHWALAQQLARREAQGIEVQTAQKKRLIRAVEKGLPRDA

SEQ ID NO: 80887 - protein, 379 aa, Serratia ureilytica
  REGION 1..379: note = tr|A0A5C7C2Y4|A0A5C7C2Y4_9GAMM Epoxyqueuosine reductase OS=Serratia ureilytica OX=300181 GN=queG PE=3; SV = 1
MTHPLDLHQLAQHIKQWGQSLGFQQVGICDTDLSLEEPKLQAWLDKQYHGEMEWMARHGMLRARPHELLPGTLRVISVRMNYLPAKAAFASTLQNPQLGYVSRYALGRDYHKLLRQRLKKLGDQIQAYCGELNFRPFVDSAPVMERALAAKAGIGWVGKHSLILNREAGSWFFLGELLIDLPLPVDQPQEEQCGRCVACITTCPTGAIVAPYTVDARRCISYLTIELEGAIPEEFRPLLGNRIYGCDDCQLICPWNRFSQLTDEDDFSPRAALHAPQLIDLFSWTEEKFLRITEGSAIRRIGHLRWLRNIAVALGNAPYEDSIVLALRTRLDQDAMLDEHIHWALAQQLARREAQGIEVQTAQKKRLIRAVEKGLPRDA

SEQ ID NO: 80888 - protein, 393 aa, Shewanella algae
  REGION 1..393: note = tr|A0A1S2TD63|A0A1S2TD63_9GAMM Epoxyqueuosine reductase OS=Shewanella algae OX=38313 GN=queG PE=3 SV=1
MSAPQPPQFDPCMLGKLARDIKAWGKELGFAQVGITDTDLRREEPRLQAWLDKGYHGEMGYMASHGMMRARPAELHPGTLRVISVRMDYLPPEAGFALNLKDPNLGYISRYAGGRDYHKLMRNRLKKLGERIDEALKTLQLEGSGFRPFVDSAPILERPLAEKAGIGWTGKHSLILNHEAGSWFFLGELLVNLPLPLDVAIAEGCNTCVACITSCPTGAIVEPYVVDGRRCISYLTIELAGSIPLEFRPLLGNRIYGCDDCQLVCPFNRAAPLTAETDFHLRPQLKQPKLLELFAWSETEFLKNTEGSAIRRIGHERWLRNIAVALGNAPGSETIVVALQARLTDASELVAEHITWALAQQAEKLSGKDTVPIPARKTGRLIRIVEKGLPRDA

SEQ ID NO: 80889 - protein, 393 aa, Shewanella algae
  REGION 1..393: note = tr|A0A3G4UV45|A0A3G4UV45_9GAMM Epoxyqueuosine reductase OS=Shewanella algae OX=38313 GN=queG PE=3 SV=1
MSAPQPPQFDPGMLGKLARDIKAWGKELGFAQVGITDTDLRREEPRLQAWLDKGYHGEMGYMASHGMMRARPAELHPGTLRVISVRMDYLPPQAGFALNLKDPNLGYISRYAGGRDYHKLMRNRLKKLGERIDEALKALQLEGCGFRPFVDSAPILERPLAEKAGIGWTGKHSLILNHEAGSWFFLGELLVNLPLPMDVAIAEGCNTCVACITSCPTGAIVEPYVVDGRRCISYLTIELAGSIPPEFRPLLGNRIYGCDDCQLVCPINRAAPLTAETDFHLRPQLKQPKLLELFAWSEAEFLKNTEGSAIRRIGHERWLRNIAVALGNAPGSETIVAALQERLTDASELVAEHIEWALAQQAEKLSANDTAPIPARKTGRLIRIVEKGLPRDA

SEQ ID NO: 80890 - protein, 385 aa, Shewanella amazonensis
  REGION 1..385: note = tr|A1S8X1|A1S8X1_SHEAM Epoxyqueuosine reductase; OS = Shewanella amazonensis (strain ATCC BAA-1098 / SB2B); OX = 326297 GN=queG PE=3 SV=1
MTSTPSHAQLNDLARQIKAWGKALGFAELGITDTDLSAQEPRLLEWLTQGYHGEMAYMESHGLMRARPQELHPGTIRVIAARMDYLPENAGFATNLRDPNLGYISRYAGGRDYHKLIRNRLKKLGEQIDSWLIERGYAPANFRPFVDSAPILERPLAEKAGLGWTGKHSLILNHQAGSWFFLGELLVNLPLPIDIPIAEDCNTCVACIKSCPTDAIVAPYVVDGRRCISYLTIELQGAIPEEFRPLMGNRIYGCDDCQLACPVNSGSPLSNEADFQTRQPLKLPALLSLFAWDEATFLRQTEGSAIRRIGHKRWLRNIAVALGNAPASGDILSALNARLRDKEVDEMVAEHIHWAIKRQQSVLSKDSRKTARLVRAIEKGMPRDA

SEQ ID NO: 80891 - protein, 398 aa, Shewanella atlantica
  REGION 1..398: note = tr|A0A431W2N9|A0A431W2N9_9GAMM Epoxyqueuosine reductase OS=Shewanella atlantica OX=271099 GN=queG PE=3; SV = 1
MSNTPVSQSSFYTLSSGDLTRLAQQIKQWGQELGFAQIGICDTDLTQQEPQLQQWLDSGYHGDMGYMESHGMMRARPHELHPGTKRVISARMDYLPPEAGFATNLSDPNLAYISRYAGGRDYHKMIRNRLKKLGQMIESELVNLGACKPGFRPFVDSAPVLERPLADKAGLGWTGKHSLLLNEDAGSWFFLGELFIDLPLPVDIPVVEGCNTCVACIKSCPTNAIIEPYVVDGRRCISYLTIELQGAIPEEFRPLIGNRIYGCDDCQLVCPVNSKAPLTNEHDFHTREPLIQPQLLNLFSWSEAEFLKITEGSPIRRIGHKRWLRNIAVALGNAPGSEDIITALEQRKASEEVDEMVIEHIDWALAQQQEKQVQEPASPNRKTQRVIRSVEKGLPRDA

SEQ ID NO: 80892 - protein, 395 aa, Shewanella baltica
  REGION 1..395: note = tr|A0A379YBE3|A0A379YBE3_9GAMM Epoxyqueuosine reductase OS=Shewanella baltica OX=62322 GN=queG PE=3 SV=1
MSTLANQIPNQSYASTLSRLALQIKSWGKALGFAQVGICDTDLTAEEAKLQAWLDKGFHGEMAYMATHGMMRARPQELHPGTVRVISVRMDYLPPEAGFATNLTDPNLGYISRYAGGRDYHKLIRARLKKLGDQISAELVALGFDAADFRPFVDSAPVLERPLAEKAGIGWTGKHSLILNHEAGSWFFLGELLINLPLPVDIPIQEGCNSCVACITSCPTGAIVEPYVVDGRRCISYLTIELQGAIPEEFRPLMGNRIYGCDDCQLVCPINRQAPLTAETDFHIRPQLKQPDLLSLFAWSEAEFLKQTEGSAIRRIGHKRWLRNIAVALGNAPSSPEIIQALSIRKEQADVDNIVKEHIDWALIQHQSKSPQLITARRKTERLIRTVKKGLPRDA

SEQ ID NO: 80893 - protein, 395 aa, Shewanella baltica
  REGION 1..395: note = tr|G0B0W7|G0B0W7_9GAMM Epoxyqueuosine reductase; OS = Shewanella baltica BA175 OX=693974 GN=queG PE=3 SV=1
MSTLANQIPNQSYASTLSRLALQIKTWGKTLGFAQVGICDTDLTAEEAKLQAWLDKGFHGEMAYMATHGMMRARPQELHPGTVRVISVRMDYLPPEAGFATNLTDPNLGYISRYAGGRDYHKLIRARLKKLGDQISAELVALGFDAADFRPFVDSAPVLERPLAEKAGIGWTGKHSLILNHEAGSWFFLGELLINLPLPVDIPIQEGCNSCVACITSCPTGAIVEPYVVDGRRCISYLTIELQGAIPEEFRPLMGNRIYGCDDCQLVCPINRQAPLTAETDFHIRPQLKQPDLLSLFAWSEAEFLKQTEGSAIRRIGHKRWLRNIAVALGNAPSSPEIIQALSIRKEQADVDNIVKEHIDWALIQHQSKSPQLITARRKTERLIRTVKKGLPRDA

SEQ ID NO: 80894 - protein, 440 aa, Shewanella benthica
  REGION 1..440: note = tr|A0A330MAM4|A0A330MAM4_9GAMM Epoxyqueuosine reductase OS=Shewanella benthica OX=43661 GN=yjeS PE=3 SV=1
MYNPMSDTALPPINSHPFSPVELRELTAKIKQWGIELGFAQIGICDTDLTSEELKLQQWLDKGYHGDMAYMEAHGMMRARPHELHPGTIRVISARMNYLPPQAGFATNLKDPNLAYISRYAGGRDYHKLIRNRLKKLGQMIQAELDIINAGKTNFRPFVDSAPILERPLAEKAGLGWTGKHSLLLNEDVGSWFFIGELLIDLPLPVDIPVAEACNTCVACIKSCPTNAIVEPYIVDGRRCISYLTIELQGAIPEEFRPLIGNRIYGCDDCQLVCPVNSKAPITLESDFHTRDPLKQPELLTLFGWTEAEFLKITEGSPIRRIGHKRWLRNIAVALGNAPASEKIVQGLQQKKTSEEADEMVIEHIDWALAQQHARLAAAQSSEAQSLEAQSLETKGQETAALSPVARVLNQSARVQKTSSLSRKTQRVIRSVEKGLPRDA

SEQ ID NO: 80895 - protein, 431 aa, Shewanella benthica
  REGION 1..431: note = tr|A9CW53|A9CW53_9GAMM Epoxyqueuosine reductase; OS = Shewanella benthica KT99 OX=314608 GN=queG PE=3 SV=1
MSDTALPPINSHPFSPAELRELTAKIKQWGIELGFAQIGICDTDLTSEEPKLQQWLDKGYHGDMAYMQAHGMMRARPHELHPGTIRVISARMNYLPPQAGFATNLKDPNLAYISRYAGGRDYHKLIRNRLKKLGQMIQAELDIMNAGKTNFRPFVDSAPILERPLAEKAGLGWTGKHSLLLNEEVGSWFFLGELLIDLPLPVDIPVAEACNTCVACIKSCPTNAIVEPYIVDGRRCISYLTIELQGAIPEEFRPLIGNRIYGCDDCQLVCPVNSKAPITLESDFHTRDPLKQPELLTLFGWTEAEFLKITEGSPIRRIGHKRWLRNIAVALGNAPASEKIVQGLQQRKASEEADEMVIEHIDWALTQQHARLAAAQSPEAQSLETKGQETAALSPVARVLSQSDRVQKTSSLSRKTQRVIRSIEKGLPRDA

SEQ ID NO: 80896 - protein, 391 aa, unidentified
  source 1..391: note = Shewanella bicestrii
  REGION 1..391: note = tr|A0A220URY0|A0A220URY0_9GAMM Epoxyqueuosine reductase OS=Shewanella bicestrii OX=2018305 GN=queG PE=3; SV = 1
MSITTPSNIPDAATLSRLALQIKHWGKALGFAQIGICDTDLTAEEAKLQTWLDKGYHGEMGYMATHGMMRARPHELHPGTVRVISARMDYLPPEAGFATNLASPNMGYISRYAGGRDYHKLIRARLKKLGDQISSELVALGFDAADFRPFVDSAPVLERPLAEKAGIGWTGKHSLILNHDAGSWFFLGELLINLPLPVDIPIQEDCNTCVACITSCPTGAIVEPYTVDARRCISYLTIELQGAIPEEFRPLMGNRIYGCDDCQLVCPVNREAPLTQESDFHIRPKLKQPELLTLFAWSETEFLKQTEGSAIRRIGHQRWLRNIAVALGNAPSSPQIIAALEQRKAQADVDEMVKEHIDWALARQHAGGSQANNRKTERLVRVIQKGLPRDA

SEQ ID NO: 80897 - protein, 398 aa, Shewanella canadensis
  REGION 1..398: note = tr|A0A3S0LNU8|A0A3S0LNU8_9GAMM Epoxyqueuosine reductase OS=Shewanella canadensis OX=271096 GN=queG PE=3; SV = 1
MSDTPVSPSSFYTLSPSDLTRLALQIKQWGQELGFAQIGICDTDLTAQEPQLQQWLDNGYHGGMGYMESHGMMRARPHELHPGTTRVISARMDYLPPEAGFATNLSDPNLAYISRYAGGRDYHKMIRNRLKKLGQMIEAELVNLGGSKPGFRPFVDSAPILERPLADKAGLGWTGKHSLLLNQDAGSWFFLGELFIDLALPVDIPVVEGCNTCVACIKSCPTNAIGEPYIVDGRRCISYLTIELQGAIPEEFRPLIGNRIYGCDDCQLVCPVNSKAPLTNEHDFHTRDPLKHPQLLTLFGWSEAEFLKITEGSPIRRIGHKRWLRNIAVALGNAPASEKILEGLKQKKISEEVDEMVIEHIDWALAQQQEKQDQEQASPNRKTQRVIRSVEKGLPRDA

SEQ ID NO: 80898 - protein, 381 aa, Shewanella chilikensis
  REGION 1..381: note = tr|A0A2V4VZC5|A0A2V4VZC5_9GAMM Epoxyqueuosine reductase OS=Shewanella chilikensis OX=558541 GN=queG PE=3; SV = 1
MLGKLARDIKAWGKELGFAQVGITDTDLRREEPRLQTWLDKGYHGEMGYMASHGMMRARPAELHPGTLRVISVRMDYLPPQAGFALNLKDPNLGYISRYAGGRDYHKLMRNRLKKLGERIDEALKALQLEGCGFRPFVDSAPILERPLAEKAGIGWTGKHSLILNHEAGSWFFLGELLVNLPLPVDVAIAEGCNTCVACITSCPTGAIVEPYVVDGRRCISYLTIELAGSIPLEFRPLLGNRIYGCDDCQLVCPINRAAPLTAETDFHLRPQLKQPKLLELFAWSEVEFLKNTEGSAIRRIGHQRWLRNIAVALGNAPGSETIVAALQERLTDASELIAEHITWALAQQAEKLSGKNTAPIPVRKTDRLIRIVEKGLPRDA

SEQ ID NO: 80899 - protein, 391 aa, Shewanella colwelliana
  REGION 1..391: note = tr|A0A1E5IV30|A0A1E5IV30_SHECO Epoxyqueuosine reductase OS=Shewanella colwelliana OX=23 GN=queG PE=3 SV=1
MSIPSPMHQMLSQQQLAKLAQQIKTWGKALGFAQIGICDTDLSTEEGKLQTWLDNGYHGEMNYMAAHGMMRARPNELHPGTTRVISARMDYLPPEAGFATNLSDPNLAYISRYAGGRDYHKMIRNRLKKLGQQIEAELIELGFASPNFRPFVDSAPILERPLADKAGLGWTGKHSLLLNQDAGSWFFLGELLIDVPLPVDIPIQEECNTCVACIKSCPTNAIVEPYVVDGRRCISYLTIELQGAIPDEFRALIGNRIYGCDDCQLVCPVNSQAPITQENDFHTRDILKQPQLTTLFAWSEAEFLSYTEGSAIRRIGHKRWLRNIAVALGNAPHSPAIIDALLKRRSSEEVDEMVVEHIDWALTQQQSSCAAISRKTARVIRAVEKGLPRDA

SEQ ID NO: 80900 - protein, 393 aa, Shewanella decolorationis
  REGION 1..393: note = tr|A0A5B8QTF2|A0A5B8QTF2_9GAMM Epoxyqueuosine reductase OS=Shewanella decolorationis OX=256839 GN=queG; PE = 3 SV=1
MSTTVTSPANIPDAATLSRLAMQIKTWGKALGFAQIGICDTDLTAEEVKLQAWLDKGYHGEMGYMATHGMMRARPHELHPGTVRVISARMDYLPPEAGFATNLASPNMGYISRYAGGRDYHKLIRARLKKLGDQISSELVSLGFDAADFRPFVDSAPVLERPLAEKAGIGWTGKHSLILNHDAGSWFFLGELLINLPLPVDIPIQEDCNTCVACITSCPTGAIVEPYTVDARRCISYLTIELQGAIPEEFRPLMGNRIYGCDDCQLVCPVNREAPLTQESDFHIRPKLKQPELLTLFAWSETEFLKQTEGSAIRRIGHQRWLRNIAVALGNAPSSPQIITALEQRKAQADVDDMVKEHIDWALAQQHSRSSPAKNRKTERLVRVIQKGLPRDA

SEQ ID NO: 80901 - protein, 393 aa, Shewanella decolorationis
  REGION 1..393: note = tr|V1DEC6|V1DEC6_9GAMM Epoxyqueuosine reductase; OS = Shewanella decolorationis S12 OX=1353536 GN=queG PE=3; SV = 1
MSTTVTSPANIPDAATLSRLAMQIKTWGKALGFAQIGICDTDLTAEEVKLQAWLDKGYHGEMGYMETHGMMRARPHELHPGTVRVISARMDYLPPEAGFATNLASPNMGYISRYAGGRDYHKLIRARLKKLGDQISSELVSLGFDAADFRPFVDSAPVLERPLAEKAGIGWTGKHSLILNYDAGSWFFLGELLINLPLPVDIPIQEDCNTCVACITSCPTGAIVEPYTVDARRCISYLTIELQGAIPEEFRPLMGNRIYGCDDCQLVCPVNREAPLTQESDFHIRPKLKQPELLTLFAWSETEFLKQTEGSAIRRIGHQRWLRNIAVALGNAPSSPQIITALEQRKAQADVDDMVKEHIDWALAQQHSRSSPANNRKTERLVRVIQKGLPRDA

SEQ ID NO: 80902 - protein, 415 aa, Shewanella denitrificans
  REGION 1..415: note = tr|Q12RA3|Q12RA3_SHEDO Epoxyqueuosine reductase; OS = Shewanella denitrificans (strain OS217 / ATCC BAA-1090 / DSM 15013) OX=318161 GN=queG PE=3 SV=1
MSSNESQTLATISPTALSQLARYIKQWGQELGFAQVGITDTDLSEEEAKLQDWLDKGYHGEMGYMANHGMMRARPHELHQGTKRVVSLRMDYLPPSAGFATNLIDPTLGYISRYAGGRDYHKLMRQRIKKLGDKIEAYCQEQGFGATDSRPFVDSAPVMERPLAEKAGIGWTGKHSLILNHNAGSWFFLGELFINLPLPLDIPISDGCNTCVACIKSCPTGAIVEPYVVDGRRCISYLTIELQGAIPEEFRPLMGNRIYGCDDCQLVCPINAQAPLTQEHDFHIRQQILQPELLTLFNWSEKTFLSLTEGSAIRRIGHKRWLRNIAIALGNAPANPNIIEALSARKASDEVDDMVLEHINWALAQQQAKVQQQTKVQQQAKVQQAVQFEPARETPAQRKTARVVRSVEKGLPRDA

SEQ ID NO: 80903 - protein, 387 aa, Shewanella fodinae
  REGION 1..387: note = tr|A0A4R2F7Q0|A0A4R2F7Q0_9GAMM Epoxyqueuosine reductase OS=Shewanella fodinae OX=552357 GN=queG PE=3 SV=1
MSTTAIDPHWLNQLARDIKTWGQQLGFAKVGICDIDLSAEEPKLQQWLDAGFHGEMHYMAQHGMMRARPQELHPGTLRVIAVRMDYLPPDAGFASNLSDPELAYISRYAGGRDYHKLLRNRLKKLGERINQALAEANLGDSGFRPFVDSAPILERPLAAKAGIGWTGKHSLLLSREAGSWFFLGELLINLPLPVDIPLAEGCGSCVACITSCPTGAIVAPYTVDARRCISYLTIELAGAIPEELRPLLGNRIYGCDDCQLVCPVNRQAPLTQEADFYTRTSLQQPQLLTLLGWDEATFLQNTEGSAIRRIGYERWQRNIAVALGNAPASEQIIQALRQRLQGASELLAEHLHWALQRQLRATTEDDTHQRKTQRVIRAVQKGLPRDA

SEQ ID NO: 80904 - protein, 383 aa, Shewanella frigidimarina
  REGION 1..383: note = tr|A0A106BY65|A0A106BY65_SHEFR Epoxyqueuosine reductase OS=Shewanella frigidimarina OX=56812 GN=queG; PE = 3 SV=1
MTAAQLDVLNRQIKLWGKELGFAHIGVADVDLSQHEAALQDWLDKGYHGEMGYMANHGMMRARPAELHPGAIRVICARMDYLPPDAGFASNLTDPNLGYISRYAGGRDYHKLIRQRLKKLGDKINQYCQQLNFDATDFRPFVDSAPILERPLADKAGLGWTGKHSLILHPDAGSWFFLGELLINLPLPLDIPIEEGCNTCVACIKSCPTDAIVEPYVVDARRCISYLTIELQGAIPKEFRPLIGNRIYGCDDCQLVCPVNAKAPLTKETDFHTRTALIQPDLLTLFAWSEPYFLSQTEGSAIRRIGHKRWLRNIAIALGNAPANPAIIEALEQRKHSEEVDDMVLEHIEWALVQQIQKAPQSALSRKTQRVIRSIQKGLPRDA

SEQ ID NO: 80905 - protein, 428 aa, Shewanella frigidimarina
  REGION 1..428: note = tr|Q086Y2|Q086Y2_SHEFN Epoxyqueuosine reductase; OS = Shewanella frigidimarina (strain NCIMB 400) OX=318167; GN = queG PE=3 SV=1
MSKLSKTRIILACLLNDSVMTTTTAALTPNPIPDLGTDLTTEPCPLTAAQLDVLNRQIKLWGKELGFAHIGVADVDLSQHEAALQDWLDKGYHGEMGYMANHGMMRARPAELHPGAIRVICARMDYLPPDAGFASNLTDPNLGYISRYAGGRDYHKLIRQRLKKLGDKINQYCQQLDFDATDFRPFVDSAPILERPLADKAGLGWTGKHSLILHPDAGSWFFLGELLINLPLPLDIPIEEGCNTCVACIKSCPTDAIVEPYVVDARRCISYLTIELQGAIPEEFRPLIENRIYGCDDCQLVCPVNAKAPLTKETDFHTRTTLIQPDLLTLFAWSETYFLNQTEGSAIRRIGHKRWLRNIAIALGNAPANPAIIEALEQRKHSEEVDDMVLEHIEWALVQQIQKAPQSALSRKTQRVIRSIQKGLPRDA

SEQ ID NO: 80906 - protein, 414 aa, Shewanella halifaxensis
  REGION 1..414: note = tr|B0TRR0|B0TRR0_SHEHH Epoxyqueuosine reductase; OS = Shewanella halifaxensis (strain HAW-EB4) OX=458817; GN = queG PE=3 SV=1
MSDSPSQLAAIDTLTATQLGELALNIKAWGQELGFAQIGICDTDLSAEEPKLQQWLDKGYHGDMGYMANHGMMRARPHELHPGTKRVISARMNYLPPEAGFAFNLKNPNLGYISRYAGGRDYHKMIRNRLKKLGDRIEAELKLLGVDKPNSRPFVDSAPILERPLADKAGLGWTGKHSLLLNQDAGSWFFLGELLIDLPLPVDIPVSEGCNTCVACIKSCPTNAIVEPYVVDGSRCISYLTIELQGAIPVEFRQAIGNRIYGCDDCQLVCPVNAKAPLTEESDFHTRPSLKQPQLVELFAWSEAIFLKLTEGSPIRRIGHSRWLRNIAVALGNAPYSEAIIAALETRKLSSEVDEMVMEHIDWALEQQHQKLEPQAAHSLNLSLGLNESTSSHSLSRKTQRIIRCIEKGLARDA

SEQ ID NO: 80907 - protein, 398 aa, Shewanella hanedai
  REGION 1..398: note = tr|A0A553JF95|A0A553JF95_SHEHA Epoxyqueuosine reductase OS=Shewanella hanedai OX=25 GN=queG PE=3 SV=1
MSETASVLSNSSSLTPSELSQLALKIKQWGKELGFAQIGICDTDLTEEEPKLQQWLDKGYHGDMGYMEAHGMMRARPYELHPGTIRVISARMDYLPPQAGFATNLQDPNLAYISRYAGGRDYHKLIRNRLKHLGQRIQAELDTLDAGKTNFRPFVDSAPILERPLADKAGLGWTGKHSLLLNEDAGSWFFLGELLIDLPLPVDIPVKEGCNTCVACIKSCPTNAIVAPYIVDGRRCISYLTIELQGAIPEEFRSLIGNRIYGCDDCQLVCPVNSKAPLTIESDFHTRDLLKQPKLLTLFNWGEAEFLKITEGSPIRRIGHQRWLRNIAVALGNAPASQAIIDALELRKQSDEVNELVIEHIEWALIQQRERLVQETFAPNRKTQRVIRSVEKGLPRDA

SEQ ID NO: 80908 - protein, 408 aa, Shewanella livingstonensis
  REGION 1..408: note = tr|A0A3G8LS03|A0A3G8LS03_9GAMM Epoxyqueuosine reductase OS=Shewanella livingstonensis OX=150120 GN=queG; PE = 3 SV=1
MTTTTPALTPDPITDLETHLTKPCPLTVAQLDVLNRQIKQWGKELGFAHIGVADIDLSQHEAGLQDWLDKGYHGEMNYMANHGMMRARPNELHPGTLRVICARMDYLPPDAGFASNLTDPNLGYISRYAGGRDYHKMIRQRLKKLGDKITEHCQTLGFDDTDFRPFVDSAPILERPLADKAGLGWTGKHSLILHPDAGSWFFLGELLINLPLPLDIPIEEGCNTCVACIKSCPTDAIVAPYVVDARRCISYLTIELQGAIPEEFRPLIGNRIYGCDDCQLVCPVNAKAPLTQETDFHTRSVLIQPDLLSLFAWSESQFLSQTEGSAIRRIGHKRWLRNIAIALGNAPANPAIISALERRKDSQEIDDMVLEHIDWALLQQTQKAPLETLSRKTQRVIRSIQKGLPRDA

SEQ ID NO: 80909 - protein, 387 aa, Shewanella loihica
  REGION 1..387: note = tr|A3QH97|A3QH97_SHELP Epoxyqueuosine reductase; OS = Shewanella loihica (strain ATCC BAA-1088 / PV-4); OX = 323850 GN=queG PE=3 SV=1
MSDHSPLSPQALQQLALKIKTWGKALGFAQIGICDTDLRAEEPKFQAWLDKGYHGEMGYMESHGMMRARPQELHPGTVRVISARMDYLPPEAGFATHLKDPNLAYISRYAGGRDYHKMIRNRLKKLGQQIEAELETLGLERPNYRPFVDSAPILERPLADKAGLGWTGKHSLLLNHEAGSWFFLGELLIDLPLPVDIPVQADCNTCVACIKSCPTNAIVEPYVVDGRRCISYLTIELQGAIPEEFRPLMGNRIYGCDDCQLVCPVNGEAPLTQESDFHTRDPLKHPELLTLFAWNEAEFLKFTEGSAIRRIGHKRWLRNIAIALGNAPASQEIIAALEARRESDEVDEMVREHIDWALTRQRLGDYQANRKTQRVIRTVEKGLPRDA

SEQ ID NO: 80910 - protein, 391 aa, unidentified
  source 1..391: note = Shewanella mangrovi
  REGION 1..391: note = tr|A0A094JBW4|A0A094JBW4_9GAMM Epoxyqueuosine reductase OS=Shewanella mangrovi OX=1515746 GN=queG PE=3; SV = 1
MTNTPSPFDASLLNQLARDIKQWGQELGFAKVGICDIDLAAEEPILQQWLDKGYHGEMGYMASHGMMRARPAELHPGTVRVISVRMDYLPPQARFATNLKDPKMAYISRYAGGRDYHKLLRNRLKQLGERINQALAAFSLPDSGYRPFVDSAPILERPLAEKAGIGWTGKHSLILAEEAGSWFFLGELLINLPLPVDVAVTEQCGNCVACITSCPTGAIVEPYVVDARRCISYLTIELQGAIPEELRPLLGNRIYGCDDCQLVCPVNRAAPLTAEQDFHIRPQLQQMSLLTLFAWNEATFLKQTEGSAIRRIGHERWQRNIAVALGNAPFDDQIVAALTTAKVSASASTLVLEHIEWALQQQLHKQQTQSHDNRKQQRLLRIIEKGLPRDA

SEQ ID NO: 80911 - protein, 387 aa, Shewanella marisflavi
  REGION 1..387: note = tr|A0A4Y6IY63|A0A4Y6IY63_9GAMM Epoxyqueuosine reductase OS=Shewanella marisflavi OX=260364 GN=queG PE=3; SV = 1
MSHPSSLSPQALQQLALKIKQWGKALGFAQIGICDTDLSAEEAKLQAWLDKGYHGEMNYMASHGMMRARPAELHPGTTRVISARMDYLPPEAGFATHLKDPNLAYISRYAGGRDYHKMIRNRLKKLGQQIEAELTSLGLERPNYRPFVDSAPILERPLADKAGLGWTGKHSLLLNHEAGSWFFLGELLIDLPLPVDIPVKADCNTCVACIKSCPTNAIVEPYVVDGRRCISYLTIELQGAIPEEFRPLMGNRIYGCDDCQLVCPVNSEAPLTNESDFHTRDPLKYPQLLTLFAWSEAEFLKFTEGSAIRRIGHKRWLRNIAVALGNAPASKEIVAALETRRDSEEVDEMVREHIDWALARQANGGDQPNRKTQRVIRAVEKGLARDA

SEQ ID NO: 80912 - protein, 400 aa, Shewanella morhuae
  REGION 1..400: note = tr|A0A1N6VRB7|A0A1N6VRB7_9GAMM Epoxyqueuosine reductase OS=Shewanella morhuae OX=365591 GN=queG PE=3 SV=1
MSTLAPPSPSQSYASTLSRLALQIKTWGKALGFAQVGICDTDLSAEEVKLQTWLDKGYHGEMAYMANHGMMRARPQELHPGTVRVISVRMDYLPPEAGFAANLTDPNLGYISRYAGGRDYHKLIRARLKKLGDQISAELVALGFDAADFRPFVDSAPVLERPLAEKAGIGWTGKHSLILNHDAGSWFFLGELLINLPLPVDIPIQEGCNTCVACITSCPTGAIVAPYVVDGRRCISYLTIELQGAIPEEFRPLMGNRIYGCDDCQLVCPINRQAPLTVETDFHIRPKLKQPDLLNLFAWSEAEFLKQTEGSAIRRIGHKRWLRNIAVALGNAPASETIIAALHARQDNEEVDEIVREHIDWALNAQQARLADNELIVQQKARRKTERMVRIIEKGLPRDA

SEQ ID NO: 80913 - protein, 393 aa, Shewanella oneidensis
  REGION 1..393: note = tr|A0A2W5FC60|A0A2W5FC60_SHEOE Epoxyqueuosine reductase OS=Shewanella oneidensis OX=70863 GN=queG PE=3; SV = 1
MSTTATSPANIPDAATLSRLALQIKNWGKALGFAQIGICDTDLTAEEAKLEAWLDKGYHGEMAYMATHGMMRARPHELHPGTVRVISARMDYLPPEAGFATNLASPNMGYISRYAGGRDYHKLIRARLKKLGDQISSELVALGFDAADFRPFVDSAPVLERPLAEKAGIGWTGKHSLILNHDAGSWFFLGELLINLPLPVDIPIQEDCNTCVACITSCPTGAIVEPYTVDARRCISYLTIELQGAIPEEFRPLMGNRIYGCDDCQLVCPVNRKAPLTQESDFHIRPKLKQPELLTLFAWSETEFLKQTEGSAIRRIGHQRWLRNIAVALGNAPSSPQIIAALEQRKAQADVDEMVKEHIDWALVRQRAGGSQTNNRKTERLVRVIQKGLPRDA

SEQ ID NO: 80914 - protein, 393 aa, Shewanella oneidensis
  REGION 1..393: note = sp|Q8EAN7|QUEG_SHEON Epoxyqueuosine reductase; OS = Shewanella oneidensis (strain MR-1) OX=211586 GN=queG; PE = 3 SV=1
MSMTVTTSSNVSDAAMLSRLALQIKSWGKALGFAQIGICDTDLTAEEAKLQTWLDKGFHGEMAYMETHGMMRARPHELHSGTVRVISARMDYLPPEAGFATNLASPNMGYISRYAGGRDYHKLIRARLKKLGDQINSELVALGFDAADFRPFVDSAPVLERPLAEKAGIGWTGKHSLILNHDAGSWFFLGELLINLPLPVDIPVQEGCHSCVACITSCPTGAIVEPYTVDARRCISYLTIELQGAIPEEFRPLMGNRIYGCDDCQLVCPVNRAAPLTQESDFHIRPKLKQPELLTLFTWSETEFLKQTEGSAIRRIGHQRWLRNIAVALGNAPSSADIISALEQRKAQADVDEMVKEHIDWALAQQRAGDLQTNNRKTERLVRVIQKGLPRDA

SEQ ID NO: 80915 - protein, 407 aa, Shewanella pealeana
  REGION 1..407: note = tr|A8H7H3|A8H7H3_SHEPA Epoxyqueuosine reductase; OS = Shewanella pealeana (strain ATCC 700345 / ANG-SQ1); OX = 398579 GN=queG PE=3 SV=1
MSDTPSQLAPIDSLTSTQLGELALNIKVWGQELGFAQIGICDTDLSAEEPKLQAWLDKDYHGDMGYMANHGMMRARAYELHPGTVRVISARMNYLPPEAGFAFNLKDPNLGYISRYAGGRDYHKMIRNRLKKLGDRIEAELKELGISKPNSRPFVDSAPILERPLADKAGLGWTGKHSLLLNQDAGSWFFLGELLIDLPLPVDIPVVEGCNTCVACIKSCPTNAIVEPYIVDGSRCISYLTIELQGAIPVEFREAIGNRIYGCDDCQLVCPVNAKAPLTEESDFHTRASLKQPRLLELFAWSEAEFLKLTEGSPIRRIGHARWLRNIAVALGNAPSSEEIITALEARKLSSEVDEMVTEHIDWAVNQQRQKLEQQKAQPEATLTYNTQSRKTQRVIRSIEKGLPRDA

SEQ ID NO: 80916 - protein, 394 aa, Shewanella piezotolerans
  REGION 1..394: note = tr|B8CQU2|B8CQU2_SHEPW Epoxyqueuosine reductase; OS = Shewanella piezotolerans (strain WP3 / JCM 13877); OX = 225849 GN=queG PE=3 SV=1
MPNSDCELNPIIQISPETLRRLAEQVKVWGQELGFAQIGICDTDLTEEEPKLQQWLDNDYHGEMSYMANHGMMRARPHELHPGTRRVISARMDYLPPNAGFATNLKDPNLAYISRYAGGRDYHKMIRNRLKKLGDKIEVELKTLGFSQPNSRPFVDSAPILERPLADKAGLGWTGKHSLLLNSDAGSWFFLGELFIDLPLPVDVPVKADCNTCVACIKSCPTNAIVEPYIVDGRRCISYLTIELQGAIPTEFRQAIGNRIYGCDDCQLVCPVNSQAPITNEQDFHTRGPLQQPELLTLFAWSEAEFLKLTEGSAIRRIGHKRWLRNIAIALGNAPTNASIIAALESRKLSDEVDEMVIEHIDWALEQQRSKHAELSRKTQRVIRTVEKGLARDA

SEQ ID NO: 80917 - protein, 424 aa, Shewanella psychrophila
  REGION 1..424: note = tr|A0A1S6HVV1|A0A1S6HVV1_9GAMM Epoxyqueuosine reductase OS=Shewanella psychrophila OX=225848 GN=queG; PE = 3 SV=1
MSDTALPPINSHPFSATELRELTAKIKLWGNELGFAQIGICDTDLTSEEVKLQQWLDKGYHGDMAYMEAHGMMRARPHELHPGTIRVISARMNYLPPEAGFATNLQDPNLAYISRYAGGRDYHKLIRNRLKKLGQMIQAELDTINAGKTNFRPFVDSAPILERPLAEKAGLGWTGKHSLLLNEEVGSWFFLGELLIDLPLPVDIPVSEGCNTCVACIKSCPTNAIVEPYIVDGRRCISYLTIELQGAIPEEFRPLIGNRIYGCDDCQLVCPVNSKAPLTLETDFHTRDPLKQPQLLTLFSWTEAEFLKITEGSPIRRIGHKRWLRNIAVALGNAPASEKIIQGLEQRKASEEADEMVIEHIDWALAQQHTKLASILSLETQSLEKKGQVITTLSQSDRVQNASPLSRKTLRVIRSVEKGLPRDA

SEQ ID NO: 80918 - protein, 400 aa, Shewanella putrefaciens
  REGION 1..400: note = tr|A0A380AKS6|A0A380AKS6_SHEPU Epoxyqueuosine reductase OS=Shewanella putrefaciens OX=24 GN=queG PE=3; SV = 1
MSTLAPPSPSQSYASTLSRLALQIKNWGKALGFAQVGICDTDLSAEEVKLQTWLDKGYHGEMAYMANHGMMRARPQELHPGTVRVISVRMDYLPPEAGFAANLTDPNLGYISRYAGGRDYHKLIRARLKKLGDQISAELVALGFDAADFRPFVDSAPVLERPLAEKAGIGWTGKHSLILNHDAGSWFFLGELLINLPLPVDIPIQEGCNTCVACITSCPTGAIVAPYVVDGRRCISYLTIELQGAIPEEFRPLMGNRIYGCDDCQLVCPINRQAPLTVETDFHIRPKLKQPDLLNLFAWSEVEFLKQTEGSAIRRIGHKRWLRNIAVALGNAPASETIIAALHARQDNEEVDEIVREHIDWALNAQQARLADNELIVQQKARRKTDRMVRIIEKGLPRDA

SEQ ID NO: 80919 - protein, 400 aa, Shewanella putrefaciens
  REGION 1..400: note = tr|A4Y3H9|A4Y3H9_SHEPC Epoxyqueuosine reductase; OS = Shewanella putrefaciens (strain CN-32 / ATCC BAA-453); OX = 319224 GN=queG PE=3 SV=1
MSPSIYPKSNYPDAAILSRLAQQIKGWGKALGFARVGICDTDLTSEEIKLQTWLDKGYHGEMAYMASHGMMRARPQELHPGTVRVISVRMDYLPPEAGFATNLTDPNLGYISRYAGGRDYHKLIRARLKKLGDHISAELIALGFDAADFRPFVDSAPVLERPLAEKAGIGWTGKHSLILNHDSGSWFFLGELFINLPLPVDIPIQEACNTCVACMTSCPTGAIVEPYVVDGRRCISYLTIELQGAIPEEFRPLMGNRIYGCDDCQLVCPINRQAPLTTEIDFHIRPQLKQPDLLSLFAWSEAEFLKQTEGSAIRRIGHKRWLRNIAVALGNAPANPIILEALTNRQESADVDEMVLEHIQWAIDAQQSRLAASNTLVQQKSRRQTARMVRIIEKGLPRDA

SEQ ID NO: 80920 - protein, 398 aa, Shewanella sediminis
  REGION 1..398: note = tr|A8FZ57|A8FZ57_SHESH Epoxyqueuosine reductase; OS = Shewanella sediminis (strain HAW-EB3) OX=425104 GN=queG; PE = 3 SV=1
MSDTPVSQSNFYTLSPGDLTRLALQIKQWGQELGFAQIGICDTDLTAQEPQLQQWLDNGYHGEMGYMESHGMMRARPHELHPGTTRVISARMDYLPPKAGFATNLSDPNLAYISRYAGGRDYHKMIRNRLKKLGQMIEAELLNLGASKPGFRPFVDSAPILERPLAAKAGLGWTGKHSLLLNQDAGSWFFLGELFIDLALPVDIPVVEGCNTCVACIKSCPTNAIVEPYIVDGRRCISYLTIELQGAIPEEFRPLIGNRIYGCDDCQLVCPVNNKAPLTNEHDFHTRDPLKQPQLLTLFGWSEAEFLKITEGSPIRRIGHKRWLRNIAVALGNAPASNDIVTALEQRKTSEEVDEVVIEHIDWALTQQQEKQLQEQASPNRKTQRVIRSVEKGLPRDA

SEQ ID NO: 80921 - protein, 393 aa, Shewanella sp.
  REGION 1..393: note = tr|A0KT64|A0KT64_SHESA Epoxyqueuosine reductase; OS = Shewanella sp. (strain ANA-3) OX=94122 GN=queG PE=3 SV=1
MSTTVTSPANIPDAATLGRLALQIKTWGKALGFAQIGVCDTDLTAEELKLQAWLDKGYHGEMGYMATHGMMRARPHELHPGTVRVISARMDYLPPEAGFATNLASPNMGYISRYAGGRDYHKLIRARLKKLGDQISSELVSLGFDAADFRPFVDSAPVLERPLAEKAGIGWTGKHSLILNHDAGSWFFLGELLINLPLPVDIPIQEDCNTCVACITSCPTGAIVEPYTVDARRCISYLTIELQGAIPEEFRPLMGNRIYGCDDCQLVCPVNREAPLTKETDFHIRPKLKQPELLTLFAWSEAEFLKQTEGSAIRRIGHQRWLRNIAVALGNAPSSPQIIASLEQRKALVDVDDMVKEHIDWALAQQHSGSSPANNRKTERLVRVIQKGLPRDA

SEQ ID NO: 80922 - protein, 398 aa, Shewanella sp.
  REGION 1..398: note = tr|A0A550AH07|A0A550AH07_9GAMM Epoxyqueuosine reductase OS=Shewanella sp. YLB-08 OX=2593656 GN=queG PE=3; SV = 1
MSDSVFPLINSHPFTQAQLRSLTVKIKQWGQELGFAQIGICDTDLTAEEPKLQEWLDKGYHGDMNYMQAHGMMRARPHELHPGTIRVISARMNYLPPEAGFAANLKDPNLAYISRYAGGRDYHKMIRNRLKKLGQMIQAELDTMDAGKTNFRPFVDSAPILERPLADKAGLGWTGKHSLLLNQEAGSWFFLGELFIDLPLPVDIPIEEGCNTCVACIKSCPTNAIVEPYIVDGRRCISYLTIELQGAIPEEFRSLIGNRIYGCDDCQLVCPVNSKAPLTVESDFHTRDPLKQPELLTLFSWNEAEFLKITEGSPIRRIGHKRWLRNIAVALGNAPASQKIIDALEARKNSDEVDELVIEHIDWALIQQNERLIQQSNSISRKTQRVIRSVEKGLPRDA

SEQ ID NO: 80923 - protein, 419 aa, Shewanella violacea
  REGION 1..419: note = tr|D4ZBN3|D4ZBN3_SHEVD Epoxyqueuosine reductase; OS = Shewanella violacea (strain JCM 10179 / CIP 106290 / LMG 19151 / DSS12) OX=637905 GN=queG PE=3 SV=1
MPDTALSPTNSHPFSPTELRELTAKIKQWGIELGFAQIGICDTDLTSEELKLQQWLDKGYHGDMAYMEARGMMRARPHELHPGTIRVISARMNYLPPEAGFATNLKDPNLAYISRYAGGRDYHKLIRSRLKKLGLMIQAELDTMNAGKTNFRPFVDSAPILERPLAEKAGLGWTGKHSLLLNEEVGSWFFLGELLIDLPLPVDIPVSEGCNTCVACIKSCPTNAIVEPYIVDGRRCISYLTIELQGAIPEEFRPLIGNRIYGCDDCQLVCPVNSKAPITLESDFHTRDPLKQPQLLTLFSWTEAEFLKITEGSPIRRIGHKRWLRNIAVALGNAPASEKIVQGLEQRKASEEADEMVIEHIDWALAQQHTKLAAVQNLETQSLETKGQETPALSQNVSSLSRKTQRVIRSVEKGLPRDA

SEQ ID NO: 80924 - protein, 398 aa, Shewanella woodyi
  REGION 1..398: note = tr|B1KKP5|B1KKP5_SHEWM Epoxyqueuosine reductase; OS = Shewanella woodyi (strain ATCC 51908 / MS32) OX=392500; GN = queG PE=3 SV=1
MPNSVLTQSSFDSLTSSQLSQLVISIKHWGKELGFAQIGICDTDLTIEEPKLQQWLDKGYHGEMGYMESHGMMRARPHELHPGTIRVISARMDYLPPEAGFATNLRDPNLAYISRYAGGRDYHKLIRNRLKKLGLMIEEELTRLGVGKPNFRPFVDSAPILERPLADKAGLGWTGKHSLLLNQDAGSWFFLGELLIDLPLPVDIPVSEGCNTCVACIKSCPTNAIVEPYIVDGRRCISYLTIELQGAIPEEFRPLIGNRIYGCDDCQLVCPVNSKSPLTLETDFHTRDPLKQPELLTLFNWSEAEFLKITEGSPIRRIGHKRWLRNIAVALGNAPFSQTIIDTLELKKQTEELDEMVAEHIDWALKQQRFKQGGEVPTVNRKTQRVIRSVEKGLPRDA

SEQ ID NO: 80925 - protein, 393 aa, Shewanella xiamenensis
  REGION 1..393: note = tr|A0A1E3UX94|A0A1E3UX94_9GAMM Epoxyqueuosine reductase OS=Shewanella xiamenensis OX=332186 GN=queG PE=3; SV = 1
MSTTATSPANIPDAATLSRLALQIKNWGKALGFAQIGICDTDLTAEEAKLEAWLDKGYQGEMAYMATHGMMRARPHELHPGTVRVISARMDYLPPEAGFATNLASPNMGYISRYAGGRDYHKLIRARLKKLGDQISSELVALGFDAADFRPFVDSAPVLERPLAEKAGIGWTGKHSLILNHDAGSWFFLGELLINLPLPVDIPIQEDCNTCVACITSCPTGAIVEPYTVDARRCISYLTIELQGAIPEEFRPLMGNRIYGCDDCQLVCPVNREAPLTQESDFHIRPKLKQPELLTLFAWSETEFLKQTEGSAIRRIGHQRWLRNIAVALGNAPSSPQIIAALKQRKAQADVDEMVKEHIDWALVRQRAGGSQTNNRKTERLVRVIQKGLPRDA

SEQ ID NO: 80926 - protein, 393 aa, Shewanella xiamenensis
  REGION 1..393: note = tr|A0A073KL33|A0A073KL33_9GAMM Epoxyqueuosine reductase OS=Shewanella xiamenensis OX=332186 GN=queG PE=3; SV = 1
MSTTATSPANIPDAATLSRLAMQIKNWGKALGFAQIGICDTDLTAEEAKLEAWLDKGYHGEMAYMATHGMMRARPHELHPGTVRVISARMDYLPPEAGFATNLASPNMGYISRYAGGRDYHKLIRARLKKLGDQISSELVALGFDAADFRPFVDSAPVLERPLAEKAGIGWTGKHSLILNHDAGSWFFLGELLINLPLPVDIPIQEDCHTCVACITSCPTGAIVEPYTVDARRCISYLTIELQGAIPEEFRPLMGNRIYGCDDCQLVCPVNREAPLTLESDFHIRPKLKQPELLTLFAWSEAEFLKQTEGSAIRRIGHQRWLRNIAVALGNAPSSPQIIAALEQRKAQADIDDMVKEHIDWALARQHAGGSQANNRKTERLVRVIQKGLPRDA

SEQ ID NO: 80927 - protein, 379 aa, Shigella boydii
  REGION 1..379: note = tr|A0A398PW19|A0A398PW19_SHIBO Epoxyqueuosine reductase OS=Shigella boydii OX=621 GN=queG PE=3 SV=1
MSEPLDLNQLAQKIKQWGLELGFQQVGITDTDLSESEPKLQAWLDKQYHGEMDWMARHGMLRARPHELLPGTLRVISVRMNYLPANAAFASTLKNPKLGYVSRYALGRDYHKLLRNRLKKLGEMIQQHCVSLNFRPFVDSAPILERPLAEKAGLGWTGKHSLILNREAGSFFFLGELLVDIPLPVDQPVEEGCGKCVACMTICPTGAIVEPYTVDARRCISYLTIELEGAIPEELRPLMGNRIYGCDDCQLICPWNRYSQLTTEEDFSPRKPLHAPELIELFAWSEEKFLKVTEGSAIRRIGHLRWLRNIAVALGNAPWDETILTALESRKGEHPLLDEHIAWAIAQQIERRNACIVEVQLPKKQRLVRVIEKGLPRDA

SEQ ID NO: 80928 - protein, 379 aa, Shigella boydii
  REGION 1..379: note = tr|Q31T96|Q31T96_SHIBS Epoxyqueuosine reductase; OS = Shigella boydii serotype 4 (strain Sb227) OX=300268; GN = yjeS PE=3 SV=1
MSEPLDLNQLAQKIKQWGLELGFQQVGITDTDLSESEPKLQAWLDKQYHGEMDWMARHGMLRARPHELLPGTLRVISVRMNYLPANAAFASTLKNPKLGYVSRYALGRDYHKLLRNRLKKLGEMIQQHCVSLNFRPFVDSAPILERPLAEKAGLGWTGKHSLILNREAGSFFFLGELLVDIPLPVDQPVEEGCGKCVACMTICPTGAIVEPYTVDARRCISYLTIELEGAIPEELRPLMGNRIYGCDDCQPICPWNRYSQLTTEEDFSPRKPLHAPELIELFAWSEEKFLKVTEGSAIRRIGHLRWLRNIAVALGNAPWDETILTALESRKGEHPLLDEHIAWAIAQQIERRNACIVEVQLPKKQRLVRVIEKGLPRDA

SEQ ID NO: 80929 - protein, 379 aa, Shigella dysenteriae
  REGION 1..379: note = tr|A0A3P6LHQ7|A0A3P6LHQ7_SHIDY Epoxyqueuosine reductase OS=Shigella dysenteriae OX=622 GN=yjeS PE=3 SV=1
MSEPLDLNQLAQKIKQWGLELGFQQVGITDTDLSESEPKLQAWLDKQYHGEMDWMARHGMLRARPHELLPGTLRVISVRMNYLPANAAFASTLKNPKLGYVSRYALGRDYHKLLRNRLKKLGEMIQQHCVSLNFRPFVDSAPILERPLAEKAGLGWTGKHSLILNREAGSFFFLGELLVDIPLPVDQPVEEGCGKCVACMTICPTGAIVEPYTVDARRCISYLTIELEGAIPEELRPLMGNRIYGCDDCQLICPWNRYSQLTTEEDFSPRKPLHAPELIELFAWSEEKFLKVTEGSAIRRIGHLRWLRNIAVALGNAPWDETILTALESRKGEHPLLDEHIAWAIAQQIERRNACIVEVQLPKKQHLVRVIEKGLPRDA

SEQ ID NO: 80930 - protein, 415 aa, Shigella dysenteriae
  REGION 1..415: note = tr|A0A090NEQ6|A0A090NEQ6_SHIDY Epoxyqueuosine reductase OS=Shigella dysenteriae WRSd3 OX=1401327 GN=queG; PE = 3 SV=1
MSPSASAASRSPRRISSACQTVCGILTGFFFIVWSIMSEPLDLNQLAHKIKQWGLELGFQQVGITDTDLSESEPKLQAWLDKQYHGEMDWMARHGMLRARPHELLPGTLRVISVRMNYLPANAAFASTLKNPKLGYVSRYALGRDYHKLLRNRLKKLGEMIQQHCVSLNFRPFVDSAPILERPLAEKAGLGWTGKHSLILNREAGSFFFLGELLVDIPLPVDQPVEEGCGKCVACMTICPTGAIVEPYTVDARRCISYLTIELEGAIPEELRPLMGNRIYGCDDCQLICPWNRYSQLTTEDDFSPRKPLHAPELIELFAWSEEKFLKVTEGSAIRRIGHLRWLRNIAVALGNAPWDETILAALESRKGEHPLLDEHIAWAIAQQIERRNACIVEVQLPKKQRLVRVIEKGLPRDA

SEQ ID NO: 80931 - protein, 379 aa, Shigella flexneri
  REGION 1..379: note = tr|A0A4S3NIT0|A0A4S3NIT0_SHIFL Putative electron transport protein yjeS OS=Shigella flexneri OX=623 GN=queG; PE = 3 SV=1
MSEPLDLNQLAQKIKQWGLELGFQQVGITDTDLSESEPKLQAWLDKQYHGEMDWMARHGMLRARPHELLPGTLRVISVRMNYLPANAAFASTLKNPKLGYVSRYALGRDYHKLLRNRLKKLGEMIQQHCVSLNFRPFVDSAPILERPLAEKAGLGWTGKHSLILNREAGSFFFLGELLVDIPLPVDQPVEEGCGKCVACMTICPTGAIVEPYTVDARRCISYLTIELEGALPEELRPLMGNRIYGCDDCQLICPWNRYSQLTTEDDFSPRKPLHAPELIELFAWSEEKFLKVTEGSAIRRIGHLRWLRNIAVALGNAPWDETILTALESRKGEHPLLDEHIAWAIAQQIERRNACIVEVQLPKKQRLVRVIEKGLPRDA

SEQ ID NO: 80932 - protein, 379 aa, Shigella flexneri; identical to SEQ ID NO: 80931
  REGION 1..379: note = tr|A0A5C2EWB5|A0A5C2EWB5_SHIFL Epoxyqueuosine reductase OS=Shigella flexneri Y OX=424720 GN=queG PE=3; SV = 1

SEQ ID NO: 80933 - protein, 379 aa, Shigella sonnei; identical to SEQ ID NO: 80931
  REGION 1..379: note = tr|A0A200LBF5|A0A200LBF5_SHISO Epoxyqueuosine reductase OS=Shigella sonnei OX=624 GN=queG PE=3 SV=1

SEQ ID NO: 80934 - protein, 379 aa, Shigella sonnei
  REGION 1..379: note = tr|Q3YUH7|Q3YUH7_SHISS Epoxyqueuosine reductase; OS = Shigella sonnei (strain Ss046) OX=300269 GN=yjeS PE=3; SV = 1
MSEPLDLNQLAQKIKQWGLELGFQQVGITDTDLSESEPKLQAWLDKQYHGEMDWMARHGMLRARPHELLPGTLRVISVRMNYLPANAAFASTLKNPKLGYVSRYALGRDYHKLLRNRLKKLGEMIQQHCVSLNFRPFVDSAPILERPLAEKAGLGWTGKHSLILNREAGSFFFLGELLVDIPLPVDQPVEEGCGKCIACMTICPTGAIVEPYTVDARRCISYLTIELEGAIPEELRPLMGNRIYGCDDCQLICPWNRYSQLTTEDDFSPRKPLHAQELIELFAWSEEKFLKVTEGSAIRRIGHLRWLRNIAVALGNAPWDETILAALESRKGEHPLLDEHIAWAIAQQIERRNACIVEVQLPKKQRLVRVIEKGLPRDA

SEQ ID NO: 80935 - protein, 384 aa, Shigella sp.
  REGION 1..384: note = tr|A0A1D3DC53|A0A1D3DC53_9ENTR Epoxyqueuosine reductase OS=Shigella sp. FC1655 OX=1898038 GN=queG PE=3; SV = 1
MSSLDLNLLAQNIKLWGSELGFQQTGICDTDLSLEEPRLQAWLDKQYHGEMAWMEKYGMTRARPHELVPGTLRVISVRMNYLPTDAAFARTLNNPEQGYISRYALGRDYHKVLRQRLKKLGERISQYCQQFEYQGVVNFRPFVDSAPIMERPLAVKAGLGWVGKHSLVINNQAGSWFFLGELLIDLPLPIDSPVEEQCGKCVACMTTCPTGAIVEPYTIDARRCISYLTIELEGAIPEAFRPLMGNRIYGCDDCQLICPWNRFSSLTDEEDFSPRSALHTPELLNLFQWSEDKFLRITEGSPIRRIGYLRWLRNISVALGNAPYQDKIILALQKRFGLSDVLDEHLNWAIAQQTAKRNEKEVKIQTSQQKRLVRAITKGLPRDA

SEQ ID NO: 80936 - protein, 379 aa, Shigella sp.
  REGION 1..379: note = tr|A0A1E3N4N9|A0A1E3N4N9_9ENTR Epoxyqueuosine reductase OS=Shigella sp. FC569 OX=1892897 GN=queG PE=3; SV = 1
MSEPLDLNQLAQKIKQWGLELGFQQVGITDTDLSASEPKLQAWLDKQYHGEMDWMARHGMLRARPHELLPSTLRVISVRMNYLPANAAFASTLKNPKLGYVSRYALGRDYHKLLRNRLKKLGEMIQQHCVSLNFRPFVDSAPILERQLAEKAGLGWTGKHSLILNREAGSFFFLGELLVDIPLPVDQPVEKGCGKCVACMTICPTGAIVEPYTVDARRCISYLTIELEGAIPEELRPLMGNRIYGCDDCQLICPWNRYSQLTTEDDFSPRKPLHAPELIELFAWSEEQFLKVTEGSAIRRIGHLRWLRNIAVALGNAPWDETILTALESRKGEHPLLDEHIAWAIAQQIERRNACVVEVQLPKKQRLVRVIEKGLPRDA

SEQ ID NO: 80937 - protein, 350 aa, unidentified
  source 1..350: note = Shimia abyssi
  REGION 1..350: note = tr|A0A2P8F4F7|A0A2P8F4F7_9RHOB Epoxyqueuosine reductase OS=Shimia abyssi OX=1662395 GN=queG PE=3 SV=1
MTAELKDRLVSEAKAIGFDACYVCRPDSVNHVRDGLNGFLARGYHGQMGWLEQRKAWRSDPSALWPEARSVIMLGESYTPQHDPTEVHRQPDRGAISVYAQNKDYHDMVKKRLKRLARWLIAEGGGEVKVFVDTAPVPEKPLGQAAGLGWQGKHTNLVSRELGSWFFIGSVFSTLKFDTDPPEIDHCGSCRACLDACPTNAFPAPNKIDARRCISYLTIEHHGPVDEDLRPLMGNRIYGCDDCLAACPWNKFAVEASEMRYAARDELMAPKLAELATLDDSAFRTMFSGSPIKRIKRDRFVRNVLYAIGNSGDADLKPVAQRLCEDPDATVADAARWAVTRLQDVASGHE

SEQ ID NO: 80938 - protein, 350 aa, unidentified
  source 1..350: note = Shimia aestuarii
  REGION 1..350: note = tr|A0A1I4JXN5|A0A1I4JXN5_9RHOB Epoxyqueuosine reductase OS=Shimia aestuarii OX=254406 GN=queG PE=3 SV=1
MSAELKARLIEEARAIGFDMARICRPNAVGHVGAGLARFLDKGYHGQMGWLAERTHWRSDPSVLWTEARSVIVLAESYTPEHDPTEVHGMPDRGAISVYAQNKDYHDIVKKRLKRLARWLISEAGGEVKVFVDTAPVPEKPLGQAAGLGWQGKHTNLVSRELGSWFFIGSVFTTLDLPVDAAEVDHCGSCRACLDACPTGAFPAPHQIDARRCISYLTIEHHGPVDEALRPLLGNRIYGCDDCLAACPWNKFAQEAREMRYAAREDLVAPKLAELATMDDATFRAHFSGSPIKRIKRDRFVRNVLYAIGNSGECALIPVAQKLCDDADATVADAARWAVTRLQDVANRLD

SEQ ID NO: 80939 - protein, 347 aa, unidentified
  source 1..347: note = Shimia haliotis
  REGION 1..347: note = tr|A0A1I4EE30|A0A1I4EE30_9RHOB Epoxyqueuosine reductase OS=Shimia haliotis OX=1280847 GN=queG PE=3 SV=1
MDDLKAQLVAEAKAIGFDMAQVCRPDAVGHVAAGLAGFLDKDYHGSMGWLADRTHWRSDPSVLWPEARSVIVLGESYTPEHDPLAVHGMPDRGAISVYAQNRDYHDTVKKRLKRLARWLIAQTGDATQVKVFVDTAPVPEKPLGQAAGLGWQGKHTNLVSRDLGSWFFIGSVFTTIELPPDAAEIDNCGSCRACLDACPTGAFPAPHQIDARRCISYLTIEHHGPVDEDLRALMGNRIYGCDDCLGVCPWNKFAQEAREVKYHARAELVAPKLAELASFDDAGFRTHFSGSPIKRIGRNRFVRNVLYAIGNSGDLALLETTLALCDDPDDVVSDAARWAVGRLRDTG

SEQ ID NO: 80940 - protein, 352 aa, Shimia isoporae
  REGION 1..352: note = tr|A0A4R1N4D1|A0A4R1N4D1_9RHOB Epoxyqueuosine reductase OS=Shimia isoporae OX=647720 GN=queG PE=3 SV=1
MTDDLKTRLVAEAKAIGFDMARICRPDAVPQVAAGLAGFLDKDYHGTMGWLAERTHWRSDPAVLWPEARSVIVLGESYTPEHDPLAVHRKPDRGAISVYAQNKDYHDTVKKRLKRLARWLIAQTGDDTQVKVFVDTAPVPEKPLGQAAGLGWQGKHTNLVSRDLGSWFFIGSVFTTVELETDPAEIDHCGSCRACLDACPTNAFPAPHQIDARRCISYLTIEHHGPVEEDLRKLMGNRIYGCDDCLGVCPWNKFAQEAREVKYHARDELKAPRLAELATLDDAGFRLHFSGSPIKRIGRNRFVRNVLYAIGNSGDQALLETALALCDDPDDVVRDAAQWAVSRLEDVANGLA

SEQ ID NO: 80941 - protein, 351 aa, Shimia marina
  REGION 1..351: note = tr|A0A0P1ELH6|A0A0P1ELH6_9RHOB Epoxyqueuosine reductase OS=Shimia marina OX=321267 GN=queG PE=3 SV=1
MSADLTARMKAEAREMGFDLARVCRPDAVRHVGADLAGFLAKGYHGQMKWLGERTHWRADPSVLWPEARSVIMLGESYTPKHDPTAVHAHPERAAISVYAQNKDYHDTVKKRLKRLARWLIAQTDPEVQVKVFVDTAPVPEKPLGQAAGLGWQGKHTNLVSRDLGSWFFIGSVFTTAELDIDAAEVDHCGSCRACLEACPTGAFPAPHKIDARRCISYLTIESHGPVDPALRPLLGNRIYGCDDCLAACPWNKFAQGAREMKYHAREELKAPKLAELVGLDDPGFRSFFSGSPIKRIGRNRFVRNVLYAIGNSGAPELEAAAVPLCEDPDETVADAARWAVARLRGESGTP

SEQ ID NO: 80942 - protein, 347 aa, Shimia sp.
  REGION 1..347: note = tr|A0A0N0DA28|A0A0N0DA28_9RHOB Epoxyqueuosine reductase OS=Shimia sp. SK013 OX=1389006 GN=queG PE=3 SV=1
MSDDLKARLVAEAQAIGFDMAQVCRPDAVPQVAAGLAGFLAKDYHGTMGWLADRTHWRSDPAALWPEARSVIVLGESYTPQHDPLAVHQMPDRGAISVYAQNRDYHDTVKKRLKRLARWLIAETGDATQVKVFVDTAPVPEKPLGQASGLGWQGKHTNLVSRDLGSWFFIGSVFTTVEIETDPAEIDHCGSCRACLDACPTGAFPSPHQIDARRCISYLTIEHHGPVAEELRALMGNRIYGCDDCLGVCPWNKFAQEAREVKYHARTELVAPKLADLAAFDDAGFRAHFSGSPIKRIGRDRFVRNVLYAIGNSGDFALLETALGLCEDTDPVVADAARWAVARLRDE

SEQ ID NO: 80943 - protein, 379 aa, Shimwellia blattae
  REGION 1..379: note = tr|I2BDN2|I2BDN2_SHIBC Epoxyqueuosine reductase; OS = Shimwellia blattae (strain ATCC 29907 / DSM 4481 / JCM 1650 / NBRC 105725 / CDC 9005-74) OX=630626 GN=yjeS PE=3; SV = 1
MSQPLDYYQLAQDIKRWGAELGFQQVGITDTDLSASEAQLQAWLDNQYHGEMAWMARHGMLRARPHELHPGTLRVITVRMNYLPAKARFAAVLKDPHKGYVSRYALGRDYHKLMRNRLKQLGERLQQHCVALNFRPFVDSAPVLERPLAARAGLGWTGKHSLILNQEAGSFFFLGELLVDLPLPVDTPAQEQCGKCVACMTICPTGAIVAPYTVDARRCISYLTIELEGAIPEEFRPLIGNRIYGCDDCQLICPWNRFSQLTDEADFAPRQPLHAPQLTELFAWSEAQFLHITQGSAIRRIGHLRWLRNIAVAMGNAPWDEAIFNALQQRLGEDPMLDEHIHWALARQRAHREALGTEVQPAQKQRLVRVVEKGLPRDA

SEQ ID NO: 80944 - protein, 381 aa, Shinella granuli
  REGION 1..381: note = tr|A0A4R2CYR5|A0A4R2CYR5_9RHIZ Epoxyqueuosine reductase OS=Shinella granuli OX=323621 GN=queG PE=3 SV=1
MSGDDRIRRRLTDFLKAEAADKGFDLCRITGPDSIPEAPPRLADFLAAGYHGTMDWMAETEARRADPRVLWSEVRSVVLFGMNYGPAHDPRAVLSMPDRAAISVYAQNRDYHDLIKGKLKEVATRFAARGGVDVKVFVDTAPVMEKPLAAAAGLGWQGKHTNLVSRTHGSWLFLGSLFTTADLVRDEPERDHCGSCRACLDACPTDAFPAPYKLDARRCISYLTIEHKGPIDPGIREKIGNRIYGCDDCLAACPWNKFAAAASQMKLIAREELKAPAIADLLTFDDAGFRAHFSGSPVKRIGRDRFVRNVLIAAGNSGDRSLIAPCLHLADDASPVVRGMAAWALSRLMAASEFGKFAAGRAHDADADVRAEYERAKADCR

SEQ ID NO: 80945 - protein, 381 aa, Shinella sp.
  REGION 1..381: note = tr|A0A2W6Y6W0|A0A2W6Y6W0_9RHIZ tRNA epoxyqueuosine(34) reductase QueG OS=Shinella sp.; OX = 1870904 GN=queG PE=4 SV=1
MPAPAPDHRNDRRRAGLTAFMKSEAAAQGFSVCRITLPDSIPEAPERLATFIAAGRHGTMAWMEETQARRADPRVLWSEVRSIVMFGLNYGPDEDPRHLQARSDRGAISVYARNRDYHDVMKGRLKEVATRFAARAGADVKVFVDTAPVMEKPLAAAAGLGWQGKHTNLVSREFGSWLFLGSLFTSAELDIDAPEIDHCGSCRACLGACPTDAFPAPYQIDARRCISYLTIEHKGVIAKELRPAFGNRIYGCDDCLSACPWNKFAQAASEMKFKAREDLLEPELRFLLSLDDATFRTFFSGSPVKRIGRNRFIRNCLIAAGNSGSTEFTDICLALMDDEAAEVRGMAVWALSRLLPAETFRTLRDTRLKIEEDADVRQEWN

SEQ ID NO: 80946 - protein, 380 aa, Shinella sp.
  REGION 1..380: note = tr|A0A372NI57|A0A372NI57_9RHIZ Epoxyqueuosine reductase OS=Shinella sp. WSJ-2 OX=2303749 GN=queG PE=3; SV = 1
MSGDEKIRRRLTDFIKAEAADKGFDLCRITGPDSIPQAPARLADFLSNGYHGTMEWMAETQARRADPRVLWSDVRSIVLFAMNYGPEHDPRAVLEKPDRAAISVYAQNRDYHDIIKGRLKELATRFAARGGADVKVFVDTAPVMEKPLAAAAGLGWQGKHTNLVSRTHGSWLFLGSLFTTADLYKDEPERDHCGSCRACLDACPTDAFPAPYKIDARRCISYLTIEHKGTIDPAIREKIGNRIYGCDDCLAACPWNKFAAAASEMKLVARDDLKTPALADLLTFDDPGFRAHFSGSPVKRIGRDRFVRNVLIAAGNSGDRGLIAQCINLADDASPVVRGMAAWALSRLMDASEFARFAAGRTDDADADVRAEYERARATP

SEQ ID NO: 80947 - protein, 306 aa, unidentified
  source 1..306: note = Siansivirga zeaxanthinifaciens
  REGION 1..306: note = tr|A0A0C5W7P0|A0A0C5W7P0_9FLAO Epoxyqueuosine reductase OS=Siansivirga zeaxanthinifaciens CC-SAMT-1; OX = 1454006 GN=queG PE=3 SV=1
MYNKQTNTERIKTEAKRLGFLSCGISKAGFLEEEAPRLERWLNKNMHGQMHYMENHFDKRLDPTKLVEDSKSVISLLINYFPEDTQTDASFKISKYAYGTDYHYVIKDKLKQLLHFIQENIGDVYGRAFVDSAPVLDKAWASKSGLGWIGKNSNLLTQQVGSFYFIAELIVDLDLEYDLPTTNHCGTCAACIDACPTQAITEPYVVDGSKCISYFTIELKENIPTEFKDKMDDWMFGCDVCQDVCPWNRFSKPHKEPLFNPHPELLSMTKKDWEDITEDVFKKVFKDSAVKRTKFSGLKRNIDFLK

SEQ ID NO: 80948 - protein, 311 aa, unidentified
  source 1..311: note = Siccationidurans arizonensis
  REGION 1..311: note = tr|A0A1I5WI92|A0A1I5WI92_9BACT Epoxyqueuosine reductase OS=Siccationidurans arizonensis OX=1227077; GN = queG PE=3 SV=1
MLPQSEWAPFIKRRAAELGFMACGISKAEFLEEEAPRLETWLTKRMNGRMGYMENHFDKRLDPRLLVDGAKSVISLLLNYYPAPEDQQPDDTLKISKYAYGRDYHFVIKDKLKTLLADMEAEIGHIGGRCFVDSAPVLDKAWAKKSGLGWVGKNSNLITPGTGSFYFIAELIVDVELPADGPIRDYCGTCTKCLDACPTQAITEPYVVDGSKCISYFTIELKDQIPTEVGGQFGNWVFGCDICQDVCPWNRFSRPHTEPQFNPAPGLKDLTPGDWREITHELFTELFRQSAVKRTGYEGLKRNIKFVLGSD

SEQ ID NO: 80949 - protein, 384 aa, unidentified
  source 1..384: note = Siccibacter turicensis
  REGION 1..384: note = tr|A0A2P8VNI6|A0A2P8VNI6_9ENTR Epoxyqueuosine reductase OS=Siccibacter turicensis OX=357233 GN=queG PE=3; SV = 1
MLWSVMSQPLDLNQLAQNIKQWGAELGFQQVGITDTDLSASEPKLQAWLDKQYHGEMEWMARHGMMRARPHELLPGTLRVISVRMNYLPANAAFASTLKNPRLGYVSRYALGRDYHKLLRNRLKKLGETIQQHCATLNFRPFVDSAPILERPLAEKAGLGWTGKHSLILSRDAGSFFFLGELLIDLPLPIDSPVEEGCGRCVACMTICPTGAIVEPYTVDARRCISYLTIELEGAIPEEFRPLIGNRIYGCDDCQLICPWNRFSQLTDEADFSPRQALHAPELVTLFAWSEAQFLKVTEGSAIRRIGHLRWLRNIAVALGNAPWDEAILAALAQRKGEHPLLDEHIEWAMAQQIAKRNANAIEVQLPQKKRLVRVVEKGLPRDA

SEQ ID NO: 80950 - protein, 391 aa, unidentified
  source 1..391: note = Siculibacillus lacustris
  REGION 1..391: note = tr|A0A4Q9VVX7|A0A4Q9VVX7_9RHIZ Epoxyqueuosine reductase OS=Siculibacillus lacustris OX=1549641 GN=queG; PE = 3 SV=1
MTATAPADRAQLRRFLDAEARRLGFSGVGVTGPDAIDHAAVDLAGFLAAGHHATMTWMAETAARRARPRALWDEVRSVIVLAFDYGPTSDPLEGRGDRTRGEISVYARNRDYHDVIKGRLKELADRLAGEARRRGLGSRAKVFVDTAPVMEKPLAAAAGLAWQGKNTLAVSRTIGGWFFLGVIYTTLELDADAPAADHCGSCRRCLDVCPTDAFPAPHRLDARRCLSYLTIEHDGPIPTEFRAAMGDRIYGCDDCLAVCPWNKFAAVAREAKLVARPDLVRPALADLVGLDDAGFRAHFAGSPIKRIGRARFVRNVLIAIGNSGAAELAATISPRLGDQSAMVRGAAVWAAGRLMSGSALAAAFRGKGAAERDPAVAAEWRALGFTPPAEA

SEQ ID NO: 80951 - protein, 367 aa, unidentified
  source 1..367: note = Sideroxydans lithotrophicus
  REGION 1..367: note = tr|D5CR32|D5CR32_SIDLE Epoxyqueuosine reductase; OS = Sideroxydans lithotrophicus (strain ES-1) OX=580332; GN = queG PE=3 SV=1
MLAYTTSAMIRFMQNGTPQTDYDALAARIKAWGNALGFQAVGISDTHLDVAEAHLLQWLADGHHGAMDYMAKHGTRRARPAELVPGTLRVISVRMNYYPENAKDTHEVLADGGSAFVSRYALGRDYHKVLRNRLEKLAQQLRDETGCQCRVFTDSAPVLEVELAQKARLGWRGKHTLLLSREQGSWFFLGEIFVDLPLPVEAEQENHCGTCSACLDICPTQAITAPYRLDARRCISYLTIELKGSIPTELRPLIGNRIYGCDDCQLVCPWNRFAQKTMEPDFAVRNGLDNATLAELFAWDEPTFHARLAGSAIHRIGYEQWLRNIAVALGNAYATPEVMAALQTRSQHPSSLVREHVEWALQRHSKG

SEQ ID NO: 80952 - protein, 78 aa, unidentified
  source 1..78: note = Sideroxydans sp.
  REGION 1..78: note = tr|A0A1G3IR67|A0A1G3IR67_9PROT Uncharacterized protein OS=Sideroxydans sp. RIFOXYB12_FULL_59_6 OX=1802155; GN = A3J87_06790 PE=4 SV=1
MSLIELFVWDEGVFKEKLAGSAIYRIGHEQWLRNIAVALGNAPVSLEIIEALRARSAHVSEMVREHVAWALARHGVAV

SEQ ID NO: 80953 - protein, 347 aa, unidentified
  source 1..347: note = Silicibacter sp.
  REGION 1..347: note = tr|C9D124|C9D124_9RHOB Epoxyqueuosine reductase; OS = Silicibacter sp. TrichCH4B OX=644076 GN=queG PE=3 SV=1
MKAAGDIKARLVAQARAEGFVSTRICRPWDVPEVPERLRAFLDAGYHGQMAWMAERVNWRENPAALWPEARSVIMLAESYTPDENPMAVVGLPDRAAISVYARGKDYHDLVKKRLKRLARWLIAEAGDEAEVKVFVDTAPVPEKALGQAAGLGWQGKHTNLVSRDWGNWAFLGSIFTTLDLPIDPVEPDHCGSCRACLTACPTDAFPAPYQLDARRCISYLTIEHKGPIEEELRAKLGNRIYGCDDCLAACPWNKFAVAASDMRYAAREGTVAPPLAELSQLNDAAFRERFSGSPIKRIGRDRFVRNVLYAIGNSREVKLRPYATQLCDDPDPTVADAARWAVMRLS

SEQ ID NO: 80954 - protein, 350 aa, unidentified
  source 1..350: note = Silicimonas algicola
  REGION 1..350: note = tr|A0A316GJ65|A0A316GJ65_9RHOB Epoxyqueuosine reductase OS=Silicimonas algicola OX=1826607 GN=queG PE=3; SV = 1
MDADALKARLVAEAVDAGFAEARICRPDAVPEVAKRLAAFLAEGRHGQMGWLAERAHWRGDPSALWPEARSVVMLAEPYTPDHDPLEDLAATDRGVISVYAQGRDYHDVVKKRLKRVARWLVAEAGCEVKVFVDTAPVPEKALGQAAGLGWQGKHTNLLSRRLGNWFFLGAIFTTADLPPDPPEDEHCGTCRKCLDICPTDAFPAPFQLDARRCISYLTIEHEGPVDPALRPGLGNRIYGCDDCLAVCPWNKFAVAGRDARYAARAETDLPPLAELARLDDAAFRARFSGSPIKRSGRNRFVRNVGYAIGNSGDPSLRPVAEALARDADPAVADAGQWALSRLAAFGPRW

SEQ ID NO: 80955 - protein, 375 aa, unidentified
  source 1..375: note = Silvanigrella aquatica
  REGION 1..375: note = tr|A0A1L4D3V4|A0A1L4D3V4_9PROT tRNA epoxyqueuosine(34) reductase QueG OS=Silvanigrella aquatica OX=1915309 GN=AXG55_13740 PE=4 SV=1
MKLKKEILDLLNQNGILSAGVFSFEKNHSLILEKDIPAFQKWLSENAHAKMTFLENNIEARKDPSLILPNVKNALIFLFPYAAGHRVRNKKKENAHNNIQLNHNSESILAKKLISKYVYGKDYHKVLKKQLNLIATKLQKQIGNPFQFRAVVDSIPFFDRAYAREAALGFIGKNTMLIRPGMGSFFFIATLLTDASIQDICDLNLENKNAILNLDCGDCTKCLDACPTQAFKKPYFLDANRCLSYLSIEHRDIVDNEFIPHFANTIYGCDICQEVCPYNLVTSDFKILKEFSNYHNPFQIITAKDMALMDTDQYEKWFGGTAATRAKYQGLVRNALYHLHSVSDSSLPAILDKLCASEYELILKTVMQLRVLQKA

SEQ ID NO: 80956 - protein, 370 aa, unidentified
  source 1..370: note = Silvanigrellales bacterium
  REGION 1..370: note = tr|A0A4V0P2U7|A0A4V0P2U7_9PROT tRNA epoxyqueuosine(34) reductase QueG OS=Silvanigrellales bacterium RF1110005 OX=2493639 GN=queG PE=4 SV=1
MIIKPDIIELFKKCDAHVSGVFSFEDKKFLSIFEKDLRAFEQWISENSHAGMKFLENNIDARKDPSFILQESKTALIFLFPYSLGHRVRNRKTNAKAIKIKKNSLIGEKLISKYVYGKDYHKVLKKNLEKIAHALQKHLNINFAFRPVIDSIPFFDRAHAREAHLGFIGKNTMLIRPGMGSFFFIATLLIDLPYSEIVENNLKNKLNPIANLDCGDCQKCLDACPTSALTKPYYLDANKCISYLTIEHRDIVPKEYLAHFAKTIYGCDICQDVCPYNLVTNDFGILKEFSEFNKNFLNITMHNIALMTPFEYEKWFGGTAATRAKYQGLIRNALYHLYAVQDENMENILRHHENSEFKLISETVKQIRNF

SEQ ID NO: 80957 - protein, 382 aa, Simiduia agarivorans
  REGION 1..382: note = tr|K4KMG4|K4KMG4_SIMAS Epoxyqueuosine reductase; OS = Simiduia agarivorans (strain DSM 21679 / JCM 13881 / BCRC 17597 / SA1) OX=1117647 GN=queG PE=3 SV=1
MNNDQAQQPLLDTLALRIKAEGQALGFQQIGITDTDLRAEEARLAGWIDRGYHAGMAWMTHHGNMRTRPEELLPGTLRVISARMDYLPGDTNLIAALKDGESAYISRYALGRDYHRLVRKRLSQLADFIETEAAALGLPLPDGFRHRAFVDSAPVSEKPLAAKAGLGWQGKHTLIMNSDAGSWFFLGEVFTALPLPVDQSHQPDRCGDCTACLKVCPTDAFPAPYQLDAGRCISYLTIEHKGPIPEEFRDPIGNRVFGCDDCQAICPWNKYARYTQEMDFLPRHQLDSAKLIDLFQWSEQTFLDRTAGSPLRRTGFENWQRNLAVGLGNAPQSAEIIRILSQARTQVSDLVAEHVDWALVQQRNPDRKRKRKIKANKSQRQP

SEQ ID NO: 80958 - protein, 365 aa, Simplicispira metamorpha
  REGION 1..365: note = tr|A0A4R2NFN3|A0A4R2NFN3_9BURK Epoxyqueuosine reductase OS=Simplicispira metamorpha OX=80881 GN=queG; PE = 3 SV=1
MVVCSSQLVPQIQQWARELGFSQIGVAGVDLSDAEPGLVQWLAQGFHGDMAYMAAHGLKRARPAELVPGTVSVITARMDYLPRATPDGWQALEFARLHDPAQGAVSLYARGRDYHKVLRTRLQKLAERIAQAVGPLGHRAFTDSAPVLEAELASRSGQGWRGKHTLVLNRDAGSMFFLGEIYIDLALPASAPVSAHCGQCRACLDVCPTQAIVAPYRLDARRCISYLTIEHAGPIPLDLRPLLGNRIYGCDDCQLACPWNKFAQTSTLPDFDARAGLSGQQLVHLFAWDEATFLRLTEGGPIRRIGHERWLRNVAVALGNALRAAGEAGAAGADAGALRAALQSRAQHDSALVREHVAWALAQAH

SEQ ID NO: 80959 - protein, 334 aa, Simplicispira sp.
  REGION 1..334: note = tr|A0A2U1C5P7|A0A2U1C5P7_9BURK Epoxyqueuosine reductase OS=Simplicispira sp. 125 OX=2135643; GN = C8D04_1373 PE=4 SV=1
MDLSSAEHGLMQWLEQGFHGEMHYMAAHGLKRARPAELVPGTVSVITARMDYLPSDTPIDMPPGWQAVEFARLQRPSEGIVSVYARGRDYHKVLRARLQKLCDRIAQAVGPLGHRVFTDSAPVLEAELARRSGQGWRGKHTLVLNREGGSMFFLGEIYVDMPLEPSEPVTAHCGSCQACIDVCPTQAIIAPYRLDARRCISYLTIEHAGPIPLEMRPLLANRIYGCDDCQLVCPWNKYAQPSQLPDFDARAGLTGQQLVHFFAWDEATFLRLTEGGPIRRIGHERWLRNVAIALGNALRATGDAGVRAALQARAEDASDLVREHVAWALQVKSN

SEQ ID NO: 80960 - protein, 348 aa, Simplicispira sp.
  REGION 1..348: note = tr|A0A398CKA4|A0A398CKA4_9BURK Epoxyqueuosine reductase OS=Simplicispira sp. NY-02 OX=2315688 GN=queG; PE = 3 SV=1
MTQWARELGFSQIGVAGVDLSSAEPGLQGWLAQGFHGDMHYMEAHGMKRARPAELVPGTVSVITVRMDYLPRDTPAGWQAIEFARLADPEQGAVSVYARGRDYHKVLRARLQKLCDRIAEAVGPTGYRVFTDSAPVLEAELAARSGQGWRGKHTLVLNREAGSMAFLGEIYIDMELPESTPVTAHCGSCQACIDVCPTQAIVAPYRLDARRCISYLTIENAGPIPIEFRRPIGNRIYGCDDCQLICPWNKYARTSPLADFDARAGLSGQQLVDLFAWDEATFLRMTEGGPIRRIGHERWLRNVAVALGNALAKTHAPELRAALQSRAAHESALVREHVAWALENENIE

SEQ ID NO: 80961 - protein, 348 aa, unidentified
  source 1..348: note = Simplicispira suum
  REGION 1..348: note = tr|A0A2S0N540|A0A2S0N540_9BURK Epoxyqueuosine reductase OS=Simplicispira suum OX=2109915 GN=queG PE=3; SV = 1
MKQWARELGFSQIGVAGVDLSSAEPGLQAWLAQGFHGEMHYMEAHGMRRARPAELVPGTVSVITARMDYLPRDTPDGWQAIEFARLADPQQAAVSVYARGRDYHKVLRARLQKLCDRIAEAVGPTGYRVFTDSAPVLEAELAARSGQGWRGKHTLVLNREAGSMSFLGEIYIDMPLPESEPVSAHCGSCQACIDVCPTQAIIAPYRLDARRCISYLTIEHAGPIPLELRRPIGNRVYGCDDCQLICPWNKYAQASPLADFDARAGLSGEQLVDLLAWDEATFLRTTEGGPIRRIGHERWLRNVAVALGNALAKTHDARLRAALSARAAHESALVREHVQWALENENIE

SEQ ID NO: 80962 - protein, 384 aa, Singulisphaera acidiphila
  REGION 1..384: note = tr|L0DEN8|L0DEN8_SINAD Uncharacterized Fe-S protein; OS = Singulisphaera acidiphila (strain ATCC BAA-1392 / DSM 18658 / VKM B-2454 / MOB10) OX=886293 GN=Sinac_3000; PE = 4SV=1
MEPDLTARLKAEAMRLGFDQVGIAPAVSPSSYPHYLEWLQAGHAAGMGYLERQAEARAHPDRLLEGVRSIVVASFVYGRPAPEPAGPTQGKVARYARAADYHEVFWRRLEALLDWLKVEQPGLRGRAVADTAPLLERDFARLAGLGWVGKNTMLINRRLGSFTLLGGLLLDLELKYDPPHESSHCGTCTRCLDACPTDAFTGPYQLDARRCISYWTIEHKGPIPDDVAGQLDGWVFGCDVCQDVCPWNRKAAAGKEPALDPGEAWAHPNLLDWLTEDPATFSRAIKGTALSRSKRSGLLRNAAAVLGASGEASAVPALSALLDDADPVIRSSVARALGQIASDEAVKALEAHGNDQDPLAHDAIQRALTNSRRDRADSDNPLSV

SEQ ID NO: 80963 - protein, 390 aa, Singulisphaera sp.
  REGION 1..390: note = tr|A0A1N6KT55|A0A1N6KT55_9BACT Epoxyqueuosine reductase OS=Singulisphaera sp. GP187 OX=1882752; GN = SAMN05444166_6138 PE=4 SV=1
MDPDLTARLKSEALRLGFDQVGIAPAVSPPSYPHYLDWLQAGHAAGMGYLERQAEARAHPDRLLEGVRSVVVASFVYGRPESEPAGPTQGKVARYARAADYHEVFWRRLESLLDWLKVEEPAVRGRAVTDTAPLLERDFARRAGLGWVGKNTMLINRRLGSFTLLGALLLDVELNYDPPHESSHCGTCTRCLDACPTDAFTGPYQLDARRCISYWTIEHKGPIPDDVAGQLDGWVFGCDICQDVCPWNRKASAGREPALDPGEEWAHPNLVEWLAEDPATFSKAIKGTALARSKRSGLLRNAASVLGASGEASAVPALAGLLDDPDPVIRSSVARALGQIGSDEAIQALESHLNDQDPLAHDAIQRALIVSGSGQADSTTPECEERPQGL

SEQ ID NO: 80964 - protein, 362 aa, unidentified
  source 1..362: note = Sinimarinibacterium flocculans
  REGION 1..362: note = tr|A0A318EEA0|A0A318EEA0_9GAMM Epoxyqueuosine reductase OS=Sinimarinibacterium flocculans OX=985250; GN = queG PE=3 SV=1
MNTASPPVPSLAEIPALIPQWARELGFSDAGISSCEIDADAGHLRDWLAQSHHGEMAWMARDPQMRHTPARLHPGTVSVISARMPYRPAAADALQVLEDKERAYVSRYALGRDYHKLMRARLRRLAARIEQAVGTHGYRVFADSAPVLEKALARDARLGWIGKHTLLLHRDAGSWFFLGEIYTDLPLPRPDSAPVADSCGRCMACIRICPTQAIVAPYQLDARRCISYLTIEHRGPIPVALRPLIGNRIFGCDDCQLVCPWNRHAQLTTEPDFAPRHGLDDARLIDLFAWTEAQWLQRTEGMALRRAGYGGWLRNIAIALGNAPRSAAVIEALTQKADHEDPVVREHVGWALARQREQTASD

SEQ ID NO: 80965 - protein, 352 aa, unidentified
  source 1..352: note = Sinimarinibacterium sp.
  REGION 1..352: note = tr|A0A4U0GTD1|A0A4U0GTD1_9GAMM Epoxyqueuosine reductase OS=Sinimarinibacterium sp. CAU 1509 OX=2562283; GN = queG PE=3 SV=1
MTPDDLHRLPALIPAWARELGFDTAAIATLELDQDHAHLQQWLAQGRHGEMAYMARNTQMRQHPEALREGTLSVISVRMNYRTATTDAMSILRDGNLGYVSRYALGRDYHRLMRGRLQKLGQRIEQAVGPHGYRVFSDSAPVLEKALARNAGLGWIGKHTLLLNRDAGSWFFLGEIYTDLLLTPTAAAPVRDECGRCSACIKVCPTQAIVAPHQLDARRCISYLTIEHHGSIPLELRPMMGNRIFGCDDCQLVCPWNRYASLSTEPDFAPRHELDTARLIDLFAWSESLWLQRTEGMALRRTGYARWLRNLAVALGNAPSSDAVITSLRTRADHPDPIVQEHVAWALQQHGA

SEQ ID NO: 80966 - protein, 353 aa, unidentified
  source 1..353: note = Sinirhodobacter ferrireducens
  REGION 1..353: note = tr|A0A443LB14|A0A443LB14_9RHOB tRNA epoxyqueuosine(34) reductase QueG OS=Sinirhodobacter ferrireducens OX=1215032 GN=queG PE=4 SV=1
MKRRLIETARAEGFAKARVTTPDAIPEAMARLETFVAAGMHGQMGWMAERMEWRGNPAALWPEARAVVMLAEPYTPAVDPRAALEHRERGAISVYAQGKDYHDLLKRRLKRVGRWLIEAAKRQGEAAEIKVFVDTAPVMEKPLAQAAGLGWQGKHTNLLARDLGSWFFLGAIFTTLPLPPDAPDVSHCGRCTACLDACPTAAFPAPYRLDARRCISYLTIEHRGPVAPELRPMLGNRIYGCDDCLAACPWNKFAAAAHEIGYAAREAEAPLLAELAELDDAAFRARFAGSPIKRIGRDRMVRNVLYAIGNSGAPTLAAVAARLVDDADPAVADAARWALARVSPLAGPAPRDR

SEQ ID NO: 80967 - protein, 435 aa, unidentified
  source 1..435: note = Sinirhodobacter hungdaonensis
  REGION 1..435: note = tr|A0A443LQT9|A0A443LQT9_9RHOB Epoxyqueuosine reductase OS=Sinirhodobacter hungdaonensis OX=2501515; GN = queG PE=3 SV=1
MRRSSRARPSARFWPISCPACPPPRNTPSSISERARGLCPLTPGIFRAIGSKTAFPSSNCRRYPGGAGAAPPPGITETDVDELKRRLIETARAEGFAKARVTTPDAIPEAMERLETFVAAGMHGQMGWMAERMAWRGNPAALWPKARAVVMLAEPYTPAQDPRAVLEHREHGAISVYAQGKDYHDLLKRRLKRVGRWLIEAAKRQGETAEIKVFVDTAPVMEKPLAQAAGLGWQGKHTNLLARDLGSWFFLGAIFTTLPLAPDAPEPSHCGRCTACLDACPTAAFPAPYRLDARRCISYLTIEHRGPVDPELRPMLGNRIYGCDDCLAACPWNKFAAEAHEIGYAAREAGAPQLAELATLDDAAFRARFAGSPIKRIGRDRMVRNVLYAIGNSGAPALAAVAARLVDDPDPAVAEAARWALARLSPLAGAAPRDR

SEQ ID NO: 80968 - protein, 353 aa, unidentified
  source 1..353: note = Sinirhodobacter populi
  REGION 1..353: note = tr|A0A443KGZ9|A0A443KGZ9_9RHOB Epoxyqueuosine reductase OS=Sinirhodobacter populi OX=2306993 GN=queG; PE = 3 SV=1
MRADGTPVEELKALLTDRALAEGFSALRVTRPDAIPEAMARLRAFLDAGYHGDMGWMAERVEWRGDPAALWPAAKSVIMLAEVYTPDYDPRAVTRMPDRGAVSVYAQGKDYHDLVKRRLKRVGRWLLEEAGRRGLPGEIKVFVDTAPVMEKPLAQAAGLGWQGKHTNLLSRDLGNWFFLGAIFTTLELPADTPEVSHCGSCRACLDACPTNAFPAPYQLDARRCISYLTIEHKGPVDPELRPLLGNRIYGCDDCLAACPWNKFAAEAREIGYAARVGAPPLAELAGLDDAAFRARFAGSPIKRIGRGRMVRNVAYAIGNSADPGLAPALRPLTADPDPTVAEAAQWALVRLGC

SEQ ID NO: 80969 - protein, 353 aa, unidentified
  source 1..353: note = Sinirhodobacter populi
  REGION 1..353: note = tr|A0A443JNY2|A0A443JNY2_9RHOB Epoxyqueuosine reductase OS=Sinirhodobacter populi OX=2306993 GN=queG; PE = 3 SV=1
MRADGTPVEALKALLTDRALAEGFSALRVTRPDAIPEAMARLRAFLDAGYHGDMGWMAERVEWRGDPAALWPAAKSVIMLAEVYTPGYDPRAVTRMPDRGAVSVYAQGKDYHDLVKRRLKRVGRWLLEEAGRRGLPGEIKVFVDTAPVMEKPLAQAAGLGWQGKHTNLLSRDLGNWFFLGAIFTTLELPADTPEVSHCGSCRACLDACPTKAFPAPYRLDARRCISYLTIEHKGPVDPELRSLLGNRIYGCDDCLAACPWNKFAAEAREIGYAARVGAPPLAELAGLDDAAFRARFAGSPIKRIGRNRMMRNVAYAIGNSADPGLAPALRPLTADPDPTVAEAAQWALVRLGR

SEQ ID NO: 80970 - protein, 375 aa, Sinobaca qinghaiensis
  REGION 1..375: note = tr|A0A419V483|A0A419V483_9BACL Epoxyqueuosine reductase OS=Sinobaca qinghaiensis OX=342944 GN=queG PE=3; SV = 1
MPEETLKEKIISYAKEIGIDKVGFASADPFLTLKDRLITQQELQYQSGFEEKDIEKRTHPSLLMEEGRTIISIALAYPSKLKNAPKSTKGDRRGIFCRASWGEDYHNVLRKRLSRLEEYVKELDPQAQCRSMVDTGELSDRAVAERAGIGWSAKNCAVITPEFGSYVYLGEMLTTLAIEPDVPLTDQCGSCNICVDACPTDALIQGGQLDANKCIAFLTQTKDMLPERYRKKIGNRIYGCDTCQQVCPKNKGVDFHHQKEFEPDPETVKPNLNSLLHMSNKEFKERFGSIAGSWRGKKPIQRNAVIALGNFKEESAVPELNELIKNDPRPVIRSSCAWTLGQIGTHEAIVGLEEAYMLEQESEVLAELETALGLQ

SEQ ID NO: 80971 - protein, 356 aa, unidentified
  source 1..356: note = Sinobacteraceae bacterium
  REGION 1..356: note = tr|A0A5C7L7U1|A0A5C7L7U1_9GAMM Epoxyqueuosine reductase OS=Sinobacteraceae bacterium OX=1969813 GN=queG; PE = 3 SV=1
MIPSAPSLEALPQLIKAWALELGFADAGIASLQLGEDLDHLRRWLDEGMHGGMAFMRRDLHLREHPAQLRPGTLSVICARLDYRPHAESALRVLEQPDRAYISRYALGRDYHRLMRARLLKLGKRIEEAIGPHGYRVLTDSAPALEKALARNAHLGWIGKNTLLLNRHAGSWFFLGEIYTDLALPPDPEPAVENRCGSCVACIKICPTQAIVGPYRLDARRCISYLTIEHHGSIPEELRPMIGNRIFGCDDCQLVCPWNRYAGLTQEPDFAPRHRLDSAKLIELFAWDETEWLAKTEGMALRRAGYLRWLRNLAVALGNSPSSPETIAALQARAHHTDDTVREHVQWALRRLVQTP

SEQ ID NO: 80972 - protein, 395 aa, unidentified
  source 1..395: note = Sinobacteraceae bacterium
  REGION 1..395: note = tr|A0A2T5MET1|A0A2T5MET1_9GAMM Epoxyqueuosine reductase OS=Sinobacteraceae bacterium GT1R17 OX=2029166; GN = queG PE=3 SV=1
MSSYSAFHGGTIQLTNLRGGIQFAGFCVHSNSIRAAIHTVTGSTPIFDDLPVSIQRWARELGFADAGIAELQLGEDLDHLRHWLDQGMHGGMEFMQRNLDLREHPAQLRPGTVSVISARLDYRPHAEAADRVLKDGERAYISRYALGRDYHRLMRARLLKLGKKIEEAIGPHGYRVFSDSAPALEKALARNARLGWIGKNTLLLNKDAGSWFFLGEIYTDLALPVSTAEQVENRCGKCSACIKICPTQAFIGPYKLDARRCISYLTIEHHGAIPLELRPMMGNRIFGCDDCQLVCPWNRYAKLTNEPDFAPRHSLDSVKLTELFSWSEEQWLSRTEGMALRRAGYNRWLRNIAVALGNAPKNVDVVRALQTRAEFPDEIVREHVEWALQQQTQAA

SEQ ID NO: 80973 - protein, 311 aa, unidentified
  source 1..311: note = Sinomicrobium oceani
  REGION 1..311: note = tr|A0A1K1R971|A0A1K1R971_9FLAO Epoxyqueuosine reductase OS=Sinomicrobium oceani OX=1150368 GN=queG PE=3; SV = 1
MIDVKRRYTEYIKTEAKRLGFMACGISKAEFLESEAPRLERWLEQNMHGEMGYMENHFDKRLDPRLLVDGAQSVISLTLNYFPEKVQEDTDSPKISKYAYGKDYHFVIKEKLKELLGSIQEHIGEVGGRAFVDSAPVLDRAWATRSGLGWIGKNSNLITKQVGSFFFIAELIIDLELEYDHPTATDHCGSCTACIDACPTQAIVEPMVVDGSKCISYFTIELKGNIPSEFEGKFDDWMFGCDVCQDVCPWNRFSKPHREPLLDPHPDLLGMNKKDWEDITEDVFREVFRKSAVKRTKYEGLKRNIKFLGKY

SEQ ID NO: 80974 - protein, 311 aa, unidentified
  source 1..311: note = Sinomicrobium pectinilyticum
  REGION 1..311: note = tr|A0A3N0EZZ5|A0A3N0EZZ5_9FLAO Epoxyqueuosine reductase OS=Sinomicrobium pectinilyticum OX=1084421; GN = queG PE=3 SV=1
MDVKHRYTERIKAEAKRLGFMSCGISKAEFLEEEAPRLEQWLKQNMHGEMGYMENHFDKRLDPRLLVEGAKSVISLTLNYFPEEVQSQDTDSPKISKYAYGRDYHFVIKDKLKQLLEFIGEEIGEVGGRAFVDSAPVLDRAWATRSGLGWIGKNSNLITKKVGSFFFIAELIVDLELEYDNPVTTDHCGSCTACIDACPTQAIVEPMVVDGSKCISYFTIELKGNIPAEFDGKLDDWMFGCDVCQDVCPWNRFSKPHNEPLFDPHPDLLKMSKKDWEEITEEVFREVFRKSAVKRTKYEGLKRNIEFLKKS

SEQ ID NO: 80975 - protein, 312 aa, unidentified
  source 1..312: note = Sinomicrobium sp.
  REGION 1..312: note = tr|A0A329MW45|A0A329MW45_9FLAO Epoxyqueuosine reductase OS=Sinomicrobium sp. N-1-3-6 OX=2219864 GN=queG; PE = 3 SV=1
MIRSKTEKYTQLIKEEALRLGFMSCGISRAEFLEEEAPRLEGWLRQQMHGDMAYMEHYFDKRLDPRLLVEGARSVISLTLNYFPENVQKDPDSPRISKYAYGKDYHFVIKEKLKHLLEFIREEVGEVGGRAFVDSAPVLDRAWATRAGLGWIGKNSNLITKKVGSFFFIAELIIDLELEYDHPVTTDHCGSCTACLDACPTQAITAPMVVDGSKCISYFTIELKGNLPAEFEGKFDDWMFGCDVCQDVCPWNRFSKPHSEPLFDPHPDLLEMSRADWEDITEDIFRDIFRKSAVKRTKFEGLKRNIEFLKKD

SEQ ID NO: 80976 - protein, 391 aa, Sinorhizobium americanum
  REGION 1..391: note = tr|A0A1L3LHQ6|A0A1L3LHQ6_9RHIZ Epoxyqueuosine reductase OS=Sinorhizobium americanum OX=194963 GN=queG; PE = 3 SV=1
MVPGDAAKAENQGRKRRTLTAFLKEEAAAKGFELCRITRPDAIPQAPARLRQFLAAGCHGTMEWLSETAERRADPRVLWGEVRSIVLFGMNYGPDTDPLEILAKRDRGAISVYAQNRDYHDVVKGRLKEIATRFAARAGEDVKVFVDTAPVMEKPLAEKAGLGWQGKHTNLVSREFGSWLFLGSLFTTADLDIDDLERDHCGSCRACLDACPTRAFPAPYQIDARRCISYLTIEHKGPIDSELRPLIGNRIYGCDDCLAVCPWNKFARSASEMKLKAREDLREPELTALLTLDDAAFRSLFSGSPVKRIGRDRFVRNVLIAAGNSGEERLVPACKALARDASPTVRAMAVWALSRLMAADELAAFAMECGQETDDEVLSEWQMAGVSRCMS

SEQ ID NO: 80977 - protein, 391 aa, Sinorhizobium americanum
  REGION 1..391: note = tr|A0A1L3KZ55|A0A1L3KZ55_9RHIZ Epoxyqueuosine reductase OS=Sinorhizobium americanum CCGM7 OX=1408224; GN = queG PE=3 SV=1
MVPGDAAKAENQGRKRRTLTAFLKEEAAAKGFELCRITRPDAIPQAPARLRQFLAAGCHGTMEWLSETAERRADPRVLWGEVRSIVLFGMNYGPDTDPLEILAKRDRGAISVYAQNRDYHDVVKGRLKEIATRFAARAGEDVKVFVDTAPVMEKPLAEKAGLGWQGKHTNLVSREFGSWLFLGSLFTTADLDIDDLERDHCGSCRACLDACPTRAFPAPYQIDARRCISYLTIEHKGPIDSELRPLIGNRIYGCDDCLAVCPWNKFARSASEMKLKAREDLREPELTSLLTLDDAAFRSLFSGSPVKRIGRDRFVRNVLIAAGNSGEERLVPACKALARDASPTVRAMAVWALSRLMAADELAAFAMECGQETDDEVLSEWQMAGVSRCMS

SEQ ID NO: 80978 - protein, 390 aa, unidentified
  source 1..390: note = Sinorhizobium fredii
  REGION 1..390: note = tr|C3MCT7|C3MCT7_SINFN Epoxyqueuosine reductase; OS = Sinorhizobium fredii (strain NBRC 101917 / NGR234); OX = 394 GN=queG PE=3 SV=1
MPGHAIKAENQGRKRRTLTAFLKEEAAAKGFDLCRITRPDAIPEAPDRLAQFLDAGWHGTMEWLAETAERRADPRVLWSEVRSIVLFGMNYGPDSDPLAILAKRDRGAISVYAQNRDYHDVVKGRLKEIATRFAARAGEDVKVFVDTAPVMEKPLAEKAGIGWQGKHTNLVSREFGSWLFLGSLFTTADLDLDAPERDHCGSCRACLDACPTDAFPAPYRIDARRCISYLTIEHKGPIDRELRPLIGNRIYGCDDCLAVCPWNKFARSASEMKLRAREDLQEPELAALLTLDDAAFRSLFSGSPVKRIGRDRFVRNVLIAAGNSGQKDLIPACKACARDGSPTVRGMAVWALSRLMPAGDLAAFAAECGQETDDEVLSEWEMAGVSRCMS

SEQ ID NO: 80979 - protein, 390 aa, unidentified
  source 1..390: note = Sinorhizobium fredii
  REGION 1..390: note = tr|I3XFL3|I3XFL3_RHIFR Epoxyqueuosine reductase; OS = Sinorhizobium fredii USDA 257 OX=1185652 GN=yjeS PE=3; SV = 1
MPGDAAKAENQDRKRRTLTAFLKEEAAAKGFDLCRITRPDAIPDAPDRLRQFLDEGCHGTMEWMSETAERRSDPRVLWSEVRSIVLFGMNYGPDTDPLAILAKQDRGAISVYAQNRDYHDVVKGRLKEIATRFAARAGEDVKVFVDTAPVMEKPLAEKAGIGWQGKHTNLVSRDFGSWLFLGSLFTTADLDPDAPERDHCGSCRACLDVCPTGAFPAPYRIDARRCISYLTIEHKGPIDPELRPLIGNRIYGCDDCLAVCPWNKFARSASEMKLKAREDLQEPELADLLTLDDIAFRSLFSGSPVKRIGRDRFVRNVLIAAGNSGEERFVHACKALARDASPTVRAMAVWALSRLLAADDLAAFARECGRETDDEVLSEWEMAGVSRCMS

SEQ ID NO: 80980 - protein, 387 aa, unidentified
  source 1..387: note = Sinorhizobium medicae
  REGION 1..387: note = tr|A0A508X1X0|A0A508X1X0_9RHIZ Epoxyqueuosine reductase OS=Sinorhizobium medicae OX=110321 GN=queG PE=3; SV = 1
MPGNAAEAEIQGRKRRTLTAFLKEEAAAKGFDICRITHPDAIPQAPERLRQFLADGCHGTMEWLAETEERRSDPRVLWGDVRSITLFGMNYAPEDDPRDVLAKRDRGAISVYARNRDYHDVVKGRLKDIATRFAARAGEDVKVFVDTAPVMEKPLAEKAGIGWQGKHTNLVSREFGSWLFLGSLFTTAELELDEPERDHCGSCRACLDACPTDAFPAPYRIDARRCISYLTIEHKGPIAPEYRPLIGNRIYGCDDCLAACPWNKFARSASEMKLKARDDLREPELSFLLTLDDAAFRTFFSGSPVKRIGRDRFVRNALIAAGNSGEKSLIPVCKLLAADPSPTVRGMAVWALSRLTSTADLADFGRQCEAENDDAVLSEWKMAGVSL

SEQ ID NO: 80981 - protein, 387 aa, unidentified
  source 1..387: note = Sinorhizobium medicae
  REGION 1..387: note = tr|A6UFC0|A6UFC0_SINMW Epoxyqueuosine reductase; OS = Sinorhizobium medicae (strain WSM419) OX=366394 GN=queG; PE = 3 SV=1
MPGNAAEAEIQGRKRRTLTAFLKEEAAAKGFDICRITHPDAIPQAPERLRQFLADGCHGTMEWLAETEERRSDPRVLWGDVRSITLFGMNYAPEDDPRDVLAKRDRGAISVYARNRDYHDVVKGRLKDIATRFAARAGEDVKVFVDTAPVMEKPLAEKAGIGWQGKHTNLVSREFGSWLFLGSLFTTAELELDEPERDHCGSCRACLDACPTDAFPAPYRIDARRCISYLTIEHKGPIAPEYRPLIGNRIYGCDDCLAACPWNKFARSASEMKLKARNDLREPELSFLLTLDDAAFRTFFSGSPVKRIGRDRFVRNALIAAGNSGEKSLIPVCKLLAADPSPTVRGMAVWALSRLTSTADLADFGRQCEAENDDAVLSEWKMAGVSL

SEQ ID NO: 80982 - protein, 387 aa, unidentified; identical to SEQ ID NO: 80348
  source 1..387: note = Sinorhizobium meliloti
  REGION 1..387: note = tr|A0A0E0UJ47|A0A0E0UJ47_SINMB Epoxyqueuosine reductase OS=Sinorhizobium meliloti (strain BL225C); OX = 698936 GN=queG PE=3 SV=1

SEQ ID NO: 80983 - protein, 387 aa, unidentified
  source 1..387: note = Sinorhizobium meliloti
  REGION 1..387: note = tr|H0G0V8|H0G0V8_RHIML Epoxyqueuosine reductase; OS = Sinorhizobium meliloti CCNWSX0020 OX=1107881 GN=queG; PE = 3 SV=1
MPGDAAKAENQGRKRRNLTAFLKEEAAAKGFDICRITHPDAIPQAPERLRQFLAAGAHGTMDWLAETAERRSDPRVLWSEVRSIVLFGMNYAPEDDPREVLARRDRGAISVYARNRDYHDVVKGRLKEIATRFAARAGEDVKVFVDTAPVMEKPLAEKAGIGWQGKHTNLVSREFGSWLFLGSLFTTAELDLDEPERDHCGSCRACLDACPTDAFPAPYRIDARRCISYLTIEHKGSIAPELRPLIGNRIYGCDDCLAACPWNKFARSASEMKLQARDDLREPELSFLLTLDDPGFRAFFSASPVKRIGRDRFVRNALIAAGNSGEKSLIEVCKALAADASPTVRGMAVWALLRLISSADLAVFARQCGPETDDEVLAEWQMAGVNR

SEQ ID NO: 80984 - protein, 390 aa, unidentified
  source 1..390: note = Sinorhizobium saheli
  REGION 1..390: note = tr|A0A178YG23|A0A178YG23_SINSA Epoxyqueuosine reductase OS=Sinorhizobium saheli OX=36856 GN=queG PE=3; SV = 1
MPGNAVSAETQGRKRRTLTAFLKEEAASKGFDVCRITHPDAIPQAPERLKQFLAAGAHGTMDWLAETAERRSGPRVLWSEVRSIALFGMNYGPEADPLAILAKRDRGAISVYAQNRDYHDVVKGRLKEIATRFAARAGEDVKVFVDTAPVMEKPLAEKAGIGWQGKHTNLVSREFGSWLFLGSLFTTADLELDAPERDHCGSCRACLDICPTNAFPAPYQIDARRCISYLTIEHKGPIAPELRPLIGNRIYGCDDCLAVCPWNKFAHSASEMKLKARDELKEPKLSELLTLDDAAFRAFFSGSPVKRVGRVRFIRNALIAAGNSGEKTLIPACKALASDPSPTVRGMAVWALSRLMSPAEFTAYAGARGPESDDEVLGEWEMAGVSRCMS

SEQ ID NO: 80985 - protein, 400 aa, Sinorhizobium sp.
  REGION 1..400: note = tr|A0A1V3QV25|A0A1V3QV25_9RHIZ Epoxyqueuosine reductase OS=Sinorhizobium sp. A49 OX=1945861 GN=queG PE=3; SV = 1
MRISISEGNVVPGSAAKAENQERRRQKLTDFLKAEAADKGFDVCRIARPDAIPEAPARLGDFLDEGFHGTMEWLAETAERRADPRALWGDVRSVVMFGMNYGPEEDPRGILDQPDRGAISVYAQNRDYHDIIKGRLKEVATRFAARAGEDVKVFVDTAPVMEKPLAEKAGLGWQGKHTNLVSREFGSWLFLGSLFTTADLAFDAAERDHCGSCRACVDACPTAAFPAPYKIDARRCISYLTIEHKGPIDPALRPLIGNRIYGCDDCLAACPWNKFARTASEMKLKARDDLKAPSLAFLLTLDDPTFRTFFSGSPVKRIGRDRFVRNVLIAAGNSGDENLVEACKTLTGDASPGVRAMAVWALSRLISHDALAAHERQCGAESDEEVLSEWQMAGVSRCMS

SEQ ID NO: 80986 - protein, 400 aa, Sinorhizobium sp.
  REGION 1..400: note = tr|A0A0T6Z2G4|A0A0T6Z2G4_9RHIZ Epoxyqueuosine reductase OS=Sinorhizobium sp. Sb3 OX=1358417 GN=queG PE=3; SV = 1
MRTSTSEDESVPGIAAKADNGDRRRLKLTEFLKAEAADKGFDLCRITRPDAIPEAPARLQDFLDDGFHGTMDWLAETAERRSDPRTLWSDVRSVVMFAMNYGPEDDPRGILEKTDRGAISVYAQNRDYHDIIKGKLKEVATRFAARAGEDVKVFVDTAPVMEKPLSEKAGLGWQGKHTNLVSREFGSWLFLGSLFTTADLVIDEPERDHCGSCRACLDACPTGAFPAPYQIDARRCISYLTIEHKGPIDPELRPLMGNRIYGCDDCLAACPWNKFAQAASEMKLKAREDLKAPSLEALLGLDDPAFRSLFSGSPVKRIGRDRFVRNVLIAAGNSGNQALVPAVKARVGDASPVVRAMAVWALSRLVAPVALAQFAEQCEPETDEDVLNEWQMAGVSRCMS

SEQ ID NO: 80987 - protein, 318 aa, Siphonobacter aquaeclarae
  REGION 1..318: note = tr|A0A1G9XS90|A0A1G9XS90_9BACT Epoxyqueuosine reductase OS=Siphonobacter aquaeclarae OX=563176 GN=queG; PE = 3 SV=1
MTVSDLVRQRHTASVKEIARDLGFDFCGISAAGFLEEEAPRLENWLRRGRHGKMLYMENHFDKRLDPTLLVEGAKSVVSLLYNYYPPERLPEGEEDFKLAKYAYGTDYHFVIRDKLKAFLDRIRVEIGEVDGRCFVDSAPVMEKAWAKKAGLGWVGKNSNLITREIGSFFFLAELIIDLDLEPDGPITDYCGTCTRCIDACPTDALSEPYSVDGSRCISYLTIELKEAIPGDFQGKTDNWIFGCDICQDVCPWNRFSRPHRETAFLLPEELKSFGRRDWQEMTEETFRRIFQKSPLKRAKWEGFVRNLRFVSEENSSV

SEQ ID NO: 80988 - protein, 313 aa, unidentified
  source 1..313: note = Siphonobacter curvatus
  REGION 1..313: note = tr|A0A2S7IP30|A0A2S7IP30_9BACT Epoxyqueuosine reductase OS=Siphonobacter curvatus OX=2094562 GN=queG; PE = 3 SV=1
MTVSDIIQQENALRIKEIARDLGFDFCGISRADFLEEEAPRLEKWLRLGRHGKMQYMENHFDKRLDPRLLVEGAKSVVSLLYNYYPEETLPEGDEDLKIAKYAYGVDYHFVIKDKLKDFLSRIQEEIGAVDGRCFVDSAPVMEKAWAKQAGLGWIGKNSNLITRKSGSFFFIAELIIDLDLQPDGPMADYCGTCTRCIDACPTDAISEPYGVDGSRCISYLTIELKESIPESFKGHTKNWVFGCDICQDVCPWNRFSQPHRESAFHLPDELKTFQARDWQELTEETFRRVFKKSPLKRAKYEGLQRNVLFVTE

SEQ ID NO: 80989 - protein, 313 aa, Siphonobacter sp.
  REGION 1..313: note = tr|A0A261Q3H3|A0A261Q3H3_9BACT Epoxyqueuosine reductase OS=Siphonobacter sp. BAB-5385 OX=1864822 GN=queG; PE = 3 SV=1
MTVSDIIQQQNALRIKEIARDLGFDFCGISRADFLEEEAPRLEKWLRLGRHGKMQYMENHFDKRLDPRLLVEGAKSVVSLLYNYYPEETLPEGDEDLKIAKYAYGVDYHFVIKDKLKDFLSRIQEEIGAVDGRCFVDSAPVMEKAWAKQAGLGWIGKNSNLITRKSGSFFFIAELIIDLDLQPDGPMADYCGTCTRCIDACPTDAISEPYGVDGSRCISYLTIELKESIPESFKGHTKNWVFGCDICQDVCPWNRFSQPHRESAFHLPDELKTFQARDWQELTEETFRRVFKKSPLKRAKYEGLQRNVLFVTE

SEQ ID NO: 80990 - protein, 313 aa, Siphonobacter sp.
  REGION 1..313: note = tr|A0A2N7BDR3|A0A2N7BDR3_9BACT Epoxyqueuosine reductase OS=Siphonobacter sp. BAB-5405 OX=1864825 GN=queG; PE = 3 SV=1
MTVSDIIQQENALRIKEIARDLGFDFCGISRADFLEEEAPRLEKWLRLGRHGKMQYMENHFDKRLDPRLLVEGAKSVVSLLYNYYPEETLPEGDEDLKIAKYAYGVDYHFVIKDKLKDFLSRIQEEIGAVDGRCFVDSAPVMEKAWAKQAGLGWIGKNSNLITRKGGSFFFIAELIIDLDLQPDGPMADYCGTCTRCIDACPTDAISEPYGVDGSRCISYLTIELKESIPESFKGHTKNWVFGCDICQDVCPWNRFSQPHRESAFHLPDELKTFQARDWQELTEETFRRVFKKSPLKRAKYEGLQRNVLFVTE

SEQ ID NO: 80991 - protein, 346 aa, Skermanella aerolata
  REGION 1..346: note = tr|A0A512DQ93|A0A512DQ93_9PROT Epoxyqueuosine reductase OS=Skermanella aerolata OX=393310 GN=queG PE=3; SV = 1
MDAADKREQIRDRALALGFDAVGFAPASLGDEARERLGDFLAQGLHGDMGWMLEKADRRGDPQVLWPEARTVIALGMSYAPHEDPRSLLEHPDRGIVSVYARGRDYHDVVKSRLKQLAQWVHRSFATDVKVFVDTAPVMEKPLAEQAGLGWQGKHTNLVSREHGSWLFLGEVYTALELPPDSPGADLCGSCRRCQDACPTAAFPEPYRLDARRCISYLTIEHKGPIPEDLRPLMGNRIYGCDDCLAACPWNKFAKRTREAAFLPRAELTAPRLADLAQLDDAGFRQVFSGSPIKRIGRDRFVRNVLTALGNSGDQAQIGVVERLTADESDLVRDAASWALERLRAV

SEQ ID NO: 80992 - protein, 337 aa, Skermanella aerolata
  REGION 1..337: note = tr|A0A0D2VUN6|A0A0D2VUN6_9PROT Epoxyqueuosine reductase OS=Skermanella aerolata KACC 11604 OX=1385368; GN = queG PE=3 SV=1
MRDRALALGFDAVGFAPASLGDEARERLGDFLAQGLHGDMGWMLEKADRRGDPQVLWPEARTVIALGMSYAPHEDPRSLLEHPDRGIVSVYARGRDYHDVVKSRLKQLAQWVHRSFATDVKVFVDTAPVMEKPLAEQAGLGWQGKHTNLVSREHGSWLFLGEVYTALELPPDSPGADLCGSCRRCQDACPTAAFPEPYRLDARRCISYLTIEHKGPIPEDLRPLMGNRIYGCDDCLAACPWNKFAKRTREAAFLPRAELTAPRLADLAQLDDAGFRQVFSGSPIKRIGRDRFVRNVLTALGNSGDQAQIGVVERLTADESDLVRDAASWALERLRAV

SEQ ID NO: 80993 - protein, 358 aa, Skermanella stibiiresistens
  REGION 1..358: note = tr|W9GU59|W9GU59_9PROT Epoxyqueuosine reductase; OS = Skermanella stibiiresistens SB22 OX=1385369 GN=queG; PE = 3 SV=1
MAAAEPKPTIPGTPERSREEIRDRALALGFDAVGFAPATLAAEARARLGEFLAQGMHGDMGWMLEKADRRGDPQVLWPDARTIVALGMSYAPHEDPRRLLDHPDRGVVSVYAQGRDYHDVVKSRLKQLAQFIHRRHAAEVKVFVDTAPVMEKPLAERAGLGWQGKHTNLVSRGHGSWLFLGEVYTALELPPDPPGADLCGSCRRCQDACPTAAFPEPYRLDARRCVSYLTIEHKGPIPEDLRPLMGNRIYGCDDCLAACPWNKFAKRTREAAFLPRAELTAPRLADLAQLDDAAFRQVFSGSPIKRIGRDRFVRNVLTALGNSGDRGQMALVERLTHDGSDLVRDAAEWALKRLNPAP

SEQ ID NO: 80994 - protein, 377 aa, Smithella sp.
  REGION 1..377: note = tr|A0A094KHP8|A0A094KHP8_9DELT PBS lyase; OS = Smithella sp. D17 OX=1538639 GN=KD27_07280 PE=4 SV=1
MITKQDIITEAKRLKFADIGFTDAQPFDSQREYLQAHQEEYGWAEAIGLSLIAGTDPKNILPQAKSIIVLLESYFEESYPLQLERHFGRCYLDDDRVTKDGLALRLKAFRKFLQANGIDSKVPFNLPHRLSAARAGLGTFGKNCLFYARRVARTSSFVFPVALAIDHEFVADEPEVSIGCPDWCRNACVAACPTHALQGGGKIDPRRCISFLTYYGDGLTPLELREPMGMNIYGCDRCQNVCPRNTPWMAQEKPQNPRVLAKTANFDLSRLLHMDKPYFENKIWPHMFYMSTDDVWRWKMNVARAMGNSLNPVYVAELILAFKENSDERVRCMIAWALGRIGNKEAMDGLEQFSRDSKDNVKEEIKQAMVLIEKKKV

SEQ ID NO: 80995 - protein, 377 aa, Smithella sp.
  REGION 1..377: note = tr|A0A0Q1AUB6|A0A0Q1AUB6_9DELT PBS lyase; OS = Smithella sp. SDB OX=1735324 GN=APR62_05410 PE=4 SV=1
MLTKQDIIAEAKRLKFADIGFTDAKPFDSQKEYLLAHQDGYGWAEAIGLGLLAGTDPKNILPQAKSIIVLLESYFEESYPLPLEHHFGRCYLDDDRVTKDGLALKIKSFRKLLQLNGIDSKVPFDLPHRLSAARAGLGTFGKNSLFYARRVALNSSFVFPIAIVIDAEYTPDESSIAIECPEWCRNTCVAACPTRALKGDGKIDPLRCISFLTYYGAGLTPLELREPMGMYIYGCDRCQNVCPRNIPWMVRKKPQNPRVLAKESNFDLSCLLHMDKLYFEQKVWPHMFYMSVDDIWRWKMNVARAMGNSLNPAYVKELILAFGENSDERVRCMIAWALGRIGNQEAMTGLRKFFDNSEGIEKKEIKQAIIAIEKRKV

SEQ ID NO: 80996 - protein, 389 aa, Sneathiella sp.
  REGION 1..389: note = tr|A0A2E2QKB2|A0A2E2QKB2_9PROT Epoxyqueuosine reductase OS=Sneathiella sp. OX=1964365 GN=queG PE=3 SV=1
MPTSISKSDRLPVDKTRIREMAQAEGFDAVGFAPADIGEAPGSRLQEFIALERHGDMDWIAEKAAWRRHPQALWPDARTVIVLALNYGPEADPLAHTGKADRGVISVYAQGRDYHDVIKKKLKRIARALLKDYGGDVKVFVDTAPVMEKPLAAAAGLGWQGKHTNLLSREYGSWLFLGCIFTTLDIAPDAREEGSCGSCTACLDICPTNAFPAPYQLDAKRCISYLTIETRTHIERDLRPLIGNRIYGCDDCLAVCPWNKYAKHARELSLKPKPGLNAPKLVELAALDDAAFRALFAGTAVKRLGRNRFVRNVLIAIGNGGNREDLAVVKPLLGDASPIVRVAAVWAAGRLADMASYNRLRDEFAEQETDDDVLTEWKLSEGDNNESAG

SEQ ID NO: 80997 - protein, 384 aa, Sneathiella sp.
  REGION 1..384: note = tr|A0A2G1Z733|A0A2G1Z733_9PROT Epoxyqueuosine reductase OS=Sneathiella sp. OX=1964365 GN=queG PE=3 SV=1
MPTSTSEPAIGTDDKQRIRDQALAEGFDDIGFTMADIGDQPGKHLDTFIEKQRYGDMGWIVEKADRRRHPNALWPEVKSVIVLAQNYGPDTDPLANLDKPDRGSISVYAQGKDYHDVVKKRLKRLARWLIANYGGDVKVFVDTAPVMEKPLAEKAGIGWQGKHTNLLSRDFGSWLFLGSIFTTLDILPDAPVAGDCGSCRACLDICPTNAFVAPYQLDARRCISYLTIETRDHIDRDLRPLIGNRIYGCDDCLAVCPWNKYAKKASDMALYARSELVAPRLQQLVALDDSEFRALFSGSPVKRLGRNRFVRNVLIALGNSGDEKNLKSVTSLLGDASAIVRVAAVWAFGQLSSPEIYGRLKQDLIGQEQDPDVLAEWNLSKGRE

SEQ ID NO: 80998 - protein, 323 aa, unidentified
  source 1..323: note = Snowella sp.
  REGION 1..323: note = tr|A0A2W7B7Q0|A0A2W7B7Q0_9CYAN Epoxyqueuosine reductase OS=Snowella sp. OX=2164131 GN=queG PE=3 SV=1
MTVTSEEIKQKAIDLGFHLVGIAAIAEVEPDSAVEHLKAWLELGYQAKMQWMNNPKRLDIRSCFPEGRSVISVALNYYTPHQRPQGKEYAKIARYAWGRDYHKVLGKKLKALGQWLESQDATIQTRYYADTGPIQDKVWAQRSGLGWIGKNGNLITRQYGSWVFLGELLTNLSLTPDQPHSEHCGTCTRCLDACPTKAIAQPFVINSDRCIAYHTIENRAETLPPEITPHLEGWVAGCDICQDVCPWNQRFAQATDIADFQPYEGNIDSKLTDFVKITETEWERRFPASALRRIKPMMWRRNAHANLDTDTSKNLNYLYDSDD

SEQ ID NO: 80999 - protein, 379 aa, unidentified
  source 1..379: note = Sodalis praecaptivus
  REGION 1..379: note = tr|W0I245|W0I245_9GAMM Epoxyqueuosine reductase; OS = Sodalis praecaptivus OX=1239307 GN=queG PE=3 SV=1
MSYPFDLTELARQIKRWGQELGFQQVGICDTDLAAHEPTLQAWLDRQYHGEMAWMARHGMLRARPHELLPGTLRVISVRMNYLPAKAAFASTLKNPSLGYVSRYALGRDYHKVLRNRLKQLGERIRDACGEVNFRPFVDSAPIMERPLAAKAGIGWVGKHSLILNREAGSWFFLGELLIDLPLPVDAPQAEQCGRCVACITTCPTGAIVEPYTLDARRCISYLTIELEGEIPEALRPLIGNRIYGCDDCQLICPWNRFSQLTDEPDFSPRAVLHAPKLVELFGWNEATFLRVTEGSAIRRIGHVRWSRNIAVALGNAPYQDEIVLALRRRLGELPLLDVHIHWALERQMARREAAAVAVQSAQQTRLVRAIEKGLTRDA

SEQ ID NO: 81000 - protein, 379 aa, Sodalis sp.
  REGION 1..379: note = tr|A0A4R1NFP1|A0A4R1NFP1_9GAMM Epoxyqueuosine reductase OS=Sodalis sp. 159R OX=2529856 GN=queG PE=3 SV=1
MSYPFDLIELARLIKEWGLALGFQQVGICDTDLAAHESVLQAWLDNQYHGDMEWMARHGSLRARPHELLPGTLRVISVRMNYLPANAAFARTLKNPRLGYVSRYALGRDYHKVLRHRLQQLGNKIREWCKEVQFRPFVDSAPLMERPLAAKAGIGWVGKHSLILNREAGSWFFLGELLINLPLPVDQPQQDGCGRCVACMTACPTGAIVAPYTVDARRCISYLTIELQGEIPEDLRPLIGNRIYGCDDCQLICPWNRFSALTDEKDFSPRAALHSPELLELYKWDETTFLRATEGSPIRRIGHWRWLRNIAVALGNAPYEESIVSCLQESLGNDALLNKHITWAIERQLQQREAATVNVQPARQRRLINAIEKGLARDA

SEQ ID NO: 81001 - protein, 379 aa, Sodalis sp.
  REGION 1..379: note = tr|A0A1J7D2B3|A0A1J7D2B3_9GAMM Epoxyqueuosine reductase OS=Sodalis sp. TME1 OX=1912097 GN=queG PE=3 SV=1
MSYPFDLTKLARQIKRWGQELGFQQVGICDTDLAAHEPTLQAWLDRQYHGEMAWMARHGMLRARPHELLPGTLRVISVRMNYLPAKAAFASTLKNPSLGYVSRYALGHDYHKVLRNRLKQLGERIRDACGEVNFRPFVDSAPIMELPLAAKAGIGWVGKHSLILNREAGSWFFLGELLIDLPLPVDAPLAEQCGRCVACITTCPTGAIVEPYTLDARRCISYLTIELEGEIPEALRPLIGNRIYGCDDCQLICPWNRFSQLTNEPDFSPRAVLHAPELVELFGWNEATFLRVTEGSAIRRIGHVRWSRNIAVALGNAPYQDEIVLALRRRLGELPLLDVHIHWALERQMARREAAAGAIQSAQQTRLVRAIEKGLTRDA

SEQ ID NO: 81002 - protein, 339 aa, Soehngenia sp.
  REGION 1..339: note = tr|A0A4Z0D660|A0A4Z0D660_9FIRM tRNA epoxyqueuosine(34) reductase QueG OS=Soehngenia sp. 1933P; OX = 2562294 GN=queG PE=4 SV=1
MKVELIKNLALELGLDLIGFTDITPLNRIKNKLKDRVDKKLNTEFEASDLQKRIDPKKIMGEANSIIVVGFPYFYANFNGNDSKDRLFGKLSRSSWGMDYHLVIKKYLQKLVDELSQYEKFDYSIITDTSPLVDREIAYKAGIGYYGKNTSIINQTYGSFIFIGYILTDLYLDKYNSPIESQCGECDICMRSCPGKAIEEPYKLNPKKCISYLTQTKKYLDEEESKKMGINIYGCDICQMVCPKNKNIKESTFDEFKPYKTNGVVYIKEILIMSNEEFKNKYGDMAGSWRGKNVLVRNAIIALENIGYIDDEIVEYLMENKSELLKPYIARYITKFSSK

SEQ ID NO: 81003 - protein, 354 aa, unidentified
  source 1..354: note = Solemya elarraichensis
  REGION 1..354: note = tr|A0A1T2L7X8|A0A1T2L7X8_9GAMM Epoxyqueuosine reductase OS=Solemya elarraichensis gill symbiont; OX = 1918949 GN=queG PE=3 SV=1
MTESSTALHQVACDIKSWASELGFQQCGITDTDLTLAESRLHAWLGHGYQGDMEYMSRHGVKRSRPAELEPGTLRVVSVRMNYLPDTQEDLLALTQEPAQAFLSRYALGRDYHKLLRKRLQQLADRITSAHGKFGYRVFVDSAPVLEKPIAEKAGLGWIGKHSNLISRDAGSWFFLGELYVDLPLPIDEPSEEHCGSCSACIDICPTQAIVEPFVVDARRCISYLTIELHDAIPLALRKQIGNRIYGCDDCQAVCPWNRFSQNGAEEDFLPRHELDQTTLLELFSWDEETFLNRTEGSAIRRIGYQRWQRNLAVALGNSKGGTEVISSLQHALTDASPMVKEHIAWALSNLCSD

SEQ ID NO: 81004 - protein, 362 aa, unidentified
  source 1..362: note = Solemya pervernicosa
  REGION 1..362: note = tr|A0A1T2L7J1|A0A1T2L7J1_9GAMM Epoxyqueuosine reductase OS=Solemya pervernicosa gill symbiont OX=642797; GN = queG PE=3 SV=1
MENCPPTTVNLSTDELAQLAASIANWATELGFDQIGISDTDLHVAEIHLQQWLKAGEHGEMSYMAAHGLKRSRPELLHPGTLRVITARLDYWPEQGMQSAIDLLEQGEQAYISRYALGRDYHKLMRKRLQQLAKRIEAAIGSHNYRVFSDSAPVLEKPLAERSGLGWVGKHTNLINQQNGSWFFLGEVYTDLPLPTVEPAANHCGTCQRCIEVCPTQAITAPYQLDARRCISYLTIELQGAIPLEYRAQIGNRIYGCDDCQLFCPWNRFAQMSREADFLPRNDLDNASLIELFDWSETEFLQRTEGSPIRRLGHQRWLRNIAVAMGNAASSESIRQALRSQSSHPSELVREHVAWALSQQGQ

SEQ ID NO: 81005 - protein, 360 aa, unidentified
  source 1..360: note = Solemya velesiana
  REGION 1..360: note = tr|A0A1T2KSC5|A0A1T2KSC5_9GAMM Epoxyqueuosine reductase OS=Solemya velesiana gill symbiont OX=1918948; GN = queG PE=3 SV=1
MNRQPTDDDFSKLAGDIKRWGAELGFQQVGICDTDLTVAEARFNEWADQGCHGEMAYMVSHGSKRSRPEELVPGTLRIISVRMDYLPGDDNPTGILNDSSLGYISRYALGRDYHKLMRNRLQKLAKRMEQEVGEFGYRVFVDSAPVLEKSLAEKAGLGWAGKHTNLVNRHAGGWFFLGELYTDLPLPSDEAESNHCGRCQACIDVCPTRAIVAPYQVDARRCISYLTIELHGTIPLEFRPLIGNRVYGCDDCLLACPWNRFAKSTGEQDFLPRHGLNSSQLVDLFAWSEEDFLERMEGSAIRRLGHERWLRNIAVALGNAETTSLVVDALKARSSHPSELVREHVNWALIRHTTSGDIAS

SEQ ID NO: 81006 - protein, 354 aa, Solemya velum
  REGION 1..354: note = tr|A0A0B0HBX6|A0A0B0HBX6_SOVGS Epoxyqueuosine reductase OS=Solemya velum gill symbiont OX=2340 GN=queG; PE = 3 SV=1
MTESSTALQQVASDIKSWAGELGFQQCGITDTDLTLAESRLHAWLGNGYHGDMEYMSRHGVKRSRPGELEPGTLRVISVSMNYLPDKQEDLLALTQEPAQAFISRYALGRDYHKLLRKRLQQLADRITSAHGKFGYRVFVDSAPVLEKPIAEKAGLGWIGKHSNLISRNAGSWFFLGELYVDLPLPIDDPAEEHCGSCSECIDICPTQAIVEPFVVDARRCISYLTIELHEAIPLELRKQIGNRIYGCDDCQAVCPWNRFSQSTGEEDFLPRHELDKKTLLELFSWSEETFLKRTEGSAIRRIGYQRWQRNLAVALGNSSGGSEVISSLQRALADASLLVKEHIEWALSNLGSD

SEQ ID NO: 81007 - protein, 377 aa, unidentified
  source 1..377: note = Solibacillus isronensis
  REGION 1..377: note = tr|K1L2T8|K1L2T8_9BACL Epoxyqueuosine reductase; OS = Solibacillus isronensis B3W22 OX=1224748 GN=queG PE=4; SV = 1
MKVHQLQEDLVKYAASIGVDKIGFTTAAPFHELKNRLRRQQQLAYQSGFEEANIELRTEPLKLLDEAESIIAIAIAYPSRMQDAPQGKKGERRGIFCRASWGIDYHTAVRERLQLIEAWLHERVSNVKVKSMVDTGELVDRAVAERAGIGWSAKNCSIITPEFGSYVYLGEIITNIPFAPDTPMEDECGDCTLCIDVCPTGAIVAPGQLNSQRCIAFLTQTKGFLPDEFRAKIGNRLYGCDTCQTVCPKNKGKLNWIHDEFTPDPEIAKPLLQPLLSISNKEFKAKFGHVSGSWRGKKPIQRNAILALAHFKEEAAMPDLVQVLQKDERPVLRGTAAWAIGKIGTDGAVEILIAAKKTEQDEEVLAEIDKGLAMLNH

SEQ ID NO: 81008 - protein, 377 aa, Solibacillus silvestris; identical to SEQ ID NO: 81007
  REGION 1..377: note = tr|A0A1A7LT18|A0A1A7LT18_9BACL tRNA epoxyqueuosine(34) reductase QueG OS=Solibacillus silvestris OX=76853 GN=A9986_09005 PE=4 SV=1

SEQ ID NO: 81009 - protein, 377 aa, Solibacillus silvestris; identical to SEQ ID NO: 81007
  REGION 1..377: note = tr|F2EZY1|F2EZY1_SOLSS Uncharacterized Fe-S protein; OS = Solibacillus silvestris (strain StLB046) OX=1002809; GN = SSIL_0668 PE=4 SV=1

SEQ ID NO: 81010 - protein, 382 aa, Solibacillus sp.
  REGION 1..382: note = tr|A0A2D1SXN4|A0A2D1SXN4_9BACL tRNA epoxyqueuosine(34) reductase QueG OS=Solibacillus sp. R5-41 OX=2048654 GN=queG PE=4 SV=1
MKVHQLQAELIEYAKSIGVDKIGFTTAAPFHELKNRLRRQQELSFQSGFEESDVELRTVPLKLLDGAESIVAIALAYPSRMNDAPQGKKGARRGVFCRASWGVDYHTAVRERLQLIEAWLRERVPSVKTKSMVDTGELVDRAVAQRAGIGWSGKNCSIITPEFGSYVYLGEIMTNIPFAPDMPMEDECGECTLCIDVCPTGAIVAPGQLNSQRCIAFLTQTKGFLPDEFRTKIGNRLYGCDTCQTVCPKNKGKLNWIHDEFTPDPELAKPLLQPLLSISNKEFKAKFGHVSGSWRGKKPIQRNAIIALAHFKEESAVPDLIELMLKDERPVIRGTAAWAIGKIGSEDANEALLAAQIKEQDEEVLAEIEKGLAMLTNVERRI

SEQ ID NO: 81011 - protein, 341 aa, unidentified
  source 1..341: note = Solibacter usitatus
  REGION 1..341: note = tr|Q020U1|Q020U1_SOLUE 4Fe-4S ferredoxin-type domain-containing protein OS=Solibacter usitatus (strain Ellin6076) OX=234267 GN=Acid_3576 PE=4 SV=1
MNAEGIRELARACGFELAGVASALPAEDRARYHDWVAAGWAGKMGYLTDHRAEVRDDPRQLLASAKSIICVGKLYQTPWPHTARFDAHDRGWISRYAWGEDYHDVMRRGLERLEGMLRESVGGALESRICVDTAPLLERSYARLAGLGWIGKNTCLINQQQGSWFFLGELLVSLEIASETPPPDRCGTCTRCIDACPTAAIVPGKGLDATRCISYFTIELRGTIPEEMRAGMGAHIFGCDICQDVCPWNGRAPMTVEESFAPRHFAPRLEEMGAITEDEFRAMFRGTPVSRARYRGFLRNVAVAMGNGGEEKFRGPLEEMARSQDEVVAEHARWALKRIGG

SEQ ID NO: 81012 - protein, 366 aa, unidentified
  source 1..366: note = Solimicrobium silvestre
  REGION 1..366: note = tr|A0A2S9H0U7|A0A2S9H0U7_9BURK Epoxyqueuosine reductase OS=Solimicrobium silvestre OX=2099400 GN=queG; PE = 3 SV=1
MINDNYPFLALSIKAWGQELGFSDVRISDVDLSQHEAGLSAWLAAGYHGEMEYMAAHGMKRARPAELVPGALRAIMVRMDYLPPESPPNWRNVEHQRAQQAGQAIISLYARGRDYHKVLRGRLQELANRIEVEVGEFGYRVFTDSAPVMEVALAEKAGLGWRGKHTLLLNRQAGSLFFIGEIITDLPLPVDPPVTPHCGQCTACITSCPTQAILAPYKLDARRCISYLTIELKTSIPIELRPLIGNRVYGCDDCQLCCPWNKFAQVSEQADFAVRNGLDNASLIDLFSWSEADFMKKLEGSPIRRIGYISWLRNLAVGLGNAKRELSMHQMDTSELDSALQKQISHPSEIVREHVLWALQQTAIVA

SEQ ID NO: 81013 - protein, 361 aa, Solimonas aquatica
  REGION 1..361: note = tr|A0A1H9D0R1|A0A1H9D0R1_9GAMM Epoxyqueuosine reductase OS=Solimonas aquatica OX=489703 GN=queG PE=3 SV=1
MRTDPAPPRPDAAAWQALRALPEWARELGFADAGFATLALDEDLAHLQRWLDEGLHGGMDWMRRDPALRAEPARLRPGTLSVISARMAYPIDAALAQQVLGDATRAYISRYALGRDYHRVLRARLLRLARRIEQAIGPFGYRVLADSAPALEKAMARNAGLGWIGKHTLLIQREAGSWFFLGEIYSDLPLPAQDASAAKNLCGSCSACLDICPTQAIIAPYRLDAARCISYLTIEHHGAIPEALRAAMGNRIFGCDDCQLVCPWNRYAQKSGEADFMARHRLDRAGLLELFAWDEAEWLRRTEGMALRRAGYARWLRNLAIALGNAPPSDAVRAALQARLHSDDEVLREHLLWALQRQGAA

SEQ ID NO: 81014 - protein, 378 aa, unidentified
  source 1..378: note = Solimonas fluminis
  REGION 1..378: note = tr|A0A2S5TCE7|A0A2S5TCE7_9GAMM Epoxyqueuosine reductase OS=Solimonas fluminis OX=2086571 GN=queG PE=3; SV = 1
MAPSIGSPPAALAAELPEKIRQWARELGFADAGVASLELDEDLAHLQRWLDEGRNGGMAFMARDPGLRRDPARLRPGTLGVISARLDYRPDAEAADRVLRDGERAYISRYALGRDYHKLMRGRLLQLGRRIEAEIGPHGYRVLTDSAPVLEKALARNARLGWIGKNTLLLNRDAGSWFFLGEIYTDLPLAAQDRPAVAEQCGRCSACIRICPTQAITAPYRLDARRCISYLTIEHHGAIPEELRPMMGNRIFGCDDCQLVCPWNRYAQTTVEPDFAPRHGLDSAGLLELFSWDEAEWLQRTEGMALRRVGYPRWLRNLAVAIGNAPRSEAAAAALRSRLEYPDEIVREHVRWALDRQEASGQGLSPPPRSPQSGDATA

SEQ ID NO: 81015 - protein, 365 aa, Solimonas sp.
  REGION 1..365: note = tr|A0A346N844|A0A346N844_9GAMM Epoxyqueuosine reductase OS=Solimonas sp. K1W22B-7 OX=2303331 GN=queG; PE = 3 SV=1
MSFIAPSIGTPPAALAAELPEKIRLWARELGFADAGIAEQALDQDLAHLQRWLDEGRHGGMAFMARDLALRQTPARLRPGTLSVISARLDYRPDAEAADRVLRDGERAYISRYALGRDYHKLMRGRLLQLGRRIEAEIGPHGYRVLTDSAPVLEKALARNARLGWIGKNTLLLNRAAGSWFFLGEIYTDLPLAPESTPPVKEECGRCNACIRICPTQAITAPYRLDARRCISYLTIEHHGAIPLELRPLMGNRIFGCDDCQLVCPWNRYARTTVEPDFAPRHGLDSAALLDLFAWDEEEWLRRTEGMSLRRVGYPRWLRNLAVAIGNAPRSEAAVAALRERLEYPDEVVREHVLWALERQTETAA

SEQ ID NO: 81016 - protein, 327 aa, unidentified
  source 1..327: note = Solirubrum puertoriconensis
  REGION 1..327: note = tr|A0A0W8EDR9|A0A0W8EDR9_9BACT Epoxyqueuosine reductase OS=Solirubrum puertoriconensis OX=1751427; GN = queG PE=3 SV=1
MLASDITRAEHTAFIKRRAAELGFMACGISRAEFLEEEAPRLEQWLAKGMQGQMRWMENHFDKRLDPRLLVDGAKSVISLLLNYYPAAEDQQPDDTLKVSKYAYGRDYHHVIKDKLKTLLQDIQAHIGEVGGRAFVDSAPVLDKAWAKKSGLGWVGKNSNLITPGAGSFYFIAELIVDVELSYDGPIRDYCGSCTRCLDACPTQAITEPYVVDGSKCISYFTIELKEQLPADVQGQLGNWIFGCDICQDVCPWNRFSRATQEEQFKPHPHLKEMRESDWQEITQEVFQTLFRHSAVKRTGYQGLTRNIRFVAGKPSLGTPATEPELS

SEQ ID NO: 81017 - protein, 328 aa, Solitalea canadensis
  REGION 1..328: note = tr|H8KTH4|H8KTH4_SOLCM Epoxyqueuosine reductase; OS = Solitalea canadensis (strain ATCC 29591 / DSM 3403 / NBRC 15130 / NCIMB 12057 / USAM 9D) OX=929556 GN=queG PE=3; SV = 1
MQLSRTIYNCVFLRSVSKMALIEKNTQLIKAEALRLGFLHCGIAQATFLENEAPRLEKWLMNNNNGEMKYMENYFDMRLDPRKLVDGAKSVISLALNYYTDEVPEDFQAPKISKYAYGTDYHFVIKDKLKELLHFIRENIGDVNGRAFVDSAPIMDKAWAQRAGLGWMGKHSNILSKKRGSFFFLAELVIDLELKYDHPVADHCGECTRCIDACPTQAITSSYIVDGSKCISYLTIELKNEIPTAFKSKMDNWMFGCDVCQDVCPWNRFSIVHNEPSFNPHPDLLKLKKTDWQEITNEVFKSLFKKSAVKRTKFEGLNRNIRFLMNES

SEQ ID NO: 81018 - protein, 307 aa, Solitalea koreensis
  REGION 1..307: note = tr|A0A521D9Z4|A0A521D9Z4_9SPHI Epoxyqueuosine reductase OS=Solitalea koreensis OX=543615 GN=queG PE=3; SV = 1
MSTSAKYSKLIKAEAKRLGFMFCGISKAEFLEEEAPRLEQWLNQNRHGEMKYMENHFDKRLDPTKLVEGAKSVISLALNYYTDQKQADSNAPKISQYAYGTDYHFVIKDKLKQLLHFIEEEIGEVNGRAFVDSAPIMDKVWARRSGLGWVGKNTNLINKKHGSFFFLAELVVDLELNYDHPVADHCGTCTRCIDACPTEAITNNYLIDGSKCISYLTIELKNEIPAEFKGKMDNWMFGCDVCQDVCPWNRFSLMNNEELFQPKPDLLQMSKKDWEDITEDVFQKLFKNSPVKRTKFSGLQRNLDFLK

SEQ ID NO: 81019 - protein, 307 aa, unidentified
  source 1..307: note = Solitalea longa
  REGION 1..307: note = tr|A0A2S5A1T5|A0A2S5A1T5_9SPHI Epoxyqueuosine reductase OS=Solitalea longa OX=2079460 GN=queG PE=3 SV=1
MSLKEKYSQLIKQEAKRLGFLQCGIAKASFLENEAPRLENWLNQGKHGEMKYMENYFDMRLDPRKLVDGAKSVISLALNYYTDQVQSDPEAPKLSKYAYGTDYHFVIKDKLKELLQFIQETVGEVNGRAFVDSAPIMDKAWAQQAGLGWIGKHSNILSKKKGSFFFLAELVIDLDLEYDKPVADHCGECTRCIDACPTQAITSAYIVDGSRCISYLTIELKNEIPTEFKNKVDDWMFGCDVCQDVCPWNRFSIVHNEPLFNPHPDLLSIKKEEWVELTEDVFRKVFKNSAVKRTKYSGLQRNIKFLS

SEQ ID NO: 81020 - protein, 308 aa, Soonwooa buanensis
  REGION 1..308: note = tr|A0A1T5F3U3|A0A1T5F3U3_9FLAO Epoxyqueuosine reductase OS=Soonwooa buanensis OX=619805 GN=queG PE=3 SV=1
MNSSEKLTKLIKDKAKNFGFQSCGISKSEFLEEEAPKLEAWLKNNFHGEMKYMENYFDKRLDPRLLVEGSRSVISLSYNYFPKQDLFKDKLQKISKYAYGEDYHEVIKEILREMISELQDEIGEFGFRVFVDSAPVLERAWAKKSGIGWVGKNANIITKQSGSFFFLAEIICDLDLEYDHATTDHCGTCRKCIDACPTDAIVSDKLIDGSKCISYATIELKEEIPDSFKNKMENWMFGCDICQDVCPWNRFSAPTLEEKFHPNEALQNFTKTEWKEMTQEIFSSVFRKSPVKRTKFAGLKRNLDFLSD

SEQ ID NO: 81021 - protein, 308 aa, Sorangium cellulosum
  REGION 1..308: note = tr|A0A150SIE6|A0A150SIE6_SORCE Epoxyqueuosine reductase (Fragment) OS=Sorangium cellulosum OX=56; GN = BE18_05925 PE=4 SV=1
VHATAMSEREVHRPEGEASSERRTHDRLVREQAFALGFDVVGVARADEPLGVEHARYLEFIERGMHGEMRYLAEYAEQRRRLDTDAILEGARSVVCVGRRYARPKDSEGRDPPLAQAVARYARGQDYHNHLKRRLRRLAAFIRTLAPSVLARPLCDVEPVMERVWAARAGIGFVGKNGLLITPGQGSYQLLGEVVTTLPLVPDVPIAERCGSCTRCLDACPTQAFDAPFVLDPRRCVAYLTIEQRGAPAEELRPGMGEHVFGCDVCQEVCPFNRTAPPPIERTAPFHPLSRWEGRDVDDLASLDERGF

SEQ ID NO: 81022 - protein, 417 aa, Sorangium cellulosum
  REGION 1..417: note = tr|S4XZB2|S4XZB2_SORCE 4Fe-4S ferredoxin-type domain-containing protein OS=Sorangium cellulosum So0157-2; OX = 1254432 GN=SCE1572_27105 PE=4 SV=1
MSARGARGERDASAAAGAAVHATAMSEREAHRPEGEASPERRTHDRLVREQAFALGFDVVGVARADEPLGVEHARYLEFIARGMHGEMRYLAEYAEQRRRLDTDAILEGARSVVCVGRRYARPKDSEGRDPPLAQAVARYARGQDYHNHLKRRLRRLASFIRSLAPSVLARPLCDVEPVMERVWAARAGIGFVGKNGLLITPGQGSYQLLGEVVTTLPLVPDVPIAERCGSCTRCLDACPTQAFDAPFVLDPRRCVAYLTIEQRSAPAEELRPGMGEHVFGCDVCQEVCPFNRTAPPPLERTAPFHPLPRWEGRDVDDLASLDERGFEALTVGTPVKRARRGGLARNAAIVAANRLARGLEGEGAERAERALAAALAHDDPEVRAVAAWGMRRAGRGEPASPAAPEPAGSLDEPGAG

SEQ ID NO: 81023 - protein, 365 aa, unidentified
  source 1..365: note = Spartobacteria bacterium
  REGION 1..365: note = tr|A0A3B9LC84|A0A3B9LC84_9BACT Epoxyqueuosine reductase OS=Spartobacteria bacterium OX=2052183 GN=queG; PE = 3 SV=1
MSQIASNIDRVRAAISNTELKERLIAFARELGFDSCRVAECTPPTHVDEFRDWLKDGAAGEMSYMERGEEKRRDPQKVLPGAKSIIVLALNYWQGKFRPSQTAATGRIARYAWGDDYHDVINAKLNKIDNFLREFGGEQKCYVDTGPVLERDHAAQAGIGWHGKSTMLVDERLGTWFFLAEILTTLELAADPPARDRCGTCARCITACPTGAITAPHRLDARRCISYLTIEHKTSIPVELRPLIGDRIYGCDDCLDACPWNRFASVSRESAFAARRSTMNMRLRDYLNLSGAEFRLLFRHSPIKRIKRRGFLRNVCVALGNVGDANDLPALAKAALDSEPLIAEHAAWAIEQIRARSTSREVVVN

SEQ ID NO: 81024 - protein, 387 aa, Sphaerobacter thermophilus
  REGION 1..387: note = tr|D1C7R6|D1C7R6_SPHTD Uncharacterized protein; OS = Sphaerobacter thermophilus (strain DSM 20745 / S 6022); OX = 479434 GN=Sthe_0461 PE=4 SV=1
MSAITHARLRRLAAECRLALLGVTTAEPFDGLAELLVERIRTGHMDGLDWFTEERARFSADPRNLHPTARSIVSVGLPYWQPDVAPPDDGVPRGRISRYAWGRDYHKTLKTRMRDLHARLEEELGRPIEARALVDTARIVDRAAAARSGLGWYGKNTMILVPGHGSWVMLGELVLDIEVEPLPALRPKCGRCTRCLDACPTGALVDAYRLHTPRCISYLTIELRGPIPRDLRPLMGSWVFGCDICQEVCPYTGAAAPSDDPAVQPERIEHAFPSLHWLLTMSEEEFRTVYRGRAVLRAKRGGLARNAAVALGNIGSDADLGLLEEVAATHDIPLVRGHAAWAMARIDAAATAPILRRLHDREPDPAVRAEIAATLNAPPPARCRDAA

SEQ ID NO: 81025 - protein, 323 aa, unidentified
  source 1..323: note = Sphaerospermopsis kisseleviana
  REGION 1..323: note = tr|A0A1Z4UWJ3|A0A1Z4UWJ3_9CYAN Epoxyqueuosine reductase OS=Sphaerospermopsis kisseleviana NIES-73; OX = 1973480 GN=queG PE=3 SV=1
MKKCSLTSSLIKEKAQEIGFHKVGIAAVEGVDATEIQRLQAWMAMGYHADMEWMGNPKRQDISLVMPEVRSLICVALNYYTPHQHPEGEEYAKISRYGWGRDYHKVLHKKLKQLATWLESQGEGIKARYYADTGPVQDKVWAQKAGIGWIAKNGNVITREYGSWVFLGEILTNIELESDRTATQHCGNCTRCIQACPTAAITQPFVVDANKCIAYHTIENRAETLPENIKTNLHGWVAGCDICQDVCPWNQRFAQITDVTDFQPYPENLAPKLVELAQITDKEWDRRFTASALRRIKPKMLRRNARANLDSSKLKNDSKSNHL

SEQ ID NO: 81026 - protein, 323 aa, unidentified
  source 1..323: note = Sphaerospermopsis reniformis
  REGION 1..323: note = tr|A0A480A316|A0A480A316_9CYAN Epoxyqueuosine reductase OS=Sphaerospermopsis reniformis OX=531300; GN = queG PE=3 SV=1
MKKCSLTSSVIKEKAQEIGFHKVGFAAVEGVDATEIQKLQSWIAMGYHADMEWMGNPKRQDISLVMPEVRSLICVALNYYTPHQHPEGEEYAKISRYDWGRDYHKVLHKKLKQLATWLESQGEGIKARYYADTGPVQDKVWAQKAGIGWIAKNGNLITREYGSWVFLGEILTNIELESDRSATQHCGNCTRCIQACPTAAITQPFLVDANRCIAYHTIENRAETLPENIKTNLHGWVAGCDICQDVCPWNQRFAQITDVTDFQPYPENLAPKLVELAQITDEEWDRRFTASALRRIKPKMLRRNARANLDSSKLKNDSKSNHL

SEQ ID NO: 81027 - protein, 371 aa, Sphaerotilus hippei
  REGION 1..371: note = tr|A0A318H0K4|A0A318H0K4_9BURK Epoxyqueuosine reductase OS=Sphaerotilus hippei OX=744406 GN=queG PE=3; SV = 1
MNSQRVEEPDGAALVERLRTWALELGFSQIGVSDVNLQGAEKGLLQWLDAGFHGEMDYMARHGLRRARPAELVPGTVRVVSARMDYLPAATPLGWREHEQARQHQPDQAIVSMYARGRDYHKVLRQRLQQLAERLQAEVGPTGHRVFCDSAPVLEVELARRAALGWRGKHTLLLDRSAGSMFFLGEIYIDLALPLTGAAGAGHCGRCSACLSACPTGAIVAPYRLDARRCISYLTIEHDGPIPEPLRAAFGNRIYGCDDCQLACPWNKYAQRSALPDFDVRAPLGDATLLALWAWDEAQFLHRTEGSAIRRIGHRRWQRNLAVALGNAWREAGDPAVRAALLERRASLGEAPADPVLAEHIDWALAQRPAA

SEQ ID NO: 81028 - protein, 349 aa, Sphaerotilus natans
  REGION 1..349: note = tr|A0A059KK56|A0A059KK56_9BURK Epoxyqueuosine reductase OS=Sphaerotilus natans subsp. natans DSM 6575; OX = 1286631 GN=queG PE=3 SV=1
MRQLREWAHALGFSQIGVADVHLATAEPGLLAWLEAGFHGSMQYMAAHGLRRARPAELVPGTVRVISVAMPYLPPDTGTDWRTIEHARAQQPGEAVISVYARGRDYHKVVRARLQRLADRLAAEIGPFGHRVFCDSAPVLEVELAGRAGLGWRGKHTLLLDRSAGSMFFLGELFVDLPLPVDAPAEPRCGRCSACIDACPTAAIVAPYRLDARRCISYLTIEHDGPIPVELRAAMGNRIYGCDDCQLVCPWNKYARTSTLADFDVRPGMGGATLLQLWAWDEASFLRRTEGSPIRRIGHARWRRNLAVALGNAWRETGEPALAEALRAARDGADALLAEHIDWALAQRA

SEQ ID NO: 81029 - protein, 367 aa, Sphaerotilus natans
  REGION 1..367: note = tr|A0A5C1PW42|A0A5C1PW42_9BURK Epoxyqueuosine reductase OS=Sphaerotilus natans subsp. sulfidivorans; OX = 639200 GN=queG PE=3 SV=1
MTDDDRDDGQPALDGPRLVRQLREWAHALGFSQIGVADVHLATAEPGLLAWLEAGFHGSMQYMAAHGLRRARPAELVPGTVRVISVAMPYLPQGTAPGWRDDERARAQQPGEAVISVYARGRDYHKVVRARLQRLADRLAAEIGPFGHRVFCDSAPVLEVELAGRAGLGWRGKHTLLLDRSAGSMFFLGELFVDLALPVDAPAEPHCGRCSACIDACPTAAIVAPYRLDARRCISYLTIEHDGPIPVELRAAMGNRIYGCDDCQLVCPWNKYARISTLADFEVRPGMGGATLLQLWAWDEASFLRRTEGSPIRRIGHARWRRNLAVAMGNAWRETGDEALAEALRAARDGAGELLAEHIDWALAQRV

SEQ ID NO: 81030 - protein, 210 aa, unidentified
  source 1..210: note = Sphingobacteriaceae bacterium
  REGION 1..210: note = tr|A0A3D3PGQ1|A0A3D3PGQ1_9SPHI tRNA epoxyqueuosine(34) reductase QueG (Fragment); OS = Sphingobacteriaceae bacterium OX=2021370 GN=queG PE=4; SV = 1
MLQNYSAYSHLIKEEALKLGFLFCGISKAEFLEEEASNLEAWLKNGFHGEMSYMENYFDKRLDPRKLVEDTKSVISLGLNYYTDQQQKDLSSPKISKYAYGDDYHTVIKSKLRQLIEIIREKIGDVSGRAFVDSAPVLDKAWAKKAGLGWVGKNANIINKERGSFFFLAELIIDLELEYDIAPAADHCGSCTRCIDACPTDAIVAPYIVD

SEQ ID NO: 81031 - protein, 311 aa, unidentified
  source 1..311: note = Sphingobacteriaceae bacterium
  REGION 1..311: note = tr|A0A1X9ZCB5|A0A1X9ZCB5_9SPHI Epoxyqueuosine reductase OS=Sphingobacteriaceae bacterium GW460-11-11-14-LB5 OX=1986952 GN=queG PE=3 SV=1
MYNNYAKYSQLIKDEALRLGFMACGISKAEFLEEEAPRLENWLNQNRHGEMKYMENYFDKRLDPRLLVDGAKSVISLSLNYYTEEKQSDPNAPKISKYAYGQDYHTVIKDKLKELTHFIEENIGEVSGRAFVDSAPVLDRAWAKKSGIGWIGKNSNLISKTDGSFFFLAELIVDLELDYDHPYQADYCGSCTRCLDACPTDAIIAPQVVDGTKCISYLTIELKNEIPNEFKDKMSNWMFGCDICQDVCPWNRFSKAHHEEAFKPAEGLLDLNAKDLTEITDDVFKRVFKGSAVKRTKFTGLKRNINFLKPE

SEQ ID NO: 81032 - protein, 191 aa, unidentified
  source 1..191: note = Sphingobacteriales bacterium
  REGION 1..191: note = tr|A0A4Q3CDR4|A0A4Q3CDR4_9SPHI tRNA epoxyqueuosine(34) reductase QueG (Fragment); OS = Sphingobacteriales bacterium OX=2044944 GN=queG PE=4; SV = 1
EHIGEVGGRAFVDSAPVMDKAWAAKSGLGWMGKNSNLLSKQVGSFFFIAELIVDIELEYDHAVTDHCGSCTACLDACPTQAIIQPYVVDGSKCISYFTIELKEKIPEEMKGSFADWAFGCDVCQDVCPWNRFSKPHREPLFNPNPDLLSFTKKDWEEITEDTFRAVFKNSAVKRTKFEGLKRNIDFLKPRS

SEQ ID NO: 81033 - protein, 319 aa, unidentified
  source 1..319: note = Sphingobacteriales bacterium
  REGION 1..319: note = tr|A0A2P7TFX2|A0A2P7TFX2_9SPHI Epoxyqueuosine reductase OS=Sphingobacteriales bacterium UPWRP_1; OX = 2116516 GN=queG PE=3 SV=1
MTLLSTHLHTLQIKEEARRLGFQFAGISKSGFLEEEAPRLEEWLRRGYQGKMAYMEQHFDKRLDTTKLVPGSKSVITLLYNYYPLTATQNPDAPKISKYAWGEDYHIVLKDKLKELMYFIETHIGKVEGRGFVDSAPVMERAWAAKSGAGWIGKNSLLLHKKAGSYFFLAELIIDLALEYDSPVQDYCGTCTRCIDACPTQAITGNQLVDGSKCISYFTIELKDELPADMGGKFDNWMFGCDICQDVCPWNRFAQPHAEPRFAPAPLLLSMDKKDWEQLSQDTFNKLFKKSAVKRAKYAGLKRNIAFLSKENEKKTQKS

SEQ ID NO: 81034 - protein, 311 aa, unidentified
  source 1..311: note = Sphingobacteriia bacterium
  REGION 1..311: note = tr|A0A258YP97|A0A258YP97_9BACT Epoxyqueuosine reductase OS=Sphingobacteriia bacterium 24-36-13; OX = 1970572 GN=queG PE=3 SV=1
MLPIQQYTQQVKSIAKKLGFEYCGIAQAVKLDEDARRLEKWLHQGMHGKMQYMENHFDLRVDPSKLVPGAKSVITLLKNYYPSAKQKPNTPLISKYAWGKDYHEVIRSQLKLFLAELSTHIGEINGRGFVDSAPVLERSWAVQSGLGWVGKNGNLIHKQSGSFFFIATLIVDIALEADAPFAKDYCGSCTKCIEACPTEAILPDKKINGSKCISYYTIELKDALLPNELKDQFNNWMFGCDICQDICPWNRFSKPHQEPSFEPISAVLNLTTSQWEELTEESFKTIFKESPLKRSKFSGIKRNLRFIQSSD

SEQ ID NO: 81035 - protein, 311 aa, unidentified
  source 1..311: note = Sphingobacteriia bacterium
  REGION 1..311: note = tr|A0A1G3J7S3|A0A1G3J7S3_9BACT Epoxyqueuosine reductase OS=Sphingobacteriia bacterium RIFOXYD2_FULL_35_12 OX=1802167 GN=queG PE=3 SV=1
MLPIQQYTQQVKSIAKKLGFEYCGIAQAVKLDEDARRLEKWLHQGMHGKMQYMENHFDLRVDPSKLVPGAKSVITLLKNYYPSAKQKPNTPLIAKYAWGKDYHEVIRSQLKLFLAELSTHIGEINGRGFVDSAPVLERSWAVQSGLGWVGKNGNLIHKQSGSFFFIATLIVDIVLEADSPYAKDYCGSCTKCIEACPTEAILPDKKINGSKCISYYTIELKDALLPNELKEQFNNWMFGCDICQDICPWNRFSKPHQEPSFEPISAVLNLTTSQWEELTEESFKTIFKESPLKRSKFSGIKRNLRFIQSLD

SEQ ID NO: 81036 - protein, 311 aa, Sphingobacterium sp.
  REGION 1..311: note = tr|F4C483|F4C483_SPHS2 Epoxyqueuosine reductase; OS = Sphingobacterium sp. (strain 21) OX=743722 GN=queG PE=3; SV = 1
MLIAAEKYSKLIKDEAKRLGFAFCGIAKADFLEEEAPRLEKWLKEEMHGEMYYMENHFDKRLDPRLLVEGAKSIISLGFNYFTSDIQIDKDSPKISRYAYGVDYHTVIKDKLKSLLHFMQDEIGEVGGRAFVDSAPVLDRAWAKRSGLGWIGKNSNLINRKKGSFFFLCELIVDIELDYDLAPTKDYCGTCTRCIDACPTEAIVAPQIVDGSKCISYLTIELKNEIPDQFVGKMDNWMFGCDVCQDVCPWNRFAEPHTEESFKPHPDLLEMTKKDWEEITEETFQRVFKKSAVKRAKFSGLTRNIKFLDNR

SEQ ID NO: 81037 - protein, 341 aa, unidentified
  source 1..341: note = Sphingobium algicola
  REGION 1..341: note = tr|A0A5J5H442|A0A5J5H442_9SPHN tRNA epoxyqueuosine(34) reductase QueG OS=Sphingobium algicola; OX = 2048546 GN=queG PE=4 SV=1
MEQRLKAEAARLGFAACRIAPADVAPKTGERLRQWLDAGHHGDMLWMEDRAEQRGSPKGLWPDVRSVIMLGMSYAPGRDPLGLADVPDRARFSVYAQGKDYHDVVKKALKALARWLVEQQPSALKVFVDTAPVMEKPLAQGAGLGWQGKHSNLVSRDHGSWLFLGAIYTEMALEPDSGERDHCGSCSACINACPTDAFPSPYVVDARRCISYLTIEHKGPIPEDLRAGIGNRVYGCDDCLSVCPWNKFADHAAANKAFIGRAELAAPAIGDLLDLDDATFREIFSGSPIKRIGRNRMVRNAAIAAGNSGDTRLLARLEALVADEDPVVAEAATWAIGKLTG

SEQ ID NO: 81038 - protein, 348 aa, unidentified
  source 1..348: note = Sphingobium algorifonticola
  REGION 1..348: note = tr|A0A437JCK4|A0A437JCK4_9SPHN Epoxyqueuosine reductase OS=Sphingobium algorifonticola OX=2008318; GN = queG PE=3 SV=1
MTKQSLPLEEQLKAAAAATGFADCAIAAADAAPRSAARLRDWIAQGCHGDMLWMEERAEQRGSPKGLWPEVRSVIMLGMSYTPGRDPLALEHVGDRGRISVYAQGQDYHDVVKKALKALARWLVDRAPCDVKVFVDTAPVMEKPLAEAAGLGWQGKHSNLVSRRHGSWLFLGAIYTTLDLTPDVPGSDSCGSCIACQAACPTDAFPAPYRLDARRCLSYLTIEHKGPIPEAFRKPMGNRIYGCDDCLAVCPWNKFADVAATHRAFLGRAELAAPALRDILALDDAAFREIFSGSPIKRIGRNRMVRNAAIAAGNSGEPLLIAVLEPLTRDADGVVAEAAGWAIAQLRA

SEQ ID NO: 81039 - protein, 341 aa, Sphingobium amiense
  REGION 1..341: note = tr|A0A494W7K1|A0A494W7K1_9SPHN Epoxyqueuosine reductase OS=Sphingobium amiense OX=135719 GN=queG PE=3; SV = 1
MEQRLKSEAARLGFAACRIAPADAAPGAGERLRDWLDAGHHGDMLWMEERAEQRGSPRGLWPDVRSVIMLGMSYAPGRDPLALADVPERARVSVYAQGRDYHDVVKKALKALARWLVDQQSTALKVFVDTAPVMEKPLAQGAGLGWQGKHSNLVSRAHGSWLFLGAIYTEIALEPDAPESDHCGSCTACQSACPTDAFPAPYVVDARRCISYLTIEHKGPIPHDMRPGIGNRVYGCDDCLAVCPWNKFADMGAANRAFLGRAELAAPALADLLDLDDAAFREIFSGSPIKRIGRDRMVRNAAIAAGNSGDPALIPRLAPLVADPDPAVAEAARWAVERLTP

SEQ ID NO: 81040 - protein, 348 aa, unidentified
  source 1..348: note = Sphingobium baderi
  REGION 1..348: note = tr|A0A0S3EVD1|A0A0S3EVD1_9SPHN Epoxyqueuosine reductase OS=Sphingobium baderi OX=1332080 GN=queG PE=3; SV = 1
MPTQIETLEQRLKRQAAQLGFAACAIASADAAPMAGRRLRDWLNAGHHGDMLWMEERAEQRGSPRGLWPDVRSVIMLGMSYAPGRDPLALAKAGDRARISVYAQGKDYHDTVKKGLKALARWLVEQQGSALKVFVDTAPVMEKPLAMAAGLGWQGKHSNLVSRTHGSWLFLGAIYSEIALTPDEGEHDHCGSCTACQTACPTDAFPSPYVVDARRCISYLTIEHKGPIPEALRPGIGNRVYGCDDCLAVCPWNKFADAAAANRAFLGRAELAAPAIEDLLALDDAAFREIFSGSPIKRIGRGRMVRNAAVAAGNSGEPRLIAKLRPLTSDGDPVVAEAATWAIARLSA

SEQ ID NO: 81041 - protein, 350 aa, unidentified
  source 1..350: note = Sphingobium baderi
  REGION 1..350: note = tr|T0G994|T0G994_9SPHN Epoxyqueuosine reductase; OS = Sphingobium baderi LL03 OX=1114964 GN=queG PE=3 SV=1
MPTQIETLEQRLKAEAARLGFAACAIASADAAPMAGRRLRDWLDAGHHGGMLWMEERAAQRGSPRGLWPEVRSVVMLGMSYAPGRDPLALADAGDRARISVYAQGKDYHDIVKKGLKALARWLVAQQDGALKVFVDTAPVMEKPLAMAAGLGWQGKHSNLVSRTHGSWLFLGAIYSEIALATDQGEQDHCGSCNACQTACPTDAFPSPYVVDARRCISYLTIEHKGPIPEELRRGIGNRVYGCDDCLAVCPWNKFADAGAANRAFMGRAELAAPAIGDLLALDDAAFREIFSGSPIKRIGRGRMVRNAAIAAGNSGDRRLIAKLQALTGDPDPVVAEAADWAIGRLSIQS

SEQ ID NO: 81042 - protein, 349 aa, unidentified
  source 1..349: note = Sphingobium barthaii
  REGION 1..349: note = tr|A0A4R6FLH1|A0A4R6FLH1_9SPHN Epoxyqueuosine reductase OS=Sphingobium barthaii OX=1054037 GN=queG PE=3; SV = 1
MPTQNETLEQRLKAEALRLGFAACAIAPADAAPRSAERLRQWLDAGHHGDMLWMAERAGQRGSPQALWPDVRSVIMLGMSYAPGRDPLALADAHDRGRISVYAQGRDYHDVVKKGLKALARWLVEQQPGALKVFVDTAPVMEKPLAEAAGLGWQGKHSNLVSRTHGSWLFLGAIYSEIALAPDMPEKDHCGSCTACQASCPTDAFPAPYVVDARRCISYLTIEHKGPIPEALRAGIGNRVYGCDDCLAVCPWNKFAEVAAANRAFVGRAELAAPELGDLLALDDAGFREIFAGSPIKRIGRNRMVRNAAIAAGNSGDRGLIGRLRPLTEDEDAVVAEAARWAIERLERG

SEQ ID NO: 81043 - protein, 340 aa, Sphingobium chinhatense
  REGION 1..340: note = tr|W1KWI0|W1KWI0_9SPHN Epoxyqueuosine reductase; OS = Sphingobium chinhatense IP26 OX=1346790 GN=queG PE=3; SV = 1
MEQRLKAEARRLGFAACAIAPADAAPRSAERLRQWLDAGHHGEMLWMEERAGQRGSPQGLWPDVRSVVMLGMSYAPGRDPLALADARDRGRISVYAQGRDYHDVVKKGLKALARWLVEQHPGALKVFVDTAPVMEKPLAQAAGLGWQGKHSNLVSRTHGSWLFLGAIYSEIALVPDAPEDDHCGSCTACQTACPTDAFPAPYVVDARRCISYLTIEHKGPIPEELRAGIGNRVYGCDDCLAVCPWNKFADAAAANRAFVGRAELAAPELGDLLALDDAGFREIFAGSPIKRIGRNRMVRNAAIAAGNSGDRRLVGRLQALAAADDPVVAEAARWALERLG

SEQ ID NO: 81044 - protein, 347 aa, Sphingobium chlorophenolicum
  REGION 1..347: note = tr|A0A081RCR0|A0A081RCR0_SPHCR Epoxyqueuosine reductase OS=Sphingobium chlorophenolicum OX=46429 GN=queG; PE = 3 SV=1
MPTQNETLEQRLKAEALRLGFAACAIAPADAAPRSAERLRQWLDAGHHGDMLWMEERAGQRGSPQGLWPDVRSVIMLGMSYAPGRDPLALAEVDDRGRISVYAQGRDYHDVVKKGLKALARWLVDQQPGALKVFVDTAPVMEKPLAQAAGLGWQGKHSNLVSRVHGSWLFLGAIYSEIALAPDAPEEDHCGSCTACQTACPTDAFPAPYVVDARRCISYLTIEHKGPIPEALRAGIGNRIYGCDDCLAVCPWNKFADAAAANRAFVARAELAAPELGDLLALDDAGFREIFSGSPIKRIGRNRMVRNAAIAAGNSGDRRLVRRLQALVTDDDPVVAEAACWALEQLV

SEQ ID NO: 81045 - protein, 347 aa, Sphingobium chlorophenolicum
  REGION 1..347: note = tr|F6EXR7|F6EXR7_SPHCR Epoxyqueuosine reductase; OS = Sphingobium chlorophenolicum L-1 OX=690566 GN=queG PE=3; SV = 1
MPTQNETLEQRLKAEALRLGFAACAIAPADAAPRSAERLRQWLDAGHHGDMLWMEERAGQRGSPQGLWPDVRSVIMLGMSYAPGRDPLALAEVGDRGRISVYAQGRDYHDVVKKGLKALARWLVDQQPGALKVFVDTAPVMEKPLAQAAGLGWQGKHSNLVSRVHGSWLFLGAIYSEIALAPDAPEDDHCGSCTACQTACPTDAFPAPYVVDARRCISYLTIEHKGPIPEALRAGIGNRIYGCDDCLAVCPWNKFADAAAANRAFVGRAELAAPGLGDLLALDDAGFREIFSGSPIKRIGRNRMVRNAAIAAGNSGDRRLVGRLQALVTDDDPVVAEAACWALERLV

SEQ ID NO: 81046 - protein, 347 aa, Sphingobium chungbukense
  REGION 1..347: note = tr|A0A0M3AYZ2|A0A0M3AYZ2_9SPHN Epoxyqueuosine reductase OS=Sphingobium chungbukense OX=56193 GN=queG; PE = 3 SV=1
MPTQNETLEERLKAEARRLGFAACAIAPADAAPLAGERLKAWLDAGHHGDMLWMEERAGQRGSPQGLWPDVRSVIMLGMSYAPGRDPLALAEVGDRGRISVYAQGRDYHDVVKKGLKTLARWLVDQHPGALKVFVDTAPVMEKPLAQAAGLGWQGKHSNLVSRAHGSWLFLGAIYSEIALAPDAAEEDHCGSCSACQTACPTDAFPAPYVVDARRCISYLTIEHKGPIPEELRAGIGNRIYGCDDCLAVCPWNKFADAAAANRAFVGRAELAAPALDDLLALDDAGFREIFSGSPIKRIGRNRMVRNAAIAAGNSGDRRLIERLRPLVADNDPVVAEAAEWALARLV

SEQ ID NO: 81047 - protein, 348 aa, Sphingobium cloacae
  REGION 1..348: note = tr|A0A1E1F3Q3|A0A1E1F3Q3_9SPHN Epoxyqueuosine reductase OS=Sphingobium cloacae OX=120107 GN=queG PE=3; SV = 1
MPVQIETLEQRLKAEAARLGFAACAIARADAAPQAGQRLRAWLGAGHHGEMLWMEERAEQRGSPQGLWPDVRSVIMLGMSYAPGRDPLALADAGDRARISVYAQGKDYHDTVKKGLKALARWLVAQQDGALKVFVDTAPVMEKPLAMAAGLGWQGKHSNLVSRTHGSWLFLGAIYSEIALTPDEGEVDHCGSCTACQSACPTDAFPAPYVVDARRCISYLTIEHKGPIPEEFRAAIGNRVYGCDDCLAVCPWNKFADRAAANRAFVGRAELAAPAIEDLLALDDAAFREIFSGSPIKRIGRDRMVRNAAIAAGNSGDPRLMEKLRPLAVDPDPVVAEAARWAMGRLSI

SEQ ID NO: 81048 - protein, 354 aa, unidentified
  source 1..354: note = Sphingobium cupriresistens
  REGION 1..354: note = tr|A0A4Q4JVV7|A0A4Q4JVV7_9SPHN Epoxyqueuosine reductase OS=Sphingobium cupriresistens OX=1132417 GN=queG; PE = 3 SV=1
MSVETETLEQRLKEEAARLGFAACRVAPADAAPLAGARLRQWLDAGHHGDMLWMEERAQQRGSPKGLWPQVRSVIMLGMSYAPGRDPLALADVPDRARFSVYAQGKDYHDVVKKALKALARWLVEQQPSSLKVFVDTAPVMEKPLAQGAGLGWQGKHSNLVSRDHGSWLFLGAIYTELALAPDDSETDHCGRCTACLNACPTDAFPSPYMVDARRCISYLTIEHKGPIPDDLRAGIGNRVYGCDDCLAVCPWNKFADAAAANRAFVGRAELAAPEIADLLALDDASFREIFSGSPIKRIGRNRLVRNAAIAAGNSGDARLLAPLEALVRDDDPVVAEAATWAIGRLSGGDESVG

SEQ ID NO: 81049 - protein, 354 aa, unidentified
  source 1..354: note = Sphingobium czechense
  REGION 1..354: note = tr|A0A0J7XSI0|A0A0J7XSI0_9SPHN Epoxyqueuosine reductase OS=Sphingobium czechense LL01 OX=1420583 GN=queG; PE = 3 SV=1
MSVETETLEQRLKEEAARLGFAACRVAPADAAPLAGARLRQWLDAGHHGDMLWMEERAQQRGSPKGLWPQVRSVIMLGMSYAPGRDPLALADVPDRARFSVYAQGKDYHDVVKKALKALARWLVEQQPSSLKVFVDTAPVMEKPLAQGAGLGWQGKHSNLVSRDHGSWLFLGAIYTELALTPDDGETDHCGRCTACLNACPTDAFPSPYMVDARRCISYLTIEHKGPIPDDLRAGIGNRVYGCDDCLAVCPWNKFADAAAANRAFVGRAELAAPEIADLLALDDASFREIFSGSPIKRIGRNRLVRNAAIAAGNSGDARLLAPLEALVRDDDPVVAEAATWAIGRLSGGDESVG

SEQ ID NO: 81050 - protein, 348 aa, Sphingobium faniae
  REGION 1..348: note = tr|A0A1G4S3D9|A0A1G4S3D9_9SPHN Epoxyqueuosine reductase OS=Sphingobium faniae OX=570446 GN=queG PE=3 SV=1
MPVQIETLEQRLKAQAAQLGFAACAIARADAAPKAGRRLREWLGAGHHGDMLWMEERAEQRGSPQGLWPEVRSVVMLGMSYAPARDPLALAEVGDRARISVYAQGKDYHDIVKKGLKALARWLVEQQDSALKVFVDTAPVMEKPLAMAAGLGWQGKHSNLVSRAHGSWLFLGAIYSEIALTPDAGEQDHCGSCTACQSACPTDAFPSPYVVDARRCISYLTIEHKGPIPEEFRAAIGNRVYGCDDCLAVCPWNKFADRAAAHRAFVGRAELAAPAIEDLLALDDAAFREIFSGSPIKRIGRDRMVRNAAIAAGNSGEPRLLEKLRPLAGDPDPVVAEAAIWAMKRLSV

SEQ ID NO: 81051 - protein, 340 aa, Sphingobium francense
  REGION 1..340: note = tr|A0A4Q4J3Y7|A0A4Q4J3Y7_9SPHN Epoxyqueuosine reductase OS=Sphingobium francense OX=332057 GN=queG PE=3; SV = 1
MEQRLKAEAWRLGFAACAIAPADAAPRSAERLRQWLDAGHHGEMLWMEERAGQRGSPQGLWPDVRSVVMLGMSYAPGRDPLALADARDRGRISVYAQGRDYHDVVKKGLKALARWLVEQHPGALKVFVDTAPVMEKPLAQAAGLGWQGKHSNLVSRTHGSWLFLGAIYSEIALVPDAPEDDHCGSCTACQTACPTDAFPAPYMVDARRCISYLTIEHKGPIPEELRAGIGNRVYGCDDCLAVCPWNKFADAAAANRAFVGRAELAAPELGDLLALDDAGFREIFAGSPIKRIGRNRMVRNAAIAAGNSGDRRLVGRLQALAADDDPVVAEAARWALERLG

SEQ ID NO: 81052 - protein, 340 aa, Sphingobium fuliginis
  REGION 1..340: note = tr|A0A292ZKU6|A0A292ZKU6_SPHSA Epoxyqueuosine reductase OS=Sphingobium fuliginis (strain ATCC 27551); OX = 336203 GN=queG PE=3 SV=1
MEQRLKAEALRLGFAACAIAPANAAPRSAERLRQWLDAGHHGEMLWMEERAGQRGSPQGLWPDVRSVVMLGMSYAPGRDPLALADVPDRGRISVYAQGRDYHDVVKKGLKSLARWLVEQHPGALKVFVDTAPVMEKPLAEAAGLGWQGKHSNLVSRAHGSWLFLGAIYSEIALAPDAPEKDHCGSCIACQAACPTDAFPAPYMVDARRCISYLTIEHKGPIPEEFRAGIGNRIYGCDDCLAVCPWNKFADAAAANRAFIGRAELAAPELGDLLALDDAGFREIFSGSPIKRIGRNRMVRNAAIAAGNSGDRRLADRLRALVADDDPVVAEAARWALERLD

SEQ ID NO: 81053 - protein, 340 aa, Sphingobium fuliginis
  REGION 1..340: note = tr|A0A5B8CH85|A0A5B8CH85_SPHSA Epoxyqueuosine reductase OS=Sphingobium fuliginis ATCC 27551 OX=1208342; GN = queG PE=3 SV=1
MEQRLKAEALRLGFAACAIAPANAAPRSAERLRQWLDAGHHGEMLWMEERAGQRGSPQGLWPDVRSVVMLGMSYAPGRDPLALADVPDRGRISVYAQGRDYHDVVKKGLKALARWLVEQHPGALKVFVDTAPVMEKPLAEAAGLGWQGKHSNLVSRAHGSWLFLGAIYSEIALAPDAPEKDHCGSCTACQAACPTDAFPAPYMVDARRCISYLTIEHKGPIPEEFRAGIGNRIYGCDDCLAVCPWNKFADAAAANRAFVGRAELAAPELGDLLALDDAGFREIFSGSPIKRIGRNRMVRNAAIAAGNSGDRRLADRLRALVADDDPVVAEAARWALERLA

SEQ ID NO: 81054 - protein, 352 aa, Sphingobium herbicidovorans
  REGION 1..352: note = tr|A0A086P4Z0|A0A086P4Z0_SPHHM Epoxyqueuosine reductase OS=Sphingobium herbicidovorans (strain ATCC 700291 / DSM 11019 / NBRC 16415 / MH) OX=1219045 GN=queG; PE = 3 SV= 1
MPTQTETLEQRLKAQAQRLGFAACAIARADAAPEAGQRLRQWLDAGRHGDMLWMEDRAEQRASPRGLWPDVRSVIMLGMSYAPGRDPLKLADVSDRGRISVYAQGRDYHDVVKKGLKILARWLVEQQESALKVFVDTAPVMEKPLAAAAGLGWQGKHSNLVSRDHGSWLFLGAIYSEIALEPDAPAVDHCGSCNACQTACPTDAFPAPYVVDARRCISYLTIEHKGPIPEEFRVGIGNRIYGCDDCLAVCPWNKFADAAAANKAFIGRAELAAPELDDLLALDDAGFREIFSGSPIKRIGRDRMVRNAAIAAGNSGEPRLIARLQPLLADGDTVVAEAAAWAIGKLSAKEAI

SEQ ID NO: 81055 - protein, 344 aa, unidentified
  source 1..344: note = Sphingobium hydrophobicum
  REGION 1..344: note = tr|A0A249MQP8|A0A249MQP8_9SPHN Epoxyqueuosine reductase OS=Sphingobium hydrophobicum OX=1673076 GN=queG; PE = 3 SV=1
MESLETRLKVQAASLGFAACAIAPADVAPQAGKRLGEWLDAGHHGDMLWMEERAGQRGSPRGLWPDVRSVVMLGMSYAPGRDPLALADVPDRARLSVYAQGKDYHDVVKKGLKSLARWLVDQQPGALKVFVDTAPVMEKPLAQGAGLGWQGKHSNLVSRQHGSWLFLGAIYTEIALEPDAPEVDHCGSCTACQTACPTDAFPSPYVVDARRCISYLTIEHKGPIPHELREGIGNRIYGCDDCLAVCPWNKFADQAAANKAFVGRAELAAPALADLLALDDAAFREIFSGSPIKRIGRNRMVRNAAIAAGNSGDARLLGRLQVLAGDDDPVVAEAATWAIGRLSV

SEQ ID NO: 81056 - protein, 340 aa, Sphingobium indicum; identical to SEQ ID NO: 81051
  REGION 1..340: note = tr|A0A1L5BRX3|A0A1L5BRX3_SPHIB Epoxyqueuosine reductase OS=Sphingobium indicum (strain DSM 16412 / CCM 7286 / MTCC 6364 / B90A) OX=861109 GN=queG PE=3 SV=1

SEQ ID NO: 81057 - protein, 340 aa, Sphingobium japonicum
  REGION 1..340: note = tr|D4YXR1|D4YXR1_SPHJU Epoxyqueuosine reductase; OS = Sphingobium japonicum (strain DSM 16413 / CCM 7287 / MTCC 6362 / UT26 / NBRC 101211 / UT26S) OX=452662 GN=queG; PE = 3 SV=1
MEQRLKAEARRLGFAACAIAPANAAPRSAERLRQWLDAGHHGEMLWMEERAGQRGSPQGLWPDVRSVVMLGMSYAPGRDPLALADARDRGRISVYAQGRDYHDVVKKGLKALARWLVEQHPGALKVFVDTAPVMEKPLAQAAGLGWQGKHSNLVSRTHGSWLFLGAIYSEIALVPDAPEDDHCGSCTACQTACPTDAFPAPYVVDARRCISYLTIEHKGPIPEELRAGIGNRVYGCDDCLAVCPWNKFADAAAANRAFVGRAELAAPELGDLLALDDAGFREIFAGSPIKRIGRNRMVRNAAIAAGNSGDRRLVGRLQALAAADDPVVAEAARWALERLG

SEQ ID NO: 81058 - protein, 341 aa, Sphingobium japonicum
  REGION 1..341: note = tr|N1MJ95|N1MJ95_9SPHN Epoxyqueuosine reductase; OS = Sphingobium japonicum BiD32 OX=1301087 GN=queG PE=3 SV=1
METRLKAQAAALGFAVCAIAPADVAPQAGQRLGEWLDAGHHGDMLWMAERAGQRGSPRDLWPDVRSVVMLGMSYAPGRDPLALADVGDRARISVYAQGKDYHDVVKKGLKALARWLVEQQPGALKVFVDTAPVMEKPLAQGAGLGWQGKHSNLVSRQHGSWLFLGAIYTEIALQPDAPEIDHCGSCTACQTACPTDAFPSPYVVDARRCISYLTIEHKGPIPHELREGIGNRIYGCDDCLAVCPWNKFAESAAANKAFVGRAELAAPAIADLLALDDAAFREIFSGSPIKRIGRNRMVRNAAIAAGNSGDARLLGRLQALAGDDDPVVAEAAIWAIGRLSV

SEQ ID NO: 81059 - protein, 346 aa, Sphingobium lactosutens
  REGION 1..346: note = tr|T0HNJ4|T0HNJ4_9SPHN Epoxyqueuosine reductase; OS = Sphingobium lactosutens DS20 OX=1331060 GN=queG PE=3; SV = 1
MEQRLKAQAQQLGFAACRIADADAAPQSAARLRAWLDAGHHGDMLWMEERAEQRGSPRGLWPAVRSVIMLGMSYAPARDPLALADAPDRARFSVYAQGKDYHDVVKKALKALARWLVEQPTREGEANALKVFVDTAPVMEKPLAAGAGLGWQGKHSNLVSRTHGSWLFLGAIYTERALTPDAPERDHCGSCTACQAACPTDAFPAPYVVDARRCISYLTIEHKGPIPQDLRDGIGNRVYGCDDCLAVCPWNKFADHAAANKAFLGRAELAAPDIGDLLDLDDATFREIFSGSPIKRIGRNRLVRNAAIAAGNSADPRLLTRLRPLCDDEDPVVAEAAAWAIAKLTA

SEQ ID NO: 81060 - protein, 341 aa, unidentified
  source 1..341: note = Sphingobium limneticum
  REGION 1..341: note = tr|A0A5J5H9S6|A0A5J5H9S6_9SPHN tRNA epoxyqueuosine(34) reductase QueG OS=Sphingobium limneticum OX=1007511 GN=queG PE=4 SV=1
MEQRLKAEAARLGFAACRIAPADVAPRTGERLRQWLDAGHHGDMLWMEDRAEQRGSPKGLWPDVRSVIMLGMSYAPGRDPLALADVPDRARFSVYAQGKDYHDVVKKALKALARWLVEQQAGSLKVFVDTAPVMEKPLAQGAGLGWQGKHSNLVSRDHGSWLFLGAIYTEMALEPDGGERDHCGSCSACINACPTDAFPSPYVVDARRCISYLTIEHKGPIPEDLRAGIGNRVYGCDDCLSVCPWNKFADHAAANKAFIGRAELAAPAIGDLLDLDDATFREIFSGSPIKRIGRNRMVRNAAIAAGNSGDTRLLARLEALVADEDPVVAEAATWAIGKLTG

SEQ ID NO: 81061 - protein, 340 aa, Sphingobium lucknowense; identical to SEQ ID NO: 81043
  REGION 1..340: note = tr|A0A081T2N7|A0A081T2N7_9SPHN Epoxyqueuosine reductase OS=Sphingobium lucknowense F2 OX=1450518 GN=queG; PE = 3 SV=1

SEQ ID NO: 81062 - protein, 341 aa, unidentified; identical to SEQ ID NO: 81037
  source 1..341: note = Sphingobium paulinellae
  REGION 1..341: note = tr|A0A5J5I366|A0A5J5I366_9SPHN tRNA epoxyqueuosine(34) reductase QueG OS=Sphingobium paulinellae OX=2048545 GN=queG PE=4 SV=1

SEQ ID NO: 81063 - protein, 347 aa, Sphingobium quisquiliarum
  REGION 1..347: note = tr|T0H6C2|T0H6C2_9SPHN Epoxyqueuosine reductase; OS = Sphingobium quisquiliarum P25 OX=1329909 GN=queG PE=3; SV = 1
METFEQRLKAEALRLGFAACAIARADAAPEAGRRLREWLDAGRHGDMLWMEERAEQRASPAGLWPDVRSVIMLGMSYAPGRDPLALAEAGGRGRISVYAQGRDYHDIVKKGLKALARWLVEQQQGALKVFVDTAPVMEKPLAQAAGLGWQGKHSNLVSRAHGSWLFLGAIYSEIALEPDAPERDHCGSCAACQAACPTGAFPAPYVVDARRCISYLTIEHKGPIPDALRVGIGNRIYGCDDCLAVCPWNKFADRAAANRAFVGRAELAAPSLADLLDLDDAGFREVFSGSPIKRIGRGRMVRNAAIAAGNSGDKDLLNRLRPLLADADPVVAEAAAWAIGRLTAPPA

SEQ ID NO: 81064 - protein, 349 aa, Sphingobium sp.
  REGION 1..349: note = tr|A0A2W6SSD4|A0A2W6SSD4_9SPHN Epoxyqueuosine reductase OS=Sphingobium sp. OX=1912891 GN=queG PE=3 SV=1
METLEQRLKSEAARLGFAACRIATADAAPGAGQRLRAWLDAGHHGDMLWMEDRAEQRGSPKGLWPDVRSVVMLGMSYAPRRDPLALAHVPDRARVSVYAQGKDYHDVVKKALKALARWLVEQQAGSLKVFVDTAPVMEKPLAQGAGLGWQGKHSNLVSRDHGSWLFLGAIYTEIVLEPDGPERDHCGSCTACQAACPTDAFPAPYVVDARRCISYLTIEHKGPIPHDLRAGIGNRVYGCDDCLAVCPWNKFADHAAANRAFVGRAELAAPAIADLLDLDDAAFREIFAGSPIKRIGRNRMVRNAAIAAGNSGDAGLIPRLEALLDDADPVVAEAARWAVEQLAGAGYFA

SEQ ID NO: 81065 - protein, 348 aa, Sphingobium sp.
  REGION 1..348: note = tr|A0A1H9RN79|A0A1H9RN79_9SPHN Epoxyqueuosine reductase OS=Sphingobium sp. YR768 OX=1884365 GN=queG PE=3; SV = 1
METETLEQRLKAEALRLGFAACRIARADAAPKSGERLREWLDAGYHGDMLWMEERSEQRGSPTGLWPDVRSVIMLGMSYAPGRDPLALADVPDRARFSVYAQGKDYHDVVKKALKALARWLVEQQQGALKVFVDTAPVMEKPLAAGAGLGWQGKHSNLVSRDHGSWLFLGAIYSELALEADGPERDHCGSCTACQAACPTDAFPAPYKVDARRCISYLTIEHKGPIPEELRAGIGNRVYGCDDCLAVCPWNKFADAAAANRAFVGRAELAAPAIGDLLDLDDATFREIFSGSPIKRIGRNRMVRNAAIAAGNSGDPRLLARLEALVGDADAVVAEAAEWAIGKLSPSP

SEQ ID NO: 81066 - protein, 341 aa, Sphingobium ummariense
  REGION 1..341: note = tr|T0J2S4|T0J2S4_9SPHN Epoxyqueuosine reductase; OS = Sphingobium ummariense RL-3 OX=1346791 GN=queG PE=3 SV=1
MEQRLKAEAARLGFAACAIARADAAPLAEARLRDWLAAGHHGDMLWMEERAAQRGSPQGLWPDVRSVVMLGMSYAPSRDPLALAGAGDRGRISVYAQGRDYHDVVKKGLKALARWLVEQQPGSLKVFVDTAPVMEKPLAQAAGLGWQGKHSNLVSRAHGSWLFLGAIYSEIALEPDAAEEDHCGSCTACQSACPTDAFPSPYVVDARRCISYLTIEHKGPIPEALRAGIGNRIYGCDDCLAICPWNKFADAAAANRAFLGRAELAAPALADLLDLDDAAFREIFSGSPIKRIGRDRMVRNAAIAAGNSGDPRLLDRLRPLLGDIDPAVADAARWAIGRLSP

SEQ ID NO: 81067 - protein, 350 aa, Sphingobium wenxiniae
  REGION 1..350: note = tr|A0A562KE92|A0A562KE92_SPHWJ Epoxyqueuosine reductase OS=Sphingobium wenxiniae (strain DSM 21828 / JZ-1) OX=595605 GN=queG PE=3 SV=1
MATQIETLEQRLKAEAARLGFAACAIASADAAPMAGRRLRDWLDAGHHGGMLWMEERAAQRGSPRGLWPEVRSVVMLGMSYAPGRDPLALADAGDRARISVYAQGKDYHDIVKKGLKALARWLVAQQDGALKVFVDTAPVMEKPLAMAAGLGWQGKHSNLVSRTHGSWLFLGAIYSEIALATDQGEQDHCGSCNACQTACPTNAFPSPYVVDARRCISYLTIEHKGPIPEELRRGIGNRVYGCDDCLAVCPWNKFADAGAANRAFMGRAELAAPAIGDLLALDDVAFREIFSGSPIKRIGRGRMVRNAAIAAGNSGDRRLIAKLQALTGDPDPVVAEAADWAIGRLSIQS

SEQ ID NO: 81068 - protein, 344 aa, Sphingobium xenophagum
  REGION 1..344: note = tr|A0A401J5U1|A0A401J5U1_SPHXE Epoxyqueuosine reductase OS=Sphingobium xenophagum OX=121428 GN=queG PE=3; SV = 1
MESLETRLKVQAASLGFAACAIAPADVAPQAGKRLGEWLDAGHHGDMLWMEERAGQRGSPRGLWPDVRSVVMLGMSYAPGRDPLALADVPDRSRISVYAQGKDYHDVVKKGLKSLARWLVDQQPGALKVFVDTAPVMEKPLAQGAGLGWQGKHSNLVSRQHGSWLFLGAIYTEIALQPDAPEVDHCGSCTACQTACPTDAFPSPYVVDARRCISYLTIEHKGPIPHDLREGIGNRIYGCDDCLAVCPWNKFADQAAANKAFVGRAELAAPAIADLLALDDAAFREIFSGSPIKRIGRNRMVRNAAIAAGNSGDVRLLGRLQALAGDDDPVVAEAATWAIGRLSV

SEQ ID NO: 81069 - protein, 352 aa, Sphingobium yanoikuyae
  REGION 1..352: note = tr|A0A084ECI8|A0A084ECI8_SPHYA Epoxyqueuosine reductase OS=Sphingobium yanoikuyae OX=13690 GN=queG PE=3; SV = 1
MPVQNETLEQRLKAQAAQLGFAACAIARADAAPRTAERLRQWLEAGHHGDMLWMEERAEQRGSPTGLWPEARSVIMLGMSYAPGRDPLALAEVGDRGRISVYAQGRDYHDVVKKALKALARWLVDQQPTALKVFVDTAPVMEKPLAQGAGLGWQGKHSNLVSRQHGSWLFLGAIYTEIALEPDAPEVDHCGSCTACLSSCPTDAFPSPYIVDARRCISYLTIEHKGPIPEEFRARMGNRIYGCDDCLAACPWNKFAQGAAANRAFIGRAELAAPALGDLLDLDDAGFREIFSGSPIKRIGRDRMVRNAAIAAGNSGDLRLVDRLRRLTSDSDPVVAEAAEWALGQLLSAAGA

SEQ ID NO: 81070 - protein, 352 aa, Sphingobium yanoikuyae
  REGION 1..352: note = tr|K9CQN6|K9CQN6_SPHYA Epoxyqueuosine reductase; OS = Sphingobium yanoikuyae ATCC 51230 OX=883163 GN=queG; PE = 3 SV=1
MPVQNETLEQRLKAQAAQLGFAACAIARADAAPRTAERLRQWLEAGHHGDMLWMEERAEQRGSPTGLWPEARSVIMLGMSYAPGRDPLALAEVGDRGRISVYAQGRDYHDVVKKALKALARWLVDQQPTALKVFVDTAPVMEKPLAQGAGLGWQGKHSNLVSRQHGSWLFLGAIYTEIALEPDAPEVDHCGSCTACLSSCPTDAFPAPYIVDARRCISYLTIEHKGPIPEEFRARMGNRIYGCDDCLAACPWNKFAQGAAANRAFIGRAELAAPALGDLLDLDDTGFREIFSGSPIKRIGRDRMVRNAAIAAGNSGDLGLVDRLRPLTSDPDPVVAEAAQWALGQLLSAAGV

SEQ ID NO: 81071 - protein, 346 aa, unidentified
  source 1..346: note = Sphingomonadaceae bacterium
  REGION 1..346: note = tr|A0A2E3HKC5|A0A2E3HKC5_9SPHN Epoxyqueuosine reductase OS=Sphingomonadaceae bacterium OX=1930536; GN = queG PE=3 SV=1
MVNGELQAELREEAERLGFVACGFASAAPDPQRASRLEQFLGEGRHGSMEWMEARKTQRASPQGLWPEANSVIALGMSYAPDVDPLALADAAEKARVSVYAQGRDYHDVVKKALKALARWLIAREPTSELKVFVDTAPVMEKPLGQAAGIGWQGKHTNLVSRSHGSWLFLGAIYSTLEFAPDLSHPDRCGNCRACQDACPTDAFPAPYQLDARRCISYLTIEHKGPIPEEFREALGNRIYGCDDCLAVCPWNKFADTAHRHLKLAPREELAAPDLASFLTFDDAGFRQFFSGSPIKRVGRDRFVRNCLYAAGNSGSAALAPLVEGLRGDPDPAVSEAADWAARRLG

SEQ ID NO: 81072 - protein, 367 aa, unidentified
  source 1..367: note = Sphingomonadaceae bacterium
  REGION 1..367: note = tr|A0A257DKX1|A0A257DKX1_9SPHN tRNA epoxyqueuosine(34) reductase QueG OS=Sphingomonadaceae bacterium PASS1 OX=2015579 GN=queG PE=4 SV=1
MVNELQAKAQSEGLVAFGIAPGHLAPRAGQRLRQWIDEGRHGDMLWMESRVDERANPDILWPEVKSVIMLGMSYAPPHDPMALAGDDTKARISVYAQGRDYHDVIKGALKRLASWLAHSAEVGVKVFVDTAPVMEKALAEVAGLGWQGKHSNIVSKEHGSWLFLGAIYTTAELAPSVPATDTCGSCRACQDICPTNAFPAPYQLDARRCISYLTIEHKGPIDRELRSLMGNHIYGCDDCLAVCPWNKFAETAAAHKAFLPREALVAPCIADLLALDDTQFRQLFSGSPVKRIGRDSFVRNVLIAAGNGRDLGVLPVVEMLMDDTSPVVRGAAIWAMSRLSPEIFAREKQARFADELDPSVRTEWTLS

SEQ ID NO: 81073 - protein, 350 aa, unidentified
  source 1..350: note = Sphingomonadales bacterium
  REGION 1..350: note = tr|A0A4Q5RVN8|A0A4Q5RVN8_9SPHN Epoxyqueuosine reductase OS=Sphingomonadales bacterium OX=1978525 GN=queG; PE = 3 SV=1
MGVQLDKSLAAQIKVKAAEIGFAACGVARADAAPRAGERLHQWLAEGRHGSMIWMEERAHHRESPAGLWPEVRSVISLGMSYAPATDPLALAEEGERGRISVYAQGQDYHDVVKRRLKELARWIVGQAKDADVKVFVDTAPVMEKPLAEAAGLGWQGKHTNLVSREHGSWLFLGAIYTTLDLAGDKGAPSTCGSCDACQTACPTDAFPAPYRLDARRCISYLTIEHKGPIPHEFREAIGNRIYGCDDCLAVCPWNKFAEAGRANLAFAPRAELTAPALADLLALDDAAFREVFSGSPIKRIGRDRMVRNCLIAAGNSGSAALAGPVRALLVDPDETVREAAEWAAARLEV

SEQ ID NO: 81074 - protein, 355 aa, unidentified
  source 1..355: note = Sphingomonadales bacterium
  REGION 1..355: note = tr|A0A1G3JMJ6|A0A1G3JMJ6_9SPHN Epoxyqueuosine reductase OS=Sphingomonadales bacterium RIFCSPLOWO2_12_FULL_63_15 OX=1802170 GN=queG PE=3 SV=1
MEERLKGQAAQLGFAICRIAPTDAAPQSAERLRQWLDAGHHGDMLWMEDRAEQRGSPQGLWPDVRSVIMLGMSYAPGRDPLALADVPDRARISVYAQGKDYHDVVKKALKALARWLVDQQHGALKVFVDTAPVMEKPLAQGAGLGWQGKHSNLVSRDHGSWLFLGAIYTELTLAPDGAERDHCGSCTACLTACPTDAFPSPYVVDARRCISYLTIEHKGPIPHDLRAGIGNRIYGCDDCLAACPWNKFADAAAAHRAFLGRAELAAPELADLLALDDADFRELFSGSPIKRIGRNRLVRNAAIAAGNSGDARLRGRLEALVADDDPVVAEAAAWAIEKLSSAAPLNPLPPSRERV

SEQ ID NO: 81075 - protein, 383 aa, Sphingomonas aerolata
  REGION 1..383: note = tr|A0A2T4YUY8|A0A2T4YUY8_9SPHN Epoxyqueuosine reductase OS=Sphingomonas aerolata OX=185951 GN=queG PE=3; SV = 1
MPDDKPSDLESRVKAKAAELGFAACGIARADAAPLAGERLHQWLAEGRHGDMIWMEERRDQRASPAGLWPAVRSVIALGMSYAPKDDPLRLAEQGEVGRISVYAQGADYHDVIKRQLKALGRWLASDAVGVEYLFDLKVFVDTAPVMEKPLAEAAGLGWQGKHTNLVSRTEGSWLFLGAIYTTLELKGDTAGRDLCGSCDACQRACPTDAFPAPYRLDARRCISYLTIEHAGVIPEEFRAGIGNRIYGCDDCLAVCPWNKFAAAANANLAFAPRAELVAPEIADLIALDDAGFRQVFAGSPIKRIGRDKMVRNALIAAGNSGDPALSEGVAALLGDPAPVVRGTAVWALSRLDAARFAAEKAQRRGSENDDGVRVEWDRANLS

SEQ ID NO: 81076 - protein, 356 aa, Sphingomonas aquatilis
  REGION 1..356: note = tr|A0A511Q5X5|A0A511Q5X5_9SPHN Epoxyqueuosine reductase OS=Sphingomonas aquatilis NBRC 16722 OX=1219039; GN = queG PE=3 SV=1
MAKDKPSPTPIEARIKAEAAALGFVACGIARADAAPRSGERLRQWLDEGRHGGMIWMEERSAQRAAPAALWSDVRSVIALGMSYAPARDPLALAGEGERGRISVYAQGGDYHDVVKRALKALGRWLAREAGCDLKVFVDTAPVMEKPLSEAAGLGWQGKHTNLVSRDHGSWLFLGAIYTTLDLAPDTPGRDSCGSCDACQRACPTDAFPAPYRLDARRCISYLTIEHAGPIPEEFRTGIGNRIYGCDDCLAVCPWNKFAASAAANMAFHPRAELTAPALADLLALDDAGFRQVFSGSPIKRIGRNRMVRNAAIAAGNSGSPALIPALDRLLGDEDPVVAEAAAWARARLDRTGSGG

SEQ ID NO: 81077 - protein, 353 aa, Sphingomonas aurantiaca
  REGION 1..353: note = tr|A0A2T5GLS4|A0A2T5GLS4_9SPHN Epoxyqueuosine reductase OS=Sphingomonas aurantiaca OX=185949 GN=queG; PE = 3 SV=1
MAQDKLEHRLKAKAAELGFAACGIARADAAPRAGERLHQWLADGRHGDMIWMEERKHHRESPAGLWPEVRSVIALGMSYAPKDDPLRFADEGGVGRISVYAQGPDYHDVVKRQLKALGRWLAAEAGRDLPPFDLKVFVDTAPVMEKPLAEAAGLGWQGKHTNLVSRDHGSWLFLGAIYTTLDLEPDKGGVDTCGTCTACLGACPTDAFPAPFQLDARRCISYLTIEHAGPIPHEFRAAIGNRIYGCDDCLAVCPWNKFAAAANANLAFHPRAELVAPELADILALDDAGFRQVFAGSPIKRIGRDRMIRNALIAAGNSGDLRLAPLVQDLLADENPVVRDAADWALSRLGAPS

SEQ ID NO: 81078 - protein, 350 aa, unidentified
  source 1..350: note = Sphingomonas carotinifaciens
  REGION 1..350: note = tr|A0A1G7EWY1|A0A1G7EWY1_9SPHN Epoxyqueuosine reductase OS=Sphingomonas carotinifaciens OX=1166323; GN = queG PE=3 SV=1
MPQDKLETRIKAKAAELGFASIGIARADAAPHSAARLREWLADGAHGSMIWMEERAHHRESPAGLWPEVRTVISLGVSYAPKDDPMKLADAGDIGRISVYAQGADYHDVVKRQLKALGRWLVAEAACELKVFVDTAPVMEKPLAEAAGLGWQGKHTNLVSRAHGSWLFLGAIYTTLELTPDVAGRDTCGSCDACQQACPTAAFPKPYRLDARRCISYLTIEHKGPIPEEFRAAMGNRIYGCDDCLAACPWNKFAVAASANMAFRPRAELTAPALADLLDLDDAGFRQVFAGSPIKRIGRERMVRNAAIAAGNSGEYALVPVLQRLTTDASETVAEAARWALEQLGRQAKK

SEQ ID NO: 81079 - protein, 376 aa, Sphingomonas changbaiensis
  REGION 1..376: note = tr|A0A0E9MQK6|A0A0E9MQK6_9SPHN Epoxyqueuosine reductase OS=Sphingomonas changbaiensis NBRC 104936; OX = 1219043 GN=queG PE=3 SV=1
MATESLPQALKNEAARIGFAACGIARADAAPRSGERLRAWLADGAHGDMIWMESRADQRAAPAGLWPDVRSVIALGMSYAPGGDPLKLAAEPEAGRISVYAQGADYHDLVKRKLKELARWLVAQAGGDLKVFVDTAPVMEKPLAEAAGLGWQGKHTNLVSREHGSWLFLGAIFTTLELAPDAAGAQRCGSCDACQRACPTDAFPAPFRLDARRCISYLTIEHKGPIPRALRKGIGNRIYGCDDCLAVCPWNKFAEAGAANLAFAPRAELSAPMLADLLALDDAGFRQLFAGSPIKRIGRDRMMRNCLVAAGNSGAAGLVETVRAHLDDPNPVVRGAAVWALGRLDEAMLGEERKSRLHEEPDEIVREEWLLASPSL

SEQ ID NO: 81080 - protein, 376 aa, Sphingomonas desiccabilis
  REGION 1..376: note = tr|A0A4Q2IUW8|A0A4Q2IUW8_9SPHN Epoxyqueuosine reductase OS=Sphingomonas desiccabilis OX=429134 GN=queG; PE = 3 SV=1
MDQHKSLETRIQEKAAELGFAACGFARADAAPQTAARLREWLEAGRHGSMIWMEERAHHRGSPAGLWPEVRSVIALGMSYAPARDPLALAGVGDRGRISVYAQGADYHDVVKKALKALGRWLANEAGCDLKVFVDTAPVMEKPLAEAAGLGWQGKHTNLLSREHGSWLFLGAIYTTLELAPDARPGGSCGSCDACQRACPTDAFPAPYQLDARRCVSYLTIEHAGPIPAALRPGIGNRIYGCDDCLAVCPWNKFAATAAANKGFLPRAELAAPRLAELMALDDPGFRQVFAGSPIKRIGRDRMVRNALVAAGNSGDPALVRPVVALLDDPAPVVRGAAAWALGQLDPARFAGEREARLVAEADVDVRAEWAASPSS

SEQ ID NO: 81081 - protein, 352 aa, unidentified
  source 1..352: note = Sphingomonas edaphi
  REGION 1..352: note = tr|A0A418PY01|A0A418PY01_9SPHN Epoxyqueuosine reductase OS=Sphingomonas edaphi OX=2315689 GN=queG PE=3; SV = 1
MTSLKQRIFDKAAELGFSAWGIARANAAPEAGERLMDWLAAGNHGEMGWMEERAGQRSSPNGLWPDAKSVIALGMSYAPAVDPLALADAGDRGRISVYAQGADYHKVVKKALKAMGRWLADECGCQLKVFVDTAPVMEKPLSAAAGVGWQGKHSNLLNREHGSWLFLGIIYTTLDLEPDDPAAEHCGSCTRCIDACPTRAIVAPQLVDARRCISYLTIELAGPIPNEFREAIGNRIYGCDDCLAVCPWNRFASAAQANKAFAPRAELAAPALADLLSLDDASFRELFSGSPIKRIGVARMTRNCLIAAGNSGELSLRPSIERHLGSDDPVVADAARWALERLQRLPSRASIA

SEQ ID NO: 81082 - protein, 374 aa, unidentified
  source 1..374: note = Sphingomonas elodea
  REGION 1..374: note = tr|A0A495F1Q6|A0A495F1Q6_SPHEL Epoxyqueuosine reductase OS=Sphingomonas elodea OX=179878 GN=queG PE=3; SV = 1
MRVRQDKSIEERLKAKAAEIGFAACGIAHADAAPRTAERLRQWLDEGAHGEMLWMEERAEQRGSPKGLWPEVRSVIALGMSYAPANDPLALADAGEIGRISVYAQGADYHDVVKRRLKELARWLVAEAPGADVKVFVDTAPVMEKPLSEAAGLGWQGKHTNLVSRSHGSWLFLGAIYTTLDLASDGPSGGGCGSCDACQTACPTGAFPAPYRIDARRCVSYLTIENKGPIPRDLRQGIGNRIYGCDDCLAVCPWNKFAAAAQANLAFHPRAELTVPHLADLLALDDAGFREVFAGSPIKRIGRDRMVRNCLIAAGNSGSARLVAPVATLLDDPDPVVRGAAIWALAQLAPARWADERIARASMEQDPLAHAEWQ

SEQ ID NO: 81083 - protein, 392 aa, Sphingomonas faeni
  REGION 1..392: note = tr|A0A2T5UBC3|A0A2T5UBC3_9SPHN Epoxyqueuosine reductase OS=Sphingomonas faeni OX=185950 GN=queG PE=3 SV=1
MAQDKLEHRLKAKAAELGFVACGIAHAGAAPRAGERLHQWLADGRHGDMIWMEERKHHRESPAGLWPEVRSVIALGMSYAPKDDPLRLADEGGVGRISVYAQGPDYHDVVKRQLKALGRWLAAEAGRDLPPFDLKVFVDTAPVMEKPLAEAAGLGWQGKHTNLVSREHGSWLFLGAIYTTLDLEPDKGGVDTCGSCDACQTACPTAAFPRPYQLDARRCISYLTIEHAGPIPHEFRAAIGNRIYGCDDCLAVCPWNKFAAAANANLAFHPRAELIAPELADILALDDASFRTVFAGSPIKRIGRAKMIRNALMAAGNSRDPGLVEAVVGLLSDDSPVVRGAAIWALRRLDSARWGIERGRRLADEGDQSVLGEWGAAAVDRVVPLVDLPASK

SEQ ID NO: 81084 - protein, 371 aa, Sphingomonas fennica
  REGION 1..371: note = tr|A0A2T4I087|A0A2T4I087_9SPHN Epoxyqueuosine reductase OS=Sphingomonas fennica OX=114404 GN=queG PE=3; SV = 1
MTAELKIEARRLGFVACGVAPADATPDSAMRLREWLDSGAHGDMLWMEERAGQRGSPRALWPDVKSVVMLGMSYAPAEDPLRLADAPGIARISAYAQGQDYHDIVKKALKALARWLVDRAGGDLKVFVDTAPVMEKPLAEAAGLGWQGKHTNLVSRDHGSWLFLGAIMTTLDLAADDPGRGGCGSCDACQRACPTAAFPAPYRLDARRCISYLTIENKGPIPHEFRAAMGNRIYGCDDCLAVCPWNKFAATAAANRAFAARAELAAPEIADLLALDDPAFRAVFAGSPIKRIGRDRMVRNALIAAGNDRGRHLLPAVLHLLDDPTPMVRGAAIWALERIDPAGFAAARASRLPAEADASVRAEWLGMAMEA

SEQ ID NO: 81085 - protein, 357 aa, unidentified
  source 1..357: note = Sphingomonas gei
  REGION 1..357: note = tr|A0A4S1X915|A0A4S1X915_9SPHN Epoxyqueuosine reductase OS=Sphingomonas gei OX=1395960 GN=queG PE=3 SV=1
MRQDKPLEQRIKEKAAEIGFADCGIARADAAPAAGVRLRQWLAEGAHGSMIWMEERAHHRASPAALWPEVRSVIALGMSYAPAVDPLALAGEGETGRISVYAQGGDYHDLIKRRLKELARWLVGVAPGADVKVFVDTAPVMEKPLSEAAGLGWQGKHTNLVSRSHGSWLFLGAIYTTLDLAPDLAQQSTCGSCNACQTACPTDAFPAPYRLDARRCISYLTIEHKGPIPLEFRASMGNRIYGCDDCLAVCPWNKFAAAAQANLAFAPRAELTAPALADLLALDDAGFREVFAGSPIKRIGRDRMVRNCLIAAGNSGSAALVAPVRALLGDPDEVIREAAEWALGRLEGQAFPQLRSP

SEQ ID NO: 81086 - protein, 372 aa, unidentified
  source 1..372: note = Sphingomonas ginsenosidivorax
  REGION 1..372: note = tr|A0A5C6U9G4|A0A5C6U9G4_9SPHN Epoxyqueuosine reductase OS=Sphingomonas ginsenosidivorax OX=862135; GN = queG PE=3 SV=1
MRVAVDKLEDRIRAKAAELGFAACGLARADAAPRAGERLHQWLAEGRHGDMIWMEERKHHRESPAGLWPEVRSIIALGLSYAPKEDPLRLADEGGVGRISVYAQGGDYHDVMKRALKALGRWLAKEAGCDLKVFVDTAPVMEKPLAEAAGLGWQGKHTNLVSRTAGSWLFLGAIYTTLDLAPDTPGSDSCGSCTACQTACPTDAFPAPYQLDARRCISYLTIEHAGPIPREFRRGIGNRIYGCDDCLAVCPWNKFAAAAQANLAFAPRAELVAPGLADLLALDDAGFRQVFAGSPIKRIGRDKMTRNALIAAGNSGDPDLLASVAALLDDPATVVRGAAVWALGRLDAARWQTERSGRIAAEADSAVLAEWG

SEQ ID NO: 81087 - protein, 357 aa, Sphingomonas glacialis
  REGION 1..357: note = tr|A0A502G497|A0A502G497_9SPHN Epoxyqueuosine reductase OS=Sphingomonas glacialis OX=658225 GN=queG PE=3; SV = 1
MWRTVVDALPLEQRLAAKAREFGFVACGVAAADAAPKTAERLQQWLREGLHGGMIWMEERAHHRESPAGLWPEVKSVIALGMSYAPATDPLALAGEGGVGRISTYAQGGDYHDVVKRALKALARWLVAEAPGIDLKVFVDTAPVMEKPLAEAAGLGWQGKHTNLVSRSEGSWLFLGAIYTTLEIGAFGAVTPPVADHCGSCDACQRACPTDAFPAPYRLDARRCISYLTIEHAGPIPLEFRKGIGNRIYGCDDCLAVCPWNKFAAAASANRAFLPRAELVAPELADLLALDDAGFRQVFAGSPIKRIGRDRMVRNCLIAAGNSGDPGLRAQVALLRDDPNPVVAEAAEWAFAELADA

SEQ ID NO: 81088 - protein, 383 aa, Sphingomonas haloaromaticamans
  REGION 1..383: note = tr|A0A1S1H8G3|A0A1S1H8G3_9SPHN Epoxyqueuosine reductase OS=Sphingomonas haloaromaticamans OX=653954; GN = queG PE=3 SV=1
MPHSSHHIDNKALTAELKIEARRLGFVACGVAPADATPDSAMRLREWLESGAHGDMLWMEERAGQRGTPRALWPDVKSVVMLGMSYAPAEDPLRLADAPGIARISAYAQGQDYHDIVKKALKALARWLVDRAGGDLKVFVDTAPVMEKPLAEAAGLGWQGKHTNLVSRDHGSWLFLGAIMTTLDLAADGPGRGGCGSCDACQRACPTAAFPAPYRLDARRCISYLTIENKGPIPHEFRAAMGNRIYGCDDCLAVCPWNKFAATAAANRAFAARAELAAPEIADLLALDDPAFRAVFAGSPIKRIGRDRMVRNALIAAGNDRGRHLLPAVLRLLDDPAPVVRGAAIWALERIDPAGFAAARATRLPAEADASVRAEWLGVAMEA

SEQ ID NO: 81089 - protein, 359 aa, unidentified
  source 1..359: note = Sphingomonas hengshuiensis
  REGION 1..359: note = tr|A0A2W5B8E8|A0A2W5B8E8_9SPHN Epoxyqueuosine reductase OS=Sphingomonas hengshuiensis OX=1609977 GN=queG; PE = 3 SV=1
MIQDKGSPGDIVARIRAMAAECGFVACGIARADAAPRTAQRLRQWLDEGRHGSMIWMEERAHQRGSPAALWSEVKSIIALGMSYAPAGDPLALEGVGDRGRISVYAQGGDYHDVVKKALKALGRWLAQEAGCDLKVFVDTAPVMEKPLSEAAGLGWQGKHTNLVSRAHGSWLFLGAIYTTLDLPPDRPGRDSCGSCDACQRACPTDAFPQPYRLDARRCISYLTIEHAGPIPVELRAGIGNRIYGCDDCLAVCPWNKFAEVAAANRAFAARAEFAAPRLADLIALDDASFRAVFRGSPIKRIGRNRMVRNALIAAGNSGDPALVEPVRAACGDGDAVVAEAAAWALAQLNPALTLLPAS

SEQ ID NO: 81090 - protein, 357 aa, unidentified
  source 1..357: note = Sphingomonas hengshuiensis
  REGION 1..357: note = tr|A0A2W5CV04|A0A2W5CV04_9SPHN Epoxyqueuosine reductase OS=Sphingomonas hengshuiensis OX=1609977 GN=queG; PE = 3 SV=1
MNKDKPFAARLKQHATHVGFHACGIAPAAAAPQAGERLRDWLAAGRHGDMIWMAVRERERASPRGLWSEVQSVIALGMSYAPAVDPLALAGEPTRGRVSVYAQGGDYHDVVKRALKALARWIVAEAGGDVKVFVDTAPVMEKPLAEAAGIGWQGKHTNLVSRADGSWLFLGAIYTTLDLAADAPGRDACGSCDACQRACPTNAFPAPYQLDARRCVSYLTIEHAGPIPHDLRAGIANRVYGCDDCLAVCPWNKFAASAAANRAFLPRAELTAPALADLLALDDAGFRAVFAGSPVKRIGRERMARNAAIAAGNSGDARLAVPLRALLGDDSAVVREAADWALAQLLAPATPGDGADA

SEQ ID NO: 81091 - protein, 398 aa, Sphingomonas histidinilytica
  REGION 1..398: note = tr|A0A1T5EC93|A0A1T5EC93_9SPHN Epoxyqueuosine reductase OS=Sphingomonas histidinilytica OX=439228; GN = queG PE=3 SV=1
MTKHWVLAATLLDSPEMTDDPISLREAIRDEALKLGFTACGFARADAAPESAARLDAWLATGAHGSMEWMEARKGERARPQGLWPEARSLIMLGMSYAPREDPMRLADAPGIGRISVYAQGTDYHDVVKKALKHLARWLVDRAGGALKVFVDTAPVMEKPLSAAAGIGWQGKHSNLVSREHGSWLFLGAIMTSLELPPDDPHDDRCGSCSACQAACPTDAFPRPYVVDARRCISYLTIEHKGPIPAEFRAPIGNRIYGCDDCLAVCPWNKFAEAAAANRAFAARAELAAPELEDLLGLDDAGFRAVFAGSPIKRIGRDRMLRNALIAAGNSGLARLLPPIMALLDDPAPVVRGAAVWALGRLDPAGFATERATRRADEKDSDVAAEWDAEIAAAPAAR

SEQ ID NO: 81092 - protein, 352 aa, unidentified
  source 1..352: note = Sphingomonas indica
  REGION 1..352: note = tr|A0A1X7FZ42|A0A1X7FZ42_9SPHN Epoxyqueuosine reductase OS=Sphingomonas indica OX=941907 GN=queG PE=3; SV = 1
MTAPLSLRDRLEAEARSLGFTAFGIARADAAPRSGERLRAWLADGAHGDMIWMEETANRRASPAGLWPEVRSVIALGMSYAPAADPRLLEAEPEAGRISVYAQGGDYHDVVKRALKALARWLVAAAPSELKVFVDTAPVMEKPLAEAAGIGWQGKHTNLVSREDGSWLFLGTIFTTLELEADAPHALRCGSCHACIDACPTAAFPVPYRLDARRCISYLTIEHKGPIPEEFRAAIGNRIYGCDDCLAACPWNRFASSARRNQAFLPRAELAAPALADLLALDDAGFRRVFAGSPIKRIGRNRMVRNAAIAAGNSGSAALVPVLQRLTDDADAVVAEAARWALERLAVSAAPR

SEQ ID NO: 81093 - protein, 380 aa, unidentified
  source 1..380: note = Sphingomonas jatrophae
  REGION 1..380: note = tr|A0A1I6JRZ4|A0A1I6JRZ4_9SPHN Epoxyqueuosine reductase OS=Sphingomonas jatrophae OX=1166337 GN=queG; PE = 3 SV=1
MNYSLTDRLKAEAARLGFVACGIAPADAMPQAAARLREWLASGAHGEMLWMEARESERASPTGLWPDVRSVVMLGMSYAPATDPRLLESELAIGRFAAYAQGQDYHDIVKKALKALARWLVAEAPDTALKVFVDTAPVMEKPLAEAAGLGWQGKHSNLVSREHGSWLLLGALMTTLDLAPDAPARTTCGSCSACLDACPTNAFPAPFRLDARRCISYLTIEAKGPIPREHRRSIGNRVYGCDDCLAACPWNKFAAGAAANRAFLPRAELTAPAIADLLELDDAAFRQVFSGSPIKRIGRDRMVRNALTAAGNSGDGALVGRVAALLDDASPLVRGAAVWALGQLAPQRLSAEAWRSGEETDAEVQAEWAAAGLDGSPPSA

SEQ ID NO: 81094 - protein, 351 aa, Sphingomonas koreensis
  REGION 1..351: note = tr|A0A1L6J9L7|A0A1L6J9L7_9SPHN Epoxyqueuosine reductase OS=Sphingomonas koreensis OX=93064 GN=queG PE=3; SV = 1
MQQGKSLEGRIRDKAAELGFAACGFARADAAPLAGRRLHEWLAEGQHGDMIWMAERAHHRESPRGLWPEVRSVISLGMSYSPANDPLALADVPDRARISVYAQGADYHDVMKKALKALGRWLAQEAGCDLKVFVDTAPVMEKPLAEAAGLGWQGKHTNLVSRYHGSWLFLGAIYTTLELEPDGRSGGGCGSCDACQTACPTDAFPAPYRLDARRCISYLTIELKGPIPEEFREGIGNRIYGCDDCLAVCPWNKFAAAAAANLSFAPRAELTAPELRDLLALDDAGFRQVFSGSPIKRIGRDRMMRNCLIAAGNSGDAALLAAVEALRDDPDPVVAEAADWARARLTSRGSP

SEQ ID NO: 81095 - protein, 351 aa, Sphingomonas koreensis
  REGION 1..351: note = tr|A0A2M8WA58|A0A2M8WA58_9SPHN Epoxyqueuosine reductase OS=Sphingomonas koreensis OX=93064 GN=queG PE=3; SV = 1
MQQGKSLEGRIRDKAAELGFAACGFARADAAPLAGRRLHEWLAEGRHGDMIWMAERAHHRESPRGLWPEVRSVISLGMSYSPANDPLALADVPDRARISVYAQGADYHDVMKKTLKALGRWLAQEAGCDLKVFVDTAPVMEKPLAEAAGLGWQGKHTNLVSRYHGSWLFLGAIYTTLELEPDGRSGGGCGSCDACQTACPTDAFPAPYRLDARRCISYLTIELKGPIPEEFREGIGNRIYGCDDCLAVCPWNKFAAAAAANLSFAPRAELTAPELRDLLALDDAGFRQVFSGSPIKRIGRDRMMRNCLIAAGNSGDAALLPAVEALRDDPDPVVAEAADWAQARLTSRGSP

SEQ ID NO: 81096 - protein, 378 aa, unidentified
  source 1..378: note = Sphingomonas laterariae
  REGION 1..378: note = tr|A0A239HHE7|A0A239HHE7_9SPHN Epoxyqueuosine reductase OS=Sphingomonas laterariae OX=861865 GN=queG; PE = 3 SV=1
MPDPSHHIDNKTLTAALKAEARRLGFVACGVAPADATPQAAARLAEWLASGAHGDMLWMEDRAEQRGSPAALWPEVRSVVMLGMSYAPAEDPLRLADAAGVARISTYAQGQDYHDIVKKALKALARWLVDQAGCDLKVFVDTAPVMEKPLAEAAGLGWQGKHTNLVSRDHGSWLFLGAIMTTLALEPDGRHRGSCGSCDACQTACPTAAFPAPYRIDARRCISYLTIENKGPIPREFRVAMGNRIYGCDDCLAVCPWNKFASAAAANQAFAARAELAVPGIADLLGLDDAGFRQVFAGSPIKRIGRDRMVRNALIAAGNDGGAALRAPIAALLDDPAPIVRGAAAWALARIDHPAFLAERDRRLAEEGDASVRDEWGA

SEQ ID NO: 81097 - protein, 356 aa, Sphingomonas melonis
  REGION 1..356: note = tr|A0A0D1M7C8|A0A0D1M7C8_9SPHN Epoxyqueuosine reductase OS=Sphingomonas melonis OX=152682 GN=queG PE=3; SV = 1
MAKDKPSPTPIESRIKAEAAALGFVACGIAHADAAPRSGERLRQWLDEGRHGGMIWMEERSAQRAAPAALWSDVRSVIALGMSYAPARDPLALAGEGEVGRISVYAQGGDYHDVVKRALKALGRWLAREAGCDLKVFVDTAPVMEKPLSEAAGLGWQGKHTNLVSRDHGSWLFLGAIYTTLDLAPDTPGRDSCGSCDACQRACPTDAFPAPYRLDARRCISYLTIEHAGPIPEEFRTSIGNRIYGCDDCLAVCPWNKFAASAAANMAFHPRAELTAPALADLLALDDAGFRQVFSGSPIKRIGRNRMVRNAAIAAGNSGSPALIPALDRLLGDDDPVVAEAAAWARARLDRTGSGG

SEQ ID NO: 81098 - protein, 356 aa, Sphingomonas melonis
  REGION 1..356: note = tr|A0A175Y4Y7|A0A175Y4Y7_9SPHN Epoxyqueuosine reductase OS=Sphingomonas melonis TY OX=621456 GN=queG; PE = 3 SV=1
MAKDKPSPTPIEARIKAEAAALGFVACGIAHADAAPRSGERLRQWLDEGRHGGMIWMEERSAQRAAPAALWSDVRSVIALGMSYAPARDPLALAGEGERGRISVYAQGGDYHDVVKRALKALGRWLAREAGCDLKVFVDTAPVMEKPLSEAAGLGWQGKHTNLVSRDHGSWLFLGAIYTTLDLVPDTPGRDSCGSCDACQRACPTDAFPAPYRLDARRCISYLTIEHAGPIPEEFRDGIGNRIYGCDDCLAVCPWNKFAASAAANMAFHPRAELTAPALADLLALDDAGFRQVFSGSPIKRIGRNRMVRNAAIAAGNSGSPALIPALDRLLGDDDPVVAEAAAWARARLDRTGSGG

SEQ ID NO: 81099 - protein, 356 aa, unidentified
  source 1..356: note = Sphingomonas naasensis
  REGION 1..356: note = tr|A0A4S1WEW7|A0A4S1WEW7_9SPHN Epoxyqueuosine reductase OS=Sphingomonas naasensis OX=1344951 GN=queG; PE = 3 SV=1
MEELIKQKAAEIGFADCGVARADAAPAAGARLREWLAEGAHGSMIWMEERANHRESPAGLWPEVRSVIALGMSYAPGVDPMALAGAGETGRISVYAQGADYHDLIKRKLKELARWLVGAAPGADVKVFVDTAPVMEKPLSEAAGLGWQGKHTNLVSRTHGSWLFLGAIYTTLDLAPDGPGRSTCGSCDACQTACPTDAFPAPYRLDARRCISYLTIEHKGPIPHELREAIGNHIYGCDDCLSVCPWNKFAAAAQANLAFAPRAELTAPALADLLALDDADFREVFAGSPIKRIGRNRMVRNCLIAAGNSGSAALAAPVRALLDDPDEVVREAAGWALERIGAPAKAGAQGEEATGM

SEQ ID NO: 81100 - protein, 388 aa, unidentified
  source 1..388: note = Sphingomonas oleivorans
  REGION 1..388: note = tr|A0A2T5G0Z2|A0A2T5G0Z2_9SPHN Epoxyqueuosine reductase OS=Sphingomonas oleivorans OX=1735121 GN=queG; PE = 3 SV=1
MDIEAALKAEAAALGFVACGIARADAAPETAARLAEWLASGAHGDMLWMEERSGQRGSPAALWPEVRSVIMLGMSYAPAENPMALEGEGGIGRISAYARGQDYHDIVKKALKALARWLVAKAGGDVKVFVDTAPVMEKPLAEAAGLGWQGKHSNLVSREQGSWLLLGAIMTTLELTPDARHRDSCGSCDACQRACPTDAFPAPYRIDARRCISYLTIENKGPIPLEFRAAIGNRVYGCDDCLAVCPWNKFAASAAANRAFHARAELAAPEIGDLLEMDDPAFRAIFSGSPIKRIGRDRMVRNALIVAGNSGAAALVAPAVRLLDDPSALVRGAAVWALSRLDPAAFARERAARIDSETDETVRAEWMLPPDMADARSVEPISALPAGG

SEQ ID NO: 81101 - protein, 335 aa, Sphingomonas oligophenolica
  REGION 1..335: note = tr|A0A502CKV0|A0A502CKV0_9SPHN Epoxyqueuosine reductase OS=Sphingomonas oligophenolica OX=301154 GN=queG; PE = 3 SV=1
MAAELGFAACGIARADAAPQTAARLRQWLDEGRHGDMIWMETRAHQRETPRALWPEVRSVIALGMSYAPTIDPLALAGESDIGRISVYAQGGDYHDVVKRQLKALGRWLAGEAGCDLKVFVDTAPVMEKPLAEAAGLGWQGKHTNLVSRDHGSWLFLGAIYTTLDLVPDRPGSDTCGSCDACQRACPTDAFPAPYRLDARRCISYLTIEHAGSIPHEFREAIGNRIYGCDDCLAVCPWNKFAHAASANLAFAPRAELAAPALADLLALDDAGFRQVFAGSPIKRIGRDRMVRNAAIAAGNSDDPALVPALDRLADDASEVVREAAAWARARLAAD

SEQ ID NO: 81102 - protein, 374 aa, unidentified
  source 1..374: note = Sphingomonas panacis
  REGION 1..374: note = tr|A0A1B3Z7Q4|A0A1B3Z7Q4_9SPHN Epoxyqueuosine reductase OS=Sphingomonas panacis OX=1560345 GN=queG PE=3; SV = 1
MNEHNPLTARLKAKAAELGFAACGIAHADVSPRAGERLHQWLAQGMHGDMLWMAERAGQRESPAALWPAVRSVIALGMSYAPAADPLALADAGGIGRISVYAQGGDYHDVVKRALKALARWLIAEAPGADVKVFVDTAPVMEKPLAEAAGLGWQGKHTNIVSRDAGSWLFLGAIYTTLDLEADAGARDACGSCDACQRACPTDAFPAPYRLDARRCISYLTIEHAGPIPHEFRPGIGNRIYGCDDCLAVCPWNKFAASAAANRAFLPRAELAAPALADLLALSDADFRSVFAGSPIKRIGRDRMVRNCLIAAGNSGVAALADPVTRLLDDPSPVVRGAAVWALARLNAERARAEKAARLSFETDAGVLEEWAVL

SEQ ID NO: 81103 - protein, 349 aa, Sphingomonas parapaucimobilis
  REGION 1..349: note = tr|A0A0A1W6S3|A0A0A1W6S3_9SPHN Epoxyqueuosine reductase OS=Sphingomonas parapaucimobilis NBRC 15100; OX = 1219049 GN=queG PE=3 SV=1
MAQDKLETRIKAKATELGFAAIGITHADAAPKTVERLHQWLDEGRHGSMIWMADRAHQRQSPASLWPEVKSILSLGVSYAPAEDPMRLADQGRIGRISVYAQGADYHDVVKRQLKALGRWLAQEAGCDLKVFVDTAPVMEKPLAEAAGLGWQGKHTNLVSREHGSWLFLGAIYTTLELEPDAVARDSCGRCDACQRACPTDAFPAPYQLDARRCISYLTIEHAGPIPEEFRVAMGNRIYGCDDCLAVCPWNKFAAAAQANMAFHPRAELTAPELGDLLSLDDAGFRQVFSGSPIKRIGRNRMVRNAAIAAGNSGAVELVPVLRGLLGDDDPVVVEAVEWALGQLGGSDA

SEQ ID NO: 81104 - protein, 347 aa, Sphingomonas paucimobilis
  REGION 1..347: note = tr|A0A031JI13|A0A031JI13_SPHPI Epoxyqueuosine reductase OS=Sphingomonas paucimobilis OX=13689 GN=queG; PE = 3 SV=1
METFEQRLKAEALRLGFAACAIARAGAAPEAGRRLREWLDAGRHGDMLWMEERAEQRASPAGLWPDVRSVIMLGMSYAPGRDPLALAEAGGRGRISVYAQGRDYHDIVKKGLKALARWLVEQQQGALKVFVDTAPVMEKPLAQAAGLGWQGKHSNLVSRAHGSWLFLGAIYSEIALEPDAPERDHCGSCAACQAACPTGAFPAPYVVDARRCISYLTIEHKGPIPDALRAGIGNRIYGCDDCLAVCPWNKFADRAAANRAFVGRAELAAPSLADLLDLDDAAFREVFSGSPIKRIGRGRMVRNAAIAAGNSGDKDLLNRLRPLLDDADPVVAEAAAWAVERLTAPPA

SEQ ID NO: 81105 - protein, 353 aa, Sphingomonas paucimobilis
  REGION 1..353: note = tr|A0A0C9MMU5|A0A0C9MMU5_SPHPI Epoxyqueuosine reductase OS=Sphingomonas paucimobilis NBRC 13935; OX = 1219050 GN=queG PE=3 SV=1
MAQDKLETRIKAKAAELGFAAIGITHADAAPKTVERLHQWLAEGRHGSMIWMADRAHQRQSPASLWPEVRSVISLGVSYAPAEDPMRLAEHKRIGRISVYAQGADYHDVVKRQLKALGRWLAQEAGCDLKVFVDTAPVMEKPLAEAAGLGWQGKHTNLVSREHGSWLFLGAIYTTLELEPDAVARDTCGRCDACQRACPTDAFPAPYQLDARRCISYLTIEHAGPIPEEFRVAIGNRIYGCDDCLAVCPWNKFAAAAQANMAFHPRAELTAPELGDLLSLDDAEFRQVFSGSPIKRIGRNRMVRNAAIAAGNSGAAELVPVLRGLLGDADPVVVEAAEWALGRLNAQPSSWRV

SEQ ID NO: 81106 - protein, 372 aa, unidentified
  source 1..372: note = Sphingomonas pokkalii
  REGION 1..372: note = tr|A0A2U0SBE6|A0A2U0SBE6_9SPHN Epoxyqueuosine reductase OS=Sphingomonas pokkalii OX=2175090 GN=queG PE=3; SV = 1
MRQDKPIEARLKAKAAEIGFAACGIADADAAPRTAERLRAWLDDGAHGDMLWMEERAEQRGSPRGLWPDVRSVIALGMSYAPAADPLALAHEGEVGRISVYAQGADYHDVVKRRLKELARWLVEAAPGADVKVFVDTAPVMEKPLSEAAGLGWQGKHTNLVSRSHGSWLFLGAIYTTLALSPDGPGRGGCGSCDACQTVCPTDAFPAPYRIDARRCISYLTIENKGPIPREFRAGIGNRIYGCDDCLAVCPWNKFAAAAQANLAFHPRAELTVPYLADLLALDDASFRQVFAGSPIKRIGRDRMLRNCLIAAGNSGSAALVARVATLLDDPAGVVRGAAVWALSQLDPARWAAERAGRMVGESDPDVLAEWC

SEQ ID NO: 81107 - protein, 355 aa, Sphingomonas rubra
  REGION 1..355: note = tr|A0A1I5U2S7|A0A1I5U2S7_9SPHN Epoxyqueuosine reductase OS=Sphingomonas rubra OX=634430 GN=queG PE=3 SV=1
MQHGKLQDRIRAKAAELGFAACGFADADAAPQAGERLRRWLADGRHGSMIWMEERAHHRVGPAALWPAVRSVISLGMSYAPKCDPLALADEGGIGRISVYAQGADYHDVMKRALKALGRWLAQEAGCDLKVFVDTAPVMEKPLAEAAGVGWQGKHTNLVSRADGSWLFLGAIYTTLELDADMASRDACGSCDACQRACPTDAFPAPYQLDARRCISYLTIEHAGPIPAEFRAAIGNRIYGCDDCLAVCPWNKFAASAAANLAFAPRAEMVAPRLADLLALDDAGFRQVFAGSPIKRIGRDRMVRNAAIAAGNSGEAALVAALRPLLDDPSPVVAEAAAWALDRLGSAAADGKGQG

SEQ ID NO: 81108 - protein, 349 aa, Sphingomonas sanguinis
  REGION 1..349: note = tr|A0A147JDH6|A0A147JDH6_9SPHN Epoxyqueuosine reductase OS=Sphingomonas sanguinis OX=33051 GN=queG PE=3; SV = 1
MAQDKLETRIKAKAAELGFAAIGITHADAAPKTVERLHHWLAEGRHGSMIWMADRAHQRQSPTSLWPEVKSVISLGVSYAPAEDPMRLADQGRIGRISVYAQGADYHDVVKRQLKALGRWLAQEANCDLKVFVDTAPVMEKPLAEAAGLGWQGKHTNLVSRDHGSWLFLGAIYTTLELEPDAVARDTCGRCDACQRACPTDAFPAPYQLDARRCISYLTIEHAGPIPEEFRVAMGNRIYGCDDCLAVCPWNKFAAAAQANMAFHPRAELTAPELGDLLSLDDAGFRQVFSGSPIKRIGRNRMVRNAAIAAGNSGAAELVPVLQGLLGDADPVVVEAAEWALGRLGEISA

SEQ ID NO: 81109 - protein, 349 aa, Sphingomonas sanguinis
  REGION 1..349: note = tr|A0A147HS23|A0A147HS23_9SPHN Epoxyqueuosine reductase OS=Sphingomonas sanguinis OX=33051 GN=queG PE=3; SV = 1
MAQDKLETRIKAKAAELGFAAIGITHADAAPKTVERLHQWLAEGRHGSMIWMADRAHQRQSPASLWPEVKSIISLGVSYAPAEDPMRLADQGRIGRISVYAQGADYHDVVKRQLKALGRWLAQEAKCDLKVFVDTAPVMEKPLAEAAGLGWQGKHTNLVSRDHGSWLFLGAIYTTLELEPDAVARDTCGRCDACQRTCPTDAFPAPYQLDARRCISYLTIEHAGPIPEEFRVAIGNRIYGCDDCLAVCPWNKFAAAAQANMAFHPRAELTAPELGDLLSLDDADFRQVFSGSPIKRIGRNRMVRNAAIAAGNSGAAALVPVLQGLLGDADPVVVEAAEWALGRLGEVSA

SEQ ID NO: 81110 - protein, 373 aa, Sphingomonas sanxanigenens
  REGION 1..373: note = tr|A0A2W5A6T7|A0A2W5A6T7_9SPHN Epoxyqueuosine reductase OS=Sphingomonas sanxanigenens OX=397260 GN=queG; PE = 3 SV=1
MHSDKAALKKALKAEAERLGFVACGVARAARRWLPGDRLMTWIGEGMHGQMTWMEDRAEQRAAPAALWPEARSVIALGMSYAPAEDPMRLAAEPQIGRISVYAQGGDYHDVVKRNLKALARWLVAEAGGDVKVFVDTAPVMEKPVSQLAGLGWQGKHSNLVSRDHGSWLFLGAIMTTQEIAPDDVAEDRCGSCDACRQACPTDAFPAPYRLDARRCISYLTIEHKGPIPHEYRAAIGNHIYGCDDCLAACPWNKFAASAAANKAFAPRAELAAPDLADLLALDDPGFRRVFAGSPIKRIGRDRMVRNCLIAAGNSGDDALVKSVERLLDDPAPAVRGAAVWALARLDPQGWPKARDRHLPDESDPDVRAEWLL

SEQ ID NO: 81111 - protein, 399 aa, Sphingomonas sanxanigenens
  REGION 1..399: note = tr|W0AGC3|W0AGC3_9SPHN Epoxyqueuosine reductase; OS = Sphingomonas sanxanigenens DSM 19645 = NX02 OX=1123269; GN = queG PE=3 SV=1
MTNVILYAPGFLYWAAVVARSDTGANSGLVDRLKAEAEALGFVACGIAPADAIPEAAPRLRQWLAEGAHGSMGWMEERSHQRGAAPALWPEVRSVVMLGMSYAPPENPLRLAGERDVGRISVYAQGADYHDVVKRALKHLARWLVAEAGGDVKVFVDTAPVMEKPYAAAAGLGWQGKHTNLVSRAEGSWLLLGAIMTTLDLEPDLPSGDRCGSCDACQRACPTEAFPSPYRLDARRCISYLTIENKGPIPHAFRAAIGNRIYGCDDCLAVCPWNKFAAAAAANKAFAPRAELAVPQIADLLALDDAGFRQVFAGSPIKRIGRDRMVRNCLIAAGNSGDAGFVAQVAALLDDPAPVVRGAAVWALERLDVARWTAERSARALAEPDEMVQAEWRRPFAPG

SEQ ID NO: 81112 - protein, 347 aa, Sphingomonas sp.
  REGION 1..347: note = tr|A0A2E1Z1M1|A0A2E1Z1M1_SPHSX Epoxyqueuosine reductase OS=Sphingomonas sp. OX=28214 GN=queG PE=3 SV=1
MSEDKSLESRIFEKAAELGFVACGFAPADAAPRTAERLRQWLAEGRHGDMIWMENRAHHRESPKGLWPEVRSVIALGMSYAPGYDPLALEDAGERGRISVYAQGRDYHDIVKKALKALARWLVENAGGELKVFVDTAPVMEKPLSEAAGLGWQGKHTNLVSRDHGSWLFLGAIYTTLDLAPTGAGRDSCGSCDACQTACPTDAFPAPYQLDARRCISYLTIELHGPIPQEFRESIGNRIYGCDDCLAACPWNKFAQAAAANRAFLPRGELTAPRLADLLALDDVSFREVFSGSPIKRIGRDRMVRNCLIAAGNSGDASLIAPVRALIDDPDPVVQEAARWALERLPA

SEQ ID NO: 81113 - protein, 381 aa, Sphingomonas sp.
  REGION 1..381: note = tr|A0A5D9C7N8|A0A5D9C7N8_9SPHN Epoxyqueuosine reductase OS=Sphingomonas sp. ZX OX=2606412 GN=queG PE=3; SV = 1
MAPEDPTELREAIRAEATRLGFVACGFAAADAAPESAARLDEWLESGAHGSMEWMEARKGERARPQGLWPASRSLIMLGMSYAPREDPMRLATEPGVGRISVYAQGGDYHDVVKKALKALARWLVDRAGGELKVFVDTAPVMEKPLSAAAGLGWQGKHSNLVSREHGSWLFLGAIMTSLDLPPDLPEPDRCGSCDACQRACPTDAFPHPYVVDARRCISYLTIEHKGPIPADLRTGIGNHIYGCDDCLAACPWNKFAQAGAANRAFAARAELAAPELVDLLALSAADFRQIFAGSPIKRIGRDRMVRNAAIAAGNSALPSLTAPVTALLDDPDPAVRGSAIWALSRLDPARFAAERTARMSAEQDAGVLAEWGVAGSDPRR

SEQ ID NO: 81114 - protein, 355 aa, unidentified
  source 1..355: note = Sphingomonas spermidinifaciens
  REGION 1..355: note = tr|A0A2A4B9H0|A0A2A4B9H0_9SPHN Epoxyqueuosine reductase OS=Sphingomonas spermidinifaciens OX=1141889; GN = queG PE=3 SV=1
MHKSIEDRIRDKAAELGFAACGFARADAAPRAGERLRAWLADGFHGSMIWMEGRADQRASPAGLWPEVRSVIALGMSYAPAVDPLALEGVGDRGRISVYAQGADYHDVVKKALKALGRWLVGEAGGDLKVFVDTAPVMEKPLAEAAGLGWQGKHTNLVSREHGSWLFLGAIYTTLELHGDGAGRDRCGSCDACQRACPTDAFPSPYRLDARRCISYWTIEHAGPVPGDIADAMGNRIYGCDDCLAVCPWNKFAAAAAANRAFWPRAELVTPSLAELLALDDAGFRQVFAGSPIKRIGRARMVRNALIAAGNGGDVSLLPAVTALLWDEDETVRDAAARAVARLEAIVQSAENAIS

SEQ ID NO: 81115 - protein, 349 aa, unidentified
  source 1..349: note = Sphingomonas taxi
  REGION 1..349: note = tr|A0A097EGT3|A0A097EGT3_9SPHN Epoxyqueuosine reductase OS=Sphingomonas taxi OX=1549858 GN=queG PE=3 SV=1
MSQHKQQAEIEHRIKAKAAELGFVACGFARADAAPRTAGRLREWLDEGRHGDMIWMEERAHHRGSPTGLWPEVRSIVALGMSYAPAADPLRLAGEGERGRISVYAQGGDYHDVVKKALKALGRWLAQEAGCDLKVFVDTAPVMEKPLSEAAGLGWQGKHTNLVSRAHGSWLFLGAIYTTLDLTPDVPGRDSCGSCDACQRACPTDAFPTPYRLDARRCISYLTIEHAGPIPHEFRAAIGNRIYGCDDCLAVCPWNKFAATAAANMAFQPRAELTVPALADLLALDDADFRQVFAGSPIKRIGRNRMVRNAAIAAGNSGAPALLPVLERLRDDADPVVAEAAGWAVDRLR

SEQ ID NO: 81116 - protein, 212 aa, unidentified
  source 1..212: note = Sphingomonas taxi
  REGION 1..212: note = tr|A0A2W4YM69|A0A2W4YM69_9SPHN tRNA epoxyqueuosine(34) reductase QueG (Fragment); OS = Sphingomonas taxi OX=1549858 GN=queG PE=4 SV=1
MPPNADIDTLTARIREESASLGYTRFGISGVELGDDESHLRRWLDAGMHGTMQWMAAHGDKRSRPDELIPGTVSVISVGLDYGREHEEAWATLAEGERAYVARYALGRDYHKLMRQRLQKLAERIEAIVGPIGHRVFVDSAPVLERALARNAGLGWIGKHTCLIDKDGGSWFFLGEIYVDLALPVATPAIDHCGTCKRCIDICPTQAIIAPY

SEQ ID NO: 81117 - protein, 381 aa, Sphingomonas trueperi
  REGION 1..381: note = tr|A0A543LRB2|A0A543LRB2_9SPHN Epoxyqueuosine reductase OS=Sphingomonas trueperi OX=53317 GN=queG PE=3; SV = 1
MRVRQDKSIEERLKAKAAEIGFAACGIAHADAAPRTAERLRQWLDDGAHGEMLWMEERAEQRGSPRGLWPEVRSVIALGMSYAPATDPLALASEGEIGRISVYAQGADYHDVVKRRLKELARWLVAEAPGADVKVFVDTAPVMEKPLSEAAGLGWQGKHTNLVSRSHGSWLFLGAIYTTLDLASAGPSGGGCGSCDACQTACPTGAFPAPYRIDARRCVSYLTIENKGPIPRDLRQGIGNRIYGCDDCLAVCPWNKFAAAAQANLAFHPRAELTVPYLADLLALDDAGFREVFAGSPIKRIGRDRMVRNCLIAAGNSGSDRLVAPVLALLDDPAPVVRGAAAWALERLDPGRWYEERRERLVAEKDSSVLGEWASMASETG

SEQ ID NO: 81118 - protein, 352 aa, unidentified
  source 1..352: note = Sphingomonas turrisvirgatae
  REGION 1..352: note = tr|A0A1E3LVM1|A0A1E3LVM1_9SPHN Epoxyqueuosine reductase OS=Sphingomonas turrisvirgatae OX=1888892; GN = queG PE=3 SV=1
MHSGKPLEAQIREKAAELGFVACGIARADAAPLAGERLRQWLAQGRHGDMIWMEERAHHREAPAGLWPDVRSVIALGMSYAPASDPLALADAGEHGRISVYAQGGDYHDVVKKALKALGRWLAQAAGCDLKVFVDTAPVMEKPLAEAAGLGWQGKHTNLVSREHGSWLFLGAIYTTLDLVPDRPGRDLCGSCDACQRACPTDAFPAPYRLDARRCISYLTIEHSGPIPHEFREGIGNRIYGCDDCLAVCPWNKFAQAAAANLAFAPRAELTAPELTDLLALDDAGFRQVFSGSPIKRIGRNRIVRNCLIAAGNSGSPALLGPVRALLADPDPVVAEAAAWALAKLSAANARP

SEQ ID NO: 81119 - protein, 382 aa, Sphingomonas wittichii
  REGION 1..382: note = tr|A0A1X9UDM8|A0A1X9UDM8_SPHSD Epoxyqueuosine reductase OS=Sphingomonas wittichii (strain DC-6 / KACC 16600) OX=1283312 GN=queG PE=3 SV=1
MTDDPISLREAIRDEALKLGFATCGFARADAAPESAARLDQWLATGAHGSMEWMEARKGERARPQGLWPEARSLIMLGMSYAPREDPMRLADAPGIGRISVYAQGTDYHDVVKKALKHLARWLVDRAGGALKVFVDTAPVMEKPLSAAAGIGWQGKHSNLVSREHGSWLFLGAIMTSLDLPPDDPHDDRCGSCSACQAACPTDAFPRPYVVDARRCISYLTIEHKGPIPAEFRAPIGNRIYGCDDCLAVCPWNKFAEAAAANRAFAARAELAAPELEDLLGLDDAGFRAVFAGSPIKRIGRDRMLRNALVAAGNSGLAALLPPVVALLDDPAPVVRGAAVWALGRLDPAGFAAERAARLACEKDEAVAAEWDAEIAAAPAAR

SEQ ID NO: 81120 - protein, 382 aa, Sphingomonas wittichii; identical to SEQ ID NO: 81119
  REGION 1..382: note = tr|A5VAD5|A5VAD5_SPHWW Epoxyqueuosine reductase; OS = Sphingomonas wittichii (strain RW1 / DSM 6014 / JCM 10273) OX=392499 GN=queG PE=3 SV=1

SEQ ID NO: 81121 - protein, 349 aa, Sphingomonas yabuuchiae
  REGION 1..349: note = tr|A0A147IMV5|A0A147IMV5_9SPHN Epoxyqueuosine reductase OS=Sphingomonas yabuuchiae OX=172044 GN=queG; PE = 3 SV=1
MAQDKLETRIKAKAAELGFAAIGITHADAAPKTVERLHQWLAEGRHGSMIWMADRAHQRQSPSSLWPEVKSIISLGVSYAPAEDPMRLADQGRIGRISVYAQGADYHDVVKRQLKALGRWLAQEAKCDLKVFVDTAPVMEKPLAEAAGLGWQGKHTNLVSREHGSWLFLGAIYTTLELEPDAVARDTCGRCDACQRACPTDAFPAPYQLDARRCISYLTIEHAGPIPAEFRVAMGNRIYGCDDCLAVCPWNKFAAAAQANMAFHPRAELTAPELGDLLSLDDAGFRQVFSGSPIKRIGRNRMVRNAAIAAGNSGAAELVPVLRGLLGDPDPVVVEAVEWALGRLGGSVA

SEQ ID NO: 81122 - protein, 350 aa, Sphingopyxis alaskensis
  REGION 1..350: note = tr|Q1GP49|Q1GP49_SPHAL Epoxyqueuosine reductase; OS = Sphingopyxis alaskensis (strain DSM 13593 / LMG 18877 / RB2256) OX=317655 GN=queG PE=3 SV=1
MVAEALPSLETRLEAAARAQGFVAFGIAAADAAPQTAARLRQWLADGHHGGMIWMESRAEQRGSPRGLWPAVRSVVALGMSYAPALDPLALADQPDRGRISVYAQGADYHDVVKKALKATARWLVAEAPDAEVKVFVDTAPVMEKPLAAAAGLGWQGRHSNLVSREHGSWLFLGAIYTTLDLAPSRAGRDRCGSCTACQQACPTDAFPAPYRLDARRCISYLTIEHDGPIPDEFRRAIGNRIYGCDDCLAVCPWNKFAGAAHRHRAFLPRAELAAPSLADLLALDDAGFRQVFAGSPIKRIGRGRMVRNAAIAAGNSGDARFVPALQRLADDESPMVADAARWALGELGS

SEQ ID NO: 81123 - protein, 350 aa, Sphingopyxis bauzanensis
  REGION 1..350: note = tr|A0A246K0V7|A0A246K0V7_9SPHN Epoxyqueuosine reductase OS=Sphingopyxis bauzanensis OX=651663 GN=queG; PE = 3 SV=1
MVAEALSVLEDRLEAVARAHGFVAFGIADAGSAPQTAERLNQWLAEGRHGDMIWMESRAAQRGSPQGLWPEVRSVIALGMSYTPAHDPLVLAEHPDRGRISVYAQGGDYHDVVKRALKAVARWLVAEAPGAEVKVFVDTAPVMEKPLSAAAGLGWQGKHSNLVSREHGSWLFLGAIYTTLELVPSNPGRDRCGSCTACQDACPTQAFPAPYQVDARRCISYLTIEHDGAIPHELRRGIGNRVYGCDDCLAVCPWNKFAETAHAHRAFLPRAELVAPSLGDLLALDDAAFRQVFAGSPIKRIGRGRMVRNAAIAAGNSGDAGFRPVLERLTEDETPMVAEAARWALDELAS

SEQ ID NO: 81124 - protein, 350 aa, unidentified
  source 1..350: note = Sphingopyxis flava
  REGION 1..350: note = tr|A0A1T5B681|A0A1T5B681_9SPHN Epoxyqueuosine reductase OS=Sphingopyxis flava OX=1507287 GN=queG PE=3; SV = 1
MVAEALPSLEQRLEAFARAQGFAAFGITLADATCKSAERLNQWLAEGRHGGMIWMESRAGQRGSPKGLWPEVRSVIALGMSYAPGGDPLALAGHPDCGRISVYAQGSDYHDTVKKALKAVARWLVAEAPGADVKVFVDTAPVMEKPLAAAAGLGWQGKHTNLVSRDHGSWLFLGAIYTTLELTPEKPGRDRCGSCHACQDVCPTQAFPAPYQLDARRCISYLTIEHDGPIPVELRRAIGNHVYGCDDCLAVCPWNKFAETAHCHRAFLPRAELAAPALADLLELDDAGFRQVFAGSPIKRIGRNRMVRNAAIAAGNSGNPRLRARLAALVGDDSEMVADAAAWALAQLAE

SEQ ID NO: 81125 - protein, 354 aa, unidentified
  source 1..354: note = Sphingopyxis fribergensis
  REGION 1..354: note = tr|A0A0A7PSI7|A0A0A7PSI7_9SPHN Epoxyqueuosine reductase OS=Sphingopyxis fribergensis OX=1515612 GN=queG; PE = 3 SV=1
MVAEALPLETPSLEDRLEAVARAHGFAAFGIAQADAAPQTAARLNQWLAEGRHGDMIWMESRAAQRGSPKGLWPEVKSVIALGMSYAPAHDPLALAEHPERGRISVYAQGGDYHDVVKKALKAVARWLVAEVKDAEVKVFVDTAPVMEKPLSAAAGLGWQGKHTNLVSRDHGSWLFLGAIYTTLDLAPSKPGRDTCGSCSACQDACPTQAFPAPYRLDARRCISYLTIEHDGPIPVDLRRGIGNRVYGCDDCLAVCPWNKFADTAHAHRAFLPRAELVAPSISDLLALDDAGFRQVFAGSPIKRIGRGRMVRNAAIAAGNSGDARFVPVLTQLAEDELPMVADAARWALAELAS

SEQ ID NO: 81126 - protein, 354 aa, Sphingopyxis granuli
  REGION 1..354: note = tr|A0A0X8QZR1|A0A0X8QZR1_9SPHN Epoxyqueuosine reductase OS=Sphingopyxis granuli OX=267128 GN=queG PE=3; SV = 1
MVSDALPTPEGRLEDRLEAVARAHGFAAFGIADAGAAPQTAARLNAWLADGCHGDMIWMEGRAAQRGSPRGLWPEVRSVIALGMNYAPAADPLALAAHPDRGRISVYAQGTDYHDVVKKALKAVARWLVAEVPGAEVKVFVDTAPVMEKPLAAAAGLGWQGKHSNLVSRDHGSWLFLGAIYTTLALVPGAPGRDRCGRCRACQDACPTQAFPAPYRVDARRCISYLTIEHAGPIPVALRRAIGNRVYGCDDCLAVCPWNKFADTAHRHRAFLPRAELAAPSLADLLALDDAGFRQVFAGSPIKRIGRDRMVRNAAIAAGNSGDPRFRPRLTELTGDASPVVAEAAAWALAALAS

SEQ ID NO: 81127 - protein, 350 aa, unidentified
  source 1..350: note = Sphingopyxis indica
  REGION 1..350: note = tr|A0A239IID4|A0A239IID4_9SPHN Epoxyqueuosine reductase OS=Sphingopyxis indica OX=436663 GN=queG PE=3; SV = 1
MVAKALPPLEDRLEAVARAHGFAAFGIARADAAPETAARLDAWLAEGCHGEMIWMESRAEQRGSPKGLWPEVRSVIALGMSYAPAEDPLALADHRTRGRISVYAQGADYHDVVKKALKAVARWLVAEAPGAEVKVFVDTAPVMEKPLAAAAGLGWQGKHTNMVSRDHGSWLFLGAIYTTLDLVPSAPGRDHCGSCRACQDACPTQAFPAPYRLDARRCISYLTIEHAGPIPEEFRHAIGNRIYGCDDCLAVCPWNKFADTAARHRAFLPRGELAAPALADLLALDDAGFRQVFAGSPIKRIGRDRMVRNAAIAAGNSGDPRFRTRLAELTRDASPAVADAAAWALAELAE

SEQ ID NO: 81128 - protein, 354 aa, unidentified
  source 1..354: note = Sphingopyxis lindanitolerans
  REGION 1..354: note = tr|A0A2S8B961|A0A2S8B961_9SPHN Epoxyqueuosine reductase OS=Sphingopyxis lindanitolerans OX=2054227; GN = queG PE=3 SV=1
MVAEALPPVHDGIEPRLEAVARDHGFAAFGIARADAAPETAARLTRWLAEGCHGDMIWMESRAGQRGSPQGLWPEVRSVIALGMSYAPEQDPLALAEVPDRGRISVYAQGADYHDVVKRALKAVARWLVAEAPGAEVKVFVDTAPVMEKPLAAAAGLGWQGKHSNMVSREHGSWLFLGAIYTTLDLVPSAAARDRCGSCTACQDACPTQAFPAPYRVDARRCISYLTIEHDGPIPVELRRAMGNRIYGCDDCLAVCPWNKFADTAARHRAFLPRAELAAPSLADLLALDDAGFRQVFAGSPIKRIGRNRMVRNAAVAAGNSGDPRFRARLEELLGDESPMVADAAAWALDELTS

SEQ ID NO: 81129 - protein, 350 aa, Sphingopyxis macrogoltabida
  REGION 1..350: note = tr|A0A0P0DZX6|A0A0P0DZX6_SPHMC Epoxyqueuosine reductase OS=Sphingopyxis macrogoltabida OX=33050 GN=queG; PE = 3 SV=1
MVAEALPSLEQRLADVARAHGFVAFGIARADAAPQTAARLNQWLADGCHGSMIWMESRAAQRGSPTGLWPEVRSVIALGMSYAPAHDPLALEGVPDRGRISVYAQGGDYHDVVKKALKAVARWLVAEVKDAEVKVFVDTAPVMEKPLSAAAGLGWQGKHTNLVSRDHGSWLFLGAIYTTLDLAPSTPGRDTCGSCSACQDACPTNAFPAPYRLDARRCVSYLTIEHDGPIPEELRRGIGNRIYGCDDCLAACPWNKFAETAHAHRAFLPRAELVAPALADLLALDDAGFRQVFAGSPIKRIGRNRMVRNAAIAAGNSGDPGFRGILQQLTSDESPMVADAAAWALAELAS

SEQ ID NO: 81130 - protein, 350 aa, Sphingopyxis macrogoltabida
  REGION 1..350: note = tr|A0A0N7GT62|A0A0N7GT62_SPHMC Epoxyqueuosine reductase OS=Sphingopyxis macrogoltabida OX=33050 GN=queG; PE = 3 SV=1
MVAEALPSLEQRLADVARAHGFVAFGIARADAAPQTAARLNAWLAEGCHGGMIWMESRAAQRGSPTGLWPEVRSVIALGMSYAPAHDPLALEGVPDRGRISVYAQGGDYHDVVKRALKAVARWLVAEVKDAEVKVFVDTAPVMEKPLSAAAGLGWQGKHTNLVSRDHGSWLFLGAIYTTLDLAPSMPGRDTCGSCSACQDACPTDAFPAPYRLDARRCVSYLTIEHDGPIPEELRRGIGNRIYGCDDCLAACPWNKFAETAHAHRAFLPRAELVAPALADLLALDDAGFRQVFAGSPIKRIGRNRMVRNAAIAAGNSGDPGFREILHRLANDESPMVADAAAWALAELAS

SEQ ID NO: 81131 - protein, 351 aa, Sphingopyxis sp.
  REGION 1..351: note = tr|A0A2G2CVJ1|A0A2G2CVJ1_9SPHN Epoxyqueuosine reductase OS=Sphingopyxis sp. OX=1908224 GN=queG PE=3 SV=1
MPDDKLRLAKALEIKAREEGFSAVGIAPSSLAPETRHRLQQWLDQGRQGDMIWMANRADERSDPQTLWPDVQTVIMLGMSYAPATDPFALEDVADHGRISVYAQGKDYHDVVKGALKRTAGWLVGQAKCEVKVFVDTAPVMEKPLAEAAGLGWQGKHTNVVSREHGSWLFLGAIYTTLALEPSTPGSDRCGSCSACQDICPTNAFPAPYQLDARACISYLTIEHKGPIPHQYRKAIGNHIYGCDDCLAVCPWNKFAQAGRANKAFLPRAELAAPALADLLALDDAGFRKVFSGSPIKRSGRNRIVRNALIAAGNSSDRALIEPVQALLNDADEAVREAAGWALDQLGSASP

SEQ ID NO: 81132 - protein, 350 aa, Sphingopyxis sp.
  REGION 1..350: note = tr|A0A1H6FZA5|A0A1H6FZA5_9SPHN Epoxyqueuosine reductase OS=Sphingopyxis sp. YR583 OX=1881047 GN=queG; PE = 3 SV=1
MVAEALPSLEERLEAVAREHGFAAFGIARADAAPQTAARLNQWLAEGRHGDMIWMESRAEQRGSPRGLWPEVQSVIALGMSYAPALDPLALAEHRTRGRISVYAQGGDYHDVVKKALKAVARWLVAEVRDAEVKVFVDTAPVMEKPLSAAAGLGWQGKHTNLVSRDHGSWLFLGAIYTTLELAPSTPGRDTCGSCSACQDACPTQAFPAPYRLDARRCISYLTIEHNGPIPVALRRGIGNRIYGCDDCLAACPWNKFADTAHTHRAFLPRAELAAPSIADLLDLDDAGFRQVFAGSPIKRIGRGRMARNAAMAAGNSGDRRFVPALERLAKDESPMVADAALWALAELAS

SEQ ID NO: 81133 - protein, 350 aa, Sphingopyxis terrae
  REGION 1..350: note = tr|A0A142VXQ8|A0A142VXQ8_9SPHN Epoxyqueuosine reductase OS=Sphingopyxis terrae subsp. terrae NBRC 15098; OX = 1219058 GN=queG PE=3 SV=1
MLSNALPPIEERLAATARAHGFAAFGIARADAAPQTAARLAQWLADGCHGDMIWMESRAEQRGSPQGLWPEVRSVIALGMSYAPGTDPLALAGASDRGRISVYAQGADYHDVVKKALKHVARWLVAEAPGAEVKVFVDTAPVMEKPLAAAAGLGWQGKHSNMVSREHGSWLFLGAIYTTLDLVPSVPGRDRCGSCTACQQACPTAAFPAPYRVDARRCISYLTIEHDGPIPTEFRRAIGNRVYGCDDCLAVCPWNKFADTAARHQAFLPRGELAAPALADLLALDDTGFRQVFSGSPIKRIGRGRMVRNAAIAAGNSGDRSLRPRLVALASDTSPMVADAARWALEQLAD

SEQ ID NO: 81134 - protein, 350 aa, Sphingopyxis terrae
  REGION 1..350: note = tr|A0A1Y6FUR9|A0A1Y6FUR9_9SPHN Epoxyqueuosine reductase OS=Sphingopyxis terrae subsp. ummariensis; OX = 429001 GN=queG PE=3 SV=1
MLSNALPPIEERLAATARAHGFAAFGIARADAAPQTAARLRQWLADGCHGDMIWMESRAEQRGSPQGLWPEVRSVIAFGMSYAPGTDPLALAGAPDRGRISVYAQGADYHDIVKKALKHVARWLVAEAPGAEVKVFVDTAPVMEKPLAAAAGLGWQGKHSNMVSREHGSWLFLGAIYTTLDLAPSVPGQDRCGSCTACQQACPTAAFPAPYRVDARRCISYLTIEHDGPIPTEFRRAIGNRVYGCDDCLAVCPWNKFADTAARHRAFLPRGELAAPALADLLALDDVGFRQVFSGSPIKRIGRGRMVRNAAIAAGNSGDRSLRPRLMVLASDESPMVADAARWALEQLAE

SEQ ID NO: 81135 - protein, 355 aa, Sphingopyxis witflariensis
  REGION 1..355: note = tr|A0A2D0AMR3|A0A2D0AMR3_9SPHN Epoxyqueuosine reductase OS=Sphingopyxis witflariensis OX=173675 GN=queG; PE = 3 SV=1
MVANPLPSPETSSLEQRLADVARTHGFVAFGIADADAAPQTAARLGEWLADGCHGDMIWMESRAAQRGSPKGLWPEVRSVIALGMSYAPTHDPLALAEHATHGRISVYAQGADYHDVVKKALKAVARWLVAEVKDAQVKVFVDTAPVMEKPLSEAAGLGWQGKHSNLVSRDHGSWLFLGAIYTTLDLASSQPGRDRCGSCSACQDACPTQAFPAPYRVDARRCISYLTIEHDGPIPVEFRRAIGNRIYGCDDCLAVCPWNKFADTAARHRAFLPRAELVAPSLGDLLALDDTEFRAIFSGSPIKRIGRNRMVRNAAIAAGNSGDARFLPVLERLAADESDMVADAARWALAELAL

SEQ ID NO: 81136 - protein, 378 aa, unidentified
  source 1..378: note = Sphingorhabdus contaminans
  REGION 1..378: note = tr|A0A553WDA7|A0A553WDA7_9SPHN Epoxyqueuosine reductase OS=Sphingorhabdus contaminans OX=1343899 GN=queG; PE = 3 SV=1
MVNALKAKAASEGFVAIGIAPGHLAPAAGARLRQWLDDGCHGEMLWMENRADQRANPDILWPDVKSVIMLGMSYAPAADPMALADCGDRARISVYAQGRDYHDLVKGALKRVAGWLAHEADVGVKVFVDTAPVMEKALAEAAGLGWQGKHSNVVSRDHGSWLFLGAIYTTAQLEPDKAGTDRCGSCRACQDICPTNAFPAPYKVDARRCISYLTIEHKGPVDRTLRPLMGNHIYGCDDCLAVCPWNKFASSAAAHKAFLPRAELVAPRLSDLLTLDDTAFRALFSGSPIKRIGRNRFVRNVLIAAGNSGDTMLLPQIIPLVNDPDDGVRGSAIWALGRLAPTEFEDMKIRHAPLEMSPDVRAEWDFAPDEGSVPALLA

SEQ ID NO: 81137 - protein, 374 aa, unidentified
  source 1..374: note = Sphingorhabdus marina
  REGION 1..374: note = tr|A0A1N6CZ81|A0A1N6CZ81_9SPHN Epoxyqueuosine reductase OS=Sphingorhabdus marina DSM 22363 OX=1123272; GN = queG PE=3 SV=1
MANDKLRLTQDLERRAREEGFAAFGIAPADLAPEAGKRLQTWLAEGCHGDMIWMADRAGQRASPTALWPDTRSVIMLGMSYAPDRDPFALEHVRDHGRISVYAQGKDYHDIVKRALKRLARWLVDRSNCEVKVFVDTAPVMEKPLAEAAGLGWQGKHTNLVSRDHGSWLFLGAIYTTLDLEHSLAGQDRCGSCSACQDICPTNAFPAPYKLDARACISYLTIENKGPIPIEFRTAIGNHIYGCDDCLAVCPWNKFASAAASQKAFLPRAELAAPALSDLLDMDDAGFRQIFSGSPIKRTGRNRMVRNALIAAGNSADKGLVRAVRKRLYDDEPVVRGAAVWALSQLDSSAFEEEKARHVDRESDAHVLEEWSRD

SEQ ID NO: 81138 - protein, 357 aa, unidentified
  source 1..357: note = Sphingorhabdus sp.
  REGION 1..357: note = tr|A0A5C6UMX2|A0A5C6UMX2_9SPHN Epoxyqueuosine reductase OS=Sphingorhabdus sp. D-2Q-5-6 OX=2601267; GN = queG PE=3 SV=1
MADRPPPGRDSPTSLEARIAAEARALGFAACGIARADAAPRSAARLNEWLAQGMHGDMIWMESRAAQRGSPTGLWPEARSVIALGMSYAPDGDPLALEAHPVRGRISVYARGKDYHDVVKKSLKSLARWIVAETGVDTDVKVFVDTAPVMEKPLAEAAGLGWQGKHSNLVSRSDGSWLFLGAIYTTLELAPATPGRDLCGSCDACQRACPTDAFPAPYRVDARRCISYLTIEHKGPIPIEFRKPIGNRIYGCDDCLAVCPWNKFADSAAANIAFAARAELAAPRLADLLALDDAGFREVFAGSPIKRIGRHRMVRNCAIAAGNSGDAALIPVLTSLCQDDDAAVAEAARWALQELVA

SEQ ID NO: 81139 - protein, 351 aa, unidentified
  source 1..351: note = Sphingorhabdus sp.
  REGION 1..351: note = tr|A0A2D3R9X7|A0A2D3R9X7_9SPHN Epoxyqueuosine reductase OS=Sphingorhabdus sp. YGSMI21 OX=2077182 GN=queG; PE = 3 SV=1
MPDDKLRLTKALENRAKDEGFAAVGIAPARLAPETGLRLQQWLDEGRQGDMLWMVNRADERSDPATLWPDVQTVVMLGMSYAPAVDPFALEPVSDHGRISVYAQGRDYHDVVKSALKRTARWLVEQAECEVKVFVDTAPVMEKPLAEAAGLGWQGKHTNVVSREHGSWLFLGAIYTTLDLEPSKPGRDSCGSCSACQDICPTGAFPAPYQLDARACISYLTIEHKGPIPHKYRKAIGNHIYGCDDCLAVCPWNKFAKAGAANKAFLPRAELAAPALVDILALDDAGFRQVFSGSPIKRTGRDRMVRNALIAAGNSGDTALIQPVQALLEDEDDVIREAAGWALDQLASAQP

SEQ ID NO: 81140 - protein, 361 aa, unidentified
  source 1..361: note = Sphingorhabdus wooponensis
  REGION 1..361: note = tr|A0A3R8S3P3|A0A3R8S3P3_9SPHN tRNA epoxyqueuosine(34) reductase QueG OS=Sphingorhabdus wooponensis OX=940136 GN=queG PE=4 SV=1
MAKSEGFVAFGIAPGHLAPAAGLRLQQWLKEGLHGDMLWMESRTDERANPDLLWPEVKSVIMLGMSYAPPQDPMALADQDMLARISVYAQGRDYHDVVKGALKRLAGWLAHEAGAGVKVFVDTAPVMEKALAQSAGLGWQGKHSNIVSREHGSWLFLGAIYTTAELDPALPEDDHCGSCHLCQDICPTNAFPAPYRLDARRCISYLTIEHKGSIDPELRPLMGNHIYGCDDCLAVCPWNKFAETAAAHKAFLPRAELVAPQIADLLTLDDAAFRKLFSGSPIKRIGRDRFVRNVLIAAGNGRDAALVPQIEVLLRDPAPVVRGAAIWALGRLSPEALAQRRAEYLPDEQDPSVCAEWDSAT

SEQ ID NO: 81141 - protein, 352 aa, unidentified
  source 1..352: note = Sphingosinicella ginsenosidimutans
  REGION 1..352: note = tr|A0A5C6TS57|A0A5C6TS57_9SPHN Epoxyqueuosine reductase OS=Sphingosinicella ginsenosidimutans OX=1176539; GN = queG PE=3 SV=1
MESKHRLREDLRRSAEELGFCAFGIARADAAPKAGERLRQWLAEGCHGDMVWMEETAVRRAAPRALWPDVRSVVALGMSYAPAADPLALADARDRGRISVYAQGADYHDLVKKALKALARRLIELAGGELKVFVDTAPVMEKPLAEAAGIGWQGKHTNLVSRADGSWLFLGALYTSLDLATDAPHAARCGSCTACLAACPTDAFPAPFRLDARRCISYLTIEHKGPIPEEFRAAIGNRIYGCDDCLAVCPWNRFADAARANRAFLPRAELAAPALADLLDLDDAGFRQVFAGSPIKRIGRNRIVRNAAIAAGNSGRPDLVPALRKLVGDPDPVVAEAAAWALARLSAPAAGG

SEQ ID NO: 81142 - protein, 385 aa, Sphingosinicella microcystinivorans
  REGION 1..385: note = tr|A0A495RPG3|A0A495RPG3_SPHMI Epoxyqueuosine reductase OS=Sphingosinicella microcystinivorans OX=335406; GN = queG PE=3 SV=1
MDTNKILKDLNAKAAALGFSAIGIAPADAAPAAGARLKTWLANGCHGDMLWMAEKADRRESPRALWSEVRSIIMLGMSYAPALDPLRHADHPEIGVISVYAQGQDYHDTIKARLKTLARWLLEAAGEGEVKVFVDTAPVMEKPFAAAAGIGWQGKHTNLVSREHGSWLFLGAIYTTLELTPDAPHADRCGSCDACQRACPTAAFTGPYSLDARRCISYLTIELKGPIPHEFRRAIGNRIYGCDDCLAVCPWNRFAKASAEAAFQPRTELTTPRLAELAALDDAGFRQVFAGSPIKRVGRDRFVRNVAIALGNSGSTDAMPVLERLREDASDLVSEAAGWGLSALADDLERVRGERSGDDWREQIKPGDEEHGCGSEAQPQAERTV

SEQ ID NO: 81143 - protein, 367 aa, Sphingosinicella sp.
  REGION 1..367: note = tr|A0A4P6G2L0|A0A4P6G2L0_9SPHN Epoxyqueuosine reductase OS=Sphingosinicella sp. BN140058 OX=1892855; GN = queG PE=3 SV=1
MNQGKPGLRERMEAKARELGFAAVGVARADAAPKTGERLRQWLAGGAHGDMLWMAETADRRASPAGLWPDVRSVISLGMSYAPSIDPLALAGRPEIGRVSVYAQGADYHDIVKKALKALARWLVEEAGCELKVFVDTAPVMEKPLAEAAGLGWQGKHTNLVSRKDGSWLFLGAIYTTLELAAGGDAPMSPEPLPEHLGPALPPHRVHCGSCSACLDACPTGAFPAPFQLDARRCISYLTIEHKGPIPEAFREAIGNRIYGCDDCLSVCPWNRFADTARRNQAFLPRAELTAPALADILALDDAAFRTVFAGSPIKRIGRNRMVRNAAIAAGNSGCTDLISALEPLANDPDPVVADAAAWALARLRRA

SEQ ID NO: 81144 - protein, 351 aa, Sphingosinicella sp.
  REGION 1..351: note = tr|A0A2U2J4D1|A0A2U2J4D1_9SPHN Epoxyqueuosine reductase OS=Sphingosinicella sp. QZX222 OX=2068657; GN = queG PE=3 SV=1
MDGAASLRARLEAEARALGFSAFGVARADATPRTAKRLRQWLDSGAHGDMLWMETTAERRGSPAGLWPEVKSVIALGMSYAPATDPLALADEGEVGRISVYAQGADYHDTVKKALKALARWLVAEAGCELKVFVDTAPVMEKPLAEAAGLGWQGKHTNLVSRTHGSWLFLGAIYTTLELELEPDSVHEQRCGSCRRCLEACPTNAFPAPFRLDARRCISYLTIEHKGPIPHELREAMGNRIYGCDDCLAVCPWNRFADTARRHQAFVPRAELVAPSLADLLALDDADFRKVFAGSPIKRIGRNRMVRNAAIAAGNSGSAALVEPLERLVDDPDPVVAEAAQWAVGKLTNGR

SEQ ID NO: 81145 - protein, 361 aa, unidentified
  source 1..361: note = Spiribacter aquaticus
  REGION 1..361: note = tr|A0A557RK90|A0A557RK90_9GAMM Epoxyqueuosine reductase OS=Spiribacter aquaticus OX=1935996 GN=queG PE=3; SV = 1
MAQAFDSTRLLPTLRQWAHELGFNELGVARPALAEDERHLLRWLQDGRHGTMTWMARHGVKRARPERLVPGTVRILSVRMDYRPPDLEADDALLADNRRAFIARYALGRDYHKLMRKRLQALANRIDTAVGGFGYRVFVDSAPVLEKALARNAGLGWIGKNTLVLNRHAGSYFFLGEIFTDLPLPESEPVDDLCGSCRACIDVCPTGAITGPQQLDARRCISYLTIEHEGSIPEDLRPAIGNRVFGCDDCQAVCPWNRYAQPTDEADFHPRHGLEDASLVALFRWDEATFLKRTEGSAIRRLGHERWLRNLAVALGNGPADADAIEALRERLEHPSAMVREHVTWALERLSRPGAAAAAHP

SEQ ID NO: 81146 - protein, 377 aa, unidentified
  source 1..377: note = Spiribacter curvatus
  REGION 1..377: note = tr|U5T5V3|U5T5V3_9GAMM Epoxyqueuosine reductase; OS = Spiribacter curvatus OX=1335757 GN=queG PE=3 SV=1
MVRTHDSREILPVIREWAGELGFDELGVARPALARDEQHLLRWLQDGRHGTMRWMARHGVKRARPERLVPGTIRVISVRMDYRPPDLEADDAILADRRRAFIARYALGRDYHKLMRKRLQALAQRIESSVGAFGYRVFVDSAPVLEKALGRDAGLGWIGKNTLLLNRHAGSYFFLGEIFTDLPLPTSDPVADLCGSCRACIDVCPTGAITGPGQLDARRCVSYLTIEHEGSIPEELRPAIGNRVFGCDDCQAVCPWNRYAQPTDEADFHPRHGLESASLVELFRWDETTFLKRTEGSAIRRLGHERWLRNLAVALGNGPADPAAIEALRERLDHPSALVTEHVQWALTRLVSPASGDSVQSTRRWSHPAPPAQDRPR

SEQ ID NO: 81147 - protein, 359 aa, unidentified
  source 1..359: note = Spiribacter salinus
  REGION 1..359: note = tr|A0A540VWC8|A0A540VWC8_9GAMM Epoxyqueuosine reductase OS=Spiribacter salinus OX=1335746 GN=queG PE=3; SV = 1
MERLAVALRQWAEALGFDGVGIAKPALAEDEAHLLRWLKAGRHGTMRWMGRHGVKRARPDQLIPGTARIISVRMDYRPPDLEADDAILADRRRAFVARYALGRDYHKLMRRRLQQLAEQIETTVGPFGYRAFVDSGPVLEKALGRNAGLGWIGKNTLLLNREAGSYFFLGELFTDLPLPEDAPVEDLCGSCRACIDVCPTQAITGPRQLDARRCISYLTIEHEGSIPEALRPGIGNRVFGCDDCQAVCPWNRYAQPTDEADFHPRHGLEHASLIELFRWDEATFLKRTEGSAIRRLGHERWLRNLAVALGNGPADPEAIQALRERLEHPSDLVREHVDWALRQLQSATLPSIPSDQPRG

SEQ ID NO: 81148 - protein, 370 aa, unidentified
  source 1..370: note = Spiribacter salinus
  REGION 1..370: note = tr|R4VLZ3|R4VLZ3_9GAMM Epoxyqueuosine reductase; OS = Spiribacter salinus M19-40 OX=1260251 GN=queG PE=3 SV=1
MAETAQPAMPDMERLAVALRQWAEALGFDSVGIAKPALAEDEAHLLRWLKAGRHGTMRWMGRHGVKRARPDQLIPGTARIISVRMDYRPPDLEADDAILADRRRAFVARYALGRDYHKLMRRRLQQLAEQIETTVGPFGYRAFVDSGPVLEKALGRNAGLGWIGKNTLLLNREAGSYFFLGELFTDLPLPEDAPVEDLCGSCRACIDVCPTQAITGPRQLDARRCISYLTIEHEGSIPEALRPSIGNRVFGCDDCQAVCPWNRYAQPTDEADFHPRHGLEHASLIELFRWDEATFLKRTEGSAIRRLGHERWLRNLAVALGNGPADPEAIQALSERLEHPSDLVREHVDWALRQLQSATLPSVTSDQPRG

SEQ ID NO: 81149 - protein, 367 aa, unidentified
  source 1..367: note = Spiribacter sp.
  REGION 1..367: note = tr|A0A2U2N195|A0A2U2N195_9GAMM Epoxyqueuosine reductase OS=Spiribacter sp. E85 OX=2182432 GN=queG PE=3; SV = 1
MPNLKPETLNPKPGAALDPAVLAADIRRWGAELGFDAVGIAEPELAVDEGHLLRWLRDGRHGEMSWMGRHGVKRARPAQLVPGTRRVICVRKDYRPPDAAADDAVLADPRRAFIARYAVGRDYHKLLRRRLQRLAERIQARIGPFGYRAFVDSAPVLEKALARNAGLGWIGKNTLLLNREGGSYFFLGELFTDLALPADAPPTEHCGSCRACIDVCPTGAITGPYQLDARRCISYLTIEHHGPIPEHLRPAIGNRVFGCDDCQAVCPWNRYARPTDEADFQPRHGLDSPQLVSLFRWDEATFLERTAGSPIRRLGHERWLRNLAVALGNGPADPDAIAALRERESHPSELVREHVVWALGRLGANPG

SEQ ID NO: 81150 - protein, 377 aa, unidentified
  source 1..377: note = Spirobacillus cienkowskii
  REGION 1..377: note = tr|A0A369KVR8|A0A369KVR8_9PROT tRNA epoxyqueuosine(34) reductase QueG OS=Spirobacillus cienkowskii OX=495820 GN=queG PE=4 SV=1
MKLNNEITKLINKYNVEVFRIFSFENEHNHIIKKDLPAFEKWLNDNANAEMDFLKNNIEVRKDPNLILKNVKNAIIFLFPYSAGHRVRGKGKIDSDNLKFVFNKNSIISKKLISRYVFGKDYHKVIKKYLNNISNDINNYFNDKYSFRAVVDSVPFFDRAYARESGIGFVGKNTMLIRPGMGSFFFVATLLTTAPIELLKYKSEDLSNRILSLDCGDCQKCLDSCPTQAFKKPYYLDANRCLSYLTIEHRNLVSEEYIPFFSNTIYGCDICQEVCPYNFVTSDFKILNEFSNFHKPFLTIDVKDIALMDMSQYEKWFGGTAATRAKYEGLVRNALYHLHATSSPDINEVLNKLEFSSYEIISRTVKQIRELKVSKDK

SEQ ID NO: 81151 - protein, 374 aa, Spirochaeta africana
  REGION 1..374: note = tr|H9UIS3|H9UIS3_SPIAZ Uncharacterized Fe-S protein; OS = Spirochaeta africana (strain ATCC 700263 / DSM 8902 / Z-7692) OX=889378 GN=Spiaf_1349 PE=4 SV=1
MISQQPYFPPVPDHLAELFHAEGLGLMGIAPAVPPAGSEHDDDYRTWLERGFHGSMAYLQRHAHGKYHPEAMLPGCRSILIAGLNYYQHAPERPAGAGRIARYAWGRDYHKTLGKRLLRIRRRLEERFPDHGFRNFTDATPLAERYFAEQAGIGFQGRNTLLISGQYGSWFVLGEILTTMELSVSSPSAAAGQFGNRHGACPRSCTKCIDVCPTGALYAPHRIDASRCISYLTIEHSGSIPVELRRGMRDWLFGCDLCQEVCPLNVRRQVTGESDFLQARAGDHLDLTELLAMESDKDFLQRFAGSPVMRAGRIGMMRNACVVAANTGAHELLPRLRQLADGTARYSADPAERAMIAEHAAWAVSELMSETSRH

SEQ ID NO: 81152 - protein, 365 aa, Spirochaeta sp.; identical to SEQ ID NO: 79785
  REGION 1..365: note = tr|A0A2D7DSQ8|A0A2D7DSQ8_9SPIO tRNA epoxyqueuosine(34) reductase QueG OS=Spirochaeta sp.; OX = 28185 GN=queG PE=4 SV=1

SEQ ID NO: 81153 - protein, 368 aa, Spirochaeta sp.
  REGION 1..368: note = tr|A0A1W9NA00|A0A1W9NA00_9SPIO tRNA epoxyqueuosine(34) reductase QueG OS=Spirochaeta sp. LUC14_002_19_P3 OX=1940821 GN=B0D92_01930 PE=4 SV=1
MNTVFQNIAKLYHEEELNTPAYMEWPPDNFVSELIEEQEELFMDRVSAGMPPGLAWMERHASVKYHPDRVLSGCRSVLVSSLGYYRDDSADHAPPGVLRGRIARYARGRDYHKELGRRLKRIADKLRGLFPSEQFMSFTDTGPLDEVWLAAASGAGFRGRHGLAILPGTGSWAVLGHLLSTARLGSSPVRPSPMRCPDGCRRCIDACPTGALTMPLNPSLCISYQSIEHRGAVDEALRGDTGNWVFGCDVCQEVCPFNARAEETTVRAFQRDYAGASVDLIELLKLKNHEETVRRFAGSPLMRAGRNGLVRNACTVIGNIGNREFLPELEKLFTDGDAAVREHARWAHSRIAERTGAGNDACCFQNPT

SEQ ID NO: 81154 - protein, 353 aa, Spirochaeta thermophila
  REGION 1..353: note = tr|E0RNQ4|E0RNQ4_SPITD Putative iron-sulfur protein; OS = Spirochaeta thermophila (strain ATCC 49972 / DSM 6192 / RI 19.B1) OX=665571 GN=STHERM_c02040 PE=4 SV=1
MMSSILPRNPFRTGAVPGIPSLILYILGENILNCQRNMSKGLTFEAILDLSRETGLTEVYPASSEGIPGLDPHRHPSFLITHLPYTVPTPRPSPLPSARIAPFACANHYRELSHTLRRLVSLIGQRTGHPKSAFRVFSNSPLPERAMAHRAGLGVPGRNGLIIHPVYGSYIALGGILLPFPLDIPPPPPPPPPLSPCGPCTACLTACPTHALPGDGTLRKDRCIQYWAGTHGIVPDPVKAAWGPTLYGCPHCQAACPYNRRPAPGRRPVLRGRIGPTLPLTLLLGTPASLLKALLRSSALQLGWLSPLTLQRNALLAAAATGARPLFHYVEPYLTHPDPVLRDAARWALHRLS

SEQ ID NO: 81155 - protein, 316 aa, Spirochaeta thermophila
  REGION 1..316: note = tr|G0GCQ5|G0GCQ5_SPITZ Iron-sulfur protein; OS = Spirochaeta thermophila (strain ATCC 700085 / DSM 6578 / Z-1203) OX=869211 GN=Spith_0187 PE=4 SV=1
MSKGLTFEAILDLCREAGLTEVYPSSSEGIPGLDPHRHPSFLITHLPYTIPTPHPSPLPSARIAPFACANHYRELSHTLRRIVSLIGQRTGHPKSAFRVFSNSPLPERAMAHRAGLGVPGRNGLIIHPVYGSYIALGGILLPFPLDLPPSPPPPPPLSPCGPCTACLTACPTRALPGDGTLRKERCIQYWASTHGIVPDPVKAAWSPTLYGCPHCQAACPYNRRPAPGRRPVLRGRIGPALPLTLLLGTPAPLLKALLRGSALHLGWLSPLTLQRNALLAAAATGARPLLPYVEPYLTHPDPVLRDAARWAVLRLS

SEQ ID NO: 81156 - protein, 411 aa, unidentified
  source 1..411: note = Spirochaetaceae bacterium
  REGION 1..411: note = tr|A0A2E9QGF8|A0A2E9QGF8_9SPIO Uncharacterized protein OS=Spirochaetaceae bacterium OX=1898206; GN = CMN76_20170 PE=4 SV=1
MHQPSRNPCLSKSQQTRFLELCQEAGFDLYGFTLASISQEDRENLDRFARENASNDLHWFNQHVHLRTHPSDILPGAISVLMLGAIYRHPEMDEALANSRAKVSRYAAGKDYHLVLRKKAARLADRFFELHRKELPGLRYRVTTDSAPVPEKILARNAGLGWQGKNTNLIHPEMGSYFFLTGVFLNADLEGFAEDLLRHPSTFPSHSNSQGLPDLRSASPENFGDPRKSSGDRYAANSNGGETARSAEQEGLFGSEVPEIPTDSESGAQYAEPSLFRAPNVDRCGSCRQCLDACPTGALEPYRIEASKCISYWTIEAKSAMPETVAANIQSWIFGCDICQEVCPYNRGAKGRRQVTKEESFEPRSFLMQWMASPTDPGESNTWSKLSVSSPLKRPGQDRFRESWKVIDARS

SEQ ID NO: 81157 - protein, 301 aa, unidentified
  source 1..301: note = Spirochaetaceae bacterium
  REGION 1..301: note = tr|A0A1W9VGJ9|A0A1W9VGJ9_9SPIO 4Fe-4S ferredoxin-type domain-containing protein; OS = Spirochaetaceae bacterium 4572_59 OX=1971727; GN = B6241_00225 PE=4 SV=1
MVPKESPLAKEIIEDQGFSSDGQIIIAMFPIHRENEAKEKGMGQIAPFSCRNYYKETINRMKLIVKQVAPQLTKKQYRLFSNSRLPEKSLALEAGLGFRGKNSLLINRSIGSRGVLAGMILPGEIKVLEYSPEENDEALSNCGNCRLCEKACPGGAISDEGFCKEKCLQFWTTESGIVPDDIKRNWGSILYGCTICQDICPWNRKIPESRAIDLGALPQGIPLTFLLTAAQEEIKSYFRNSNMGMSWITPRMLQRNAVLCAANEGLSELIPLIEKRLSEAKDPSLEDACRWALKVLKRDQD

SEQ ID NO: 81158 - protein, 372 aa, unidentified
  source 1..372: note = Spirochaetae bacterium
  REGION 1..372: note = tr|A0A2N1TQF8|A0A2N1TQF8_9SPIR Epoxyqueuosine reductase OS=Spirochaetae bacterium HGW-Spirochaetae-1; OX = 2013832 GN=CVV44_01855 PE=4 SV=1
MIKKADIITKAKELGFDDIGFTTAEPFTEHRRILSGRMEEYGWAESAGLQLMKGSDPTEILPGAGSIIVLLDVYFKESFPACIEHNFGRCYLDDDRVTKDGLTLRIKNFRSYLRDNGIDSKVPFNLPHRAAAARAGLGTFGKNCLLYAERVARKSSWIIPMAVVTDQSFEPDTPTVRMGCPDWCRNACVAACPTRALKGDGTIDPRRCISYLTYYGDGLTPRELREPMGMYVYGCDRCQNVCPRNEAWMSQELPQNRRVALKAENFNLSRLLHMDKDYFEKLVWPHMFYMGYNNIWRWKMNVARVMGNSADPVYVPDLVRAFRENDDERVRAMAAWALGRITGSDARIALEEFLGDSKGIVREEIEASLVGE

SEQ ID NO: 81159 - protein, 263 aa, unidentified
  source 1..263: note = Spirochaetae bacterium
  REGION 1..263: note = tr|A0A2N1R397|A0A2N1R397_9SPIR 4Fe-4S ferredoxin-type domain-containing protein (Fragment); OS = Spirochaetae bacterium HGW-Spirochaetae-7 OX=2013839; GN = CVV51_12240 PE= 4 SV=1
MSSPPVHRDARADIAASFGEAGLAVHSVVSRAVLEKLAGLSDSGAVARYGLLESAAAVVVAFPYDPRPGSRPDPSSLSVGAFAANNRYATMTRLLLSAGRSLAGRSGLPAKGFRAVVNSRLPEKLLGELAGLGFIGRSSLLVTRDYGPACLLGALLFPRDYMVGEDVADDPAGSDPLAAAAGAADGGCGACTACADACPTGAIRRGEGRREGRAGGPGGGPGIDQERCIQHWTTTPGEVPGPETAVDQDIEKPGRHQDEEPPL

SEQ ID NO: 81160 - protein, 439 aa, unidentified
  source 1..439: note = Spirochaetales bacterium
  REGION 1..439: note = tr|A0A3N5SXQ2|A0A3N5SXQ2_9SPIR Epoxyqueuosine reductase OS=Spirochaetales bacterium OX=2026792; GN = EHM32_08245 PE=4 SV=1
MLTRERITEEARRLGFVDIGFTTADPFDSHLEYLEKNREAYEWAPKLGLDLFKGADPRTVMPEAKSIIVLIEAYYRESFPPSLEAHFGRCYLDDDRVTRDGLTVRMKAFRSFLKENGVASKAPFDIPHRMAAARAGTGTFGKNCLLYSNRAVRGSSWILPLAFLVDCEFQPDEPTIGIDCPSWCRDACISACPTRALKGDGTIDPRRCISYLSYFGDGITPVELREPMGMYVYGCDRCQNVCPRNTAWSAQELPPNPRVAAKAKDFDLAALLHMDRTYFEQRIWPHMFYMSADELWRWKMNVARVMGNSGDDRYLPELLHAFGETDDTRVRGMIAWALGKIGGRGARRAPAAVPGRGRTGTYRIRHGPGVESPGPIRASSRLPFYRHGRHWRPGCPAGSLSRAMSGHPGLRYARRDNSPGPAYRRNLHSPDPENFRKLS

SEQ ID NO: 81161 - protein, 330 aa, unidentified
  source 1..330: note = Spirochaetales bacterium
  REGION 1..330: note = tr|A0A524KBQ7|A0A524KBQ7_9SPIR Epoxyqueuosine reductase OS=Spirochaetales bacterium OX=2026792; GN = E4H20_05015 PE=4 SV=1
MVDTNQPPNAEASLVGDVTATLIGLGLESFAFLGARGIAAIKAMTEPAVATVRGLDSARGAVVVALPYDPRPRPVPTEPRRFGSIGAFASSHRYATLARLLTSAGRSTALTSGLPRASFRTAVNSRLPEKPLAVLAGLAFIGRSSLAITRRFGPSCVLGVLLLPFDPTGDADASGLTGTESAREPGGRCGDCKACVDACPTGAIQDPGSGRSGLDRSRCIQNWASESGSVPAEILDSWGNRVYGCDLCVRACPYSNGAWMPDGRGTSAAIRADPLALPTEARPGSWVDLDRILDAGDKDLSRWARGTALGFSWFTPALLRRNAGIAATPR

SEQ ID NO: 81162 - protein, 395 aa, unidentified
  source 1..395: note = Spirochaetes bacterium
  REGION 1..395: note = tr|A0A522CND2|A0A522CND2_9SPIR Epoxyqueuosine reductase OS=Spirochaetes bacterium OX=2202144; GN = EPN93_18070 PE=4 SV=1
MNISKEDIRNKARELGFEDAGFTGCEPFEDHREVLEARRDMYEWCVSLGLDLFQGTDPRAVYPECRSIIVLLENYFREGFPRGLETHYGRCYLDDDRVTRDGLAVRLKAFRAFLKEHGMDSKVPFHVPHRLAAARAGLGTFGKNCLFYGHRAARGSSFVLPLAFLVDRDFEPDAPTVSVGCPEWCRNACISACPTGALKGPRKIDPRRCISYLSYYGNDLTPVELREPMGLWVYGCDRCQNVCPRNQAWLAADRPVNERVRARAAHFDLREILNMDTAYYTANVWPHMFYMPPEDLWRWQMNAARAMGNSLDPTYVSSLARGLAEAGDWRVRAMCAWSLGRIGTCGAGEALEAAREGSDTAVRGEIEAARIVYASRQALARRTDRKDGIDIPGAE

SEQ ID NO: 81163 - protein, 374 aa, unidentified
  source 1..374: note = Spirochaetes bacterium
  REGION 1..374: note = tr|A0A1G3QW05|A0A1G3QW05_9SPIR PBS lyase; OS = Spirochaetes bacterium RBG_16_49_21 OX=1802195; GN = A2W19_08140 PE=4 SV=1
MVTRDDIIEKALGLGFADAGFTTAEPFESHRQCLAERTEDYRWAEAGGLALTAGTDPATILPSAKSIIVLIDVYFREAYPAWLAGHFGRCYLDDDRMTRDGLALRIKAFRSFLRENGIDSKVPFNLPHRVAAARAGLGTFGKNCLFYSGRTARQSSWVTPIPLVVDREFAPDGPTMKMGCPDWCRSACVAACPTKALKGNGVIASRMCVSYLTYYGKGITPRELREPMGMYVYGCDRCQNVCPRNLPWLAQELPENKRVAAKAQNFDLAALLHMSREYFMEKVWPHMFYSSPDDLWRWKMNVARVMGNSREERYVPELVRAFDEGIDERVRGMIAWALGRIGGEAARSALEGFLKRSEGLVYDETVAALESPFG

SEQ ID NO: 81164 - protein, 326 aa, unidentified
  source 1..326: note = Spirochaetia bacterium
  REGION 1..326: note = tr|A0A354GCQ0|A0A354GCQ0_9SPIR Uncharacterized protein OS=Spirochaetia bacterium OX=2053615; GN = DC057_07015 PE=4 SV=1
MISNSNIIEKAKELGLEKIAFLHTTELTNDFKVIISASLSYNYNWNNESESAFGYIARYTTANFYKLLRIKLKALGDFIYQQTEMTMKKNELYHISINSNLNDKQIALQSGLGNILNNSLISVNHKGCKFVLGNLLINEDVDMCDSVIHQVNECGSCHLCIDSCPTGALKENRLFDKSICLQHLSSQIGDEFDSKLDYIIPHWNERFFGCTRCVDVCPLNNKNQQIECIAHELPGYIGTVFTADDCLKTIKKGEFKKKFTGNQLGANWIPEVALIRNYILMNFKNNKSICMEMYNSIDKSDLDTAEKKYLKKIILLLKNYDDISIK

SEQ ID NO: 81165 - protein, 302 aa, unidentified
  source 1..302: note = Spirochaetia bacterium
  REGION 1..302: note = tr|A0A3D3ARH5|A0A3D3ARH5_9SPIR Uncharacterized protein OS=Spirochaetia bacterium OX=2053615; GN = DHW82_14425 PE=4 SV=1
MSDFHLLLKKTAPIFGVGSKIQFNEHEEYLLNREINQENIEFEGKWKKKMDLRNSLPEVSSYLVFGFPYPVFQPKIQKASFSAYASINDYHLVVSEKLNQCVQILKKKRPEETFLPLVDSGKVFEKELAIEAKIGFRGKNTLVVNPEYGSFFFIGIILSSLRFDSFFSHSIHTDCGLCERCLKSCPTLALTPYRLLPKKCLSYLTSSKKIEAMKSFSLYGCDLCQMVCPYNLKRNSNPLEDFYYNFQIKLINPDLTEEEFKHYTKNSPLKWIGRKKWITNLQVPYQNPEMPLKPDQKEDLPE

SEQ ID NO: 81166 - protein, 137 aa, unidentified
  source 1..137: note = Unknown
  REGION 1..137: note = tr|A0A421K8G7|A0A421K8G7_9SPIR 4Fe-4S ferredoxin-type domain-containing protein (Fragment); OS = spirochete symbiont of Stewartia floridana OX=1968597; GN = B6D68_03970 PE =4 SV=1
INTALCNSYLSIEHPGSVPEPYRANMANWIFGCDICQEVCPFNILSKTTNVENFNRDYAGASIELIKVLKLKDKNAVMQSFAGSPLMRTGQSGLIRNACTVAGNIEAHELKPSLISLLQSEEEGIRDHAAWALDRIV

SEQ ID NO: 81167 - protein, 319 aa, unidentified
  source 1..319: note = Spirosoma endophyticum
  REGION 1..319: note = tr|A0A1I1MZU5|A0A1I1MZU5_9BACT Epoxyqueuosine reductase OS=Spirosoma endophyticum OX=662367 GN=queG PE=3; SV = 1
MPARHYTQLIKAKALGLGFDFCGIAKADFLEEEAPRLETWLKNGMHGQMNYMANHFDKRLDPRLLVDDAKSVITVLLNYYPEQKLPEGDADYKLSKYAYGTDYHFVIKDKLKDLLAYIHEEIGEVGGRAFVDSAPVMDKAWAKRAGLGWVGKHTNLINREIGSFFFIGELILDLELEPDGPITDYCGTCTRCIDACPTDAIVGPYVVDGSKCISYFTIELKEAIPTEVQGKFDNWIFGCDICQDVCPWNRFSRPHQTPAFDPHPELTTLTNTDWEEITEDVFREIFRRSAVKRTKLDGLKRNVAFVKPTAEVSALKKLP

SEQ ID NO: 81168 - protein, 308 aa, unidentified
  source 1..308: note = Spirosoma fluviale
  REGION 1..308: note = tr|A0A286FBF6|A0A286FBF6_9BACT Epoxyqueuosine reductase OS=Spirosoma fluviale OX=1597977 GN=queG PE=3; SV = 1
MHAPAHHYSKLIKAKALDLGFDFCGVAKADFLEEEAPRLETWLKNGMHGQMNYMANHFDKRLDPRLLVDDAKSVITVLLNYYPEQKLPESDDDLKLSKYAYGTDYHFVIKDKLKDLLTFIHDEIGEVGGRAFVDSAPVMDKAWAKRAGLGWVGKHTNLINREIGSFFFIGELILDLELEPDGPITDYCGTCTRCIDACPTDAIVGPYVVDGSKCISYFTIELKEAIPTEVKGQFNNWIFGCDICQDVCPWNRFARPHQTPAFDPHPDLTAFTKTDWEEITEDVFREIFRRSAVKRTKLDGLKRNIGFL

SEQ ID NO: 81169 - protein, 308 aa, Spirosoma linguale
  REGION 1..308: note = tr|D2QNW3|D2QNW3_SPILD Epoxyqueuosine reductase; OS = Spirosoma linguale (strain ATCC 33905 / DSM 74 / LMG 10896) OX=504472 GN=queG PE=3 SV=1
MHAPAHHYSKLIKAKAVALGFDFCGVAKADFLEEEAPRLETWLKNGMHGQMNYMANHFDKRLDPRLLVDDAKSVITVLLNYYPEQKLPEGDDDLKLSKYAYGTDYHFVIKDKLKHLLTYIHDEIGDVGGRAFVDSAPVMDKAWAKRAGLGWVGKHTNLINREIGSFFFIGELILDLELEPDGPITDYCGTCTRCIDACPTDAIVGPYVVDGSKCISYFTIELKEAIPTEVKGQFNNWIFGCDICQDVCPWNRFARPHQTPAFEPHPDLASFTKTDWEEITDDVFREIFRRSAVKRTKLEGLKRNIGFL

SEQ ID NO: 81170 - protein, 316 aa, unidentified
  source 1..316: note = Spirosoma montaniterrae
  REGION 1..316: note = tr|A0A1P9WTS3|A0A1P9WTS3_9BACT Epoxyqueuosine reductase OS=Spirosoma montaniterrae OX=1178516 GN=queG; PE = 3 SV=1
MLPLKKYSQLIKAEATRLGFDFCGIAKADFLEEEAPLLETWLKNGMHGQMSYMANHFDKRLDPRLLVDGAKSVVTVLLNYYPEQRLPEGEDDYKLSKYAYGEDYHFVLKDKLKQLLAFIHDEIGEVNGRAFVDSAPVMDKAWAKRAGVGWIGKHTNLINRQIGSFFFIGELILDLELEPDGPITDYCGTCTRCIDACPTDAIVDAYVVDGSKCISYFTIELKEAIPDEVQGKFENWIFGCDICQDVCPWNRFARPHQTPAFTPHHDLTTFSKRDWEDITEDVFREIFRRSAVKRTKLEGLKRNVAFNQPDREEIED

SEQ ID NO: 81171 - protein, 346 aa, unidentified
  source 1..346: note = Spirosoma oryzae
  REGION 1..346: note = tr|A0A2T0RJN2|A0A2T0RJN2_9BACT Epoxyqueuosine reductase OS=Spirosoma oryzae OX=1469603 GN=queG PE=3 SV=1
MSVLLTPPLEQHVEFLTAYQRYLVSSSSNNMHSLIQRHTQLIKAKAVELGFDFCGVARADFLEEEAPRLEAWLKNGMHGQMNYMANHFDKRLDPRLLVEGAKSVVTVLLNYYPEEPLPQQHDDYKVSKYAYGTDYHFVIKDKLKELMTFIDTAIGEVGGRVFVDSAPVMDKAWAKRSGAGWIGKHSNLINRQIGSFFFIAELILDIDLEADGPIADYCGTCTRCIDACPTNAIVGPYVVDGSKCISYFTIELKDAIPTEVQGKFDNWIFGCDICQDVCPWNRFSRPHQTPAFAPHPDLATFSRTDWEEITEEVFREVFRRSAVKRTKLEGLKRNVRFNQTAILHTD

SEQ ID NO: 81172 - protein, 311 aa, unidentified
  source 1..311: note = Spirosoma pollinicola
  REGION 1..311: note = tr|A0A2K8YTW1|A0A2K8YTW1_9BACT Epoxyqueuosine reductase OS=Spirosoma pollinicola OX=2057025 GN=queG PE=3; SV = 1
MNAKKTNYTQLIKAKATDLGFDFCGVAKADFLEDEAPRFENWLKNGMHGQMNYMANHFDKRLDPRLLVDDAKSVITVLLNYYPEQKLPEENDDLKLSKYAYGTDYHFVIKDKLADLLTFIHEEIGEVGGRAFVDSAPVMDKAWARRAGIGWVGKHTNLINREIGSFFFIGELILDLELEPDGPITDYCGTCTRCIDACPTEAIVGPYVVDGSKCISYFTIELKEAIPEDVRGKFDNWIFGCDICQDVCPWNRFARPHKTPAFDPHPELAAFSKSDWEEITEDVFREVFRRSAVKRTKLEGLKRNIGFVGGG

SEQ ID NO: 81173 - protein, 318 aa, unidentified
  source 1..318: note = Spirosoma radiotolerans
  REGION 1..318: note = tr|A0A0E3ZWM3|A0A0E3ZWM3_9BACT Epoxyqueuosine reductase OS=Spirosoma radiotolerans OX=1379870 GN=queG; PE = 3 SV=1
MHSPASHYTQLIKAKAAALGFDFCGVAKADFLEDEAPRLETWLKNGMHGQMNYMANHFDKRLDPRLLVDDAKSVLTVLLNYYPEQKLPEGDDDLKLSKYAYGTDYHFVIKDKLKDLLTFIHDEIGEVGGRAFVDSAPVMDKAWAKRAGLGWVGKHTNLINREIGSFFFIGELILDLELEPDGPITDYCGTCTRCIDACPTDAIVGPYVVDGSKCISYFTIELKEAIPTEVQGKFNNWMFGCDICQDVCPWNRFARPHKTPAFDPHPDLAKLTKTDWEEITEDVFREIFRRSAVKRTKLEGLKRNISFVAPTADPSRSE

SEQ ID NO: 81174 - protein, 311 aa, Spirosoma sp.
  REGION 1..311: note = tr|A0A1Q3WHI7|A0A1Q3WHI7_9BACT Epoxyqueuosine reductase OS=Spirosoma sp. 48-14 OX=1895854 GN=queG PE=3; SV = 1
MHSPSRAYTQRIKVKAAEIGFDFCGVSKADFLEEEAPRLEAWLKNGMQGQMNYMANHFDKRLDPRLLVDGAKSVITVLLNYYPEQRLPEGDDDFKLSKYAYGTDYHFVIKDKLKDLLAFIEEEIGAVNGRVFVDSAPVMDKAWAKRAGLGWIGKHTNLINREIGSFFFIGELILDLELEPDGPITDYCGTCTRCIDACPTDAIVAPYVVDGSKCISYFTIELKEAIPEEVRGKFDNWIFGCDICQDVCPWNRFARPHQTPAFELHPELSAFTKPDWEEITEEVFREIFRRSAVKRTKLEGLKRNIAFNQGE

SEQ ID NO: 81175 - protein, 313 aa, Spirosoma sp.
  REGION 1..313: note = tr|A0A4V1RW78|A0A4V1RW78_9BACT Epoxyqueuosine reductase OS=Spirosoma sp. TY50 OX=2502893 GN=queG PE=3; SV = 1
MHAPASYYSTRLKAKALELGFDVCGIARADFLDEEAPRLETWLKNGMHGQMNYMANHFDKRLDPRLLVEGAKSVVTVLLNYYPSQPLPEAEDDYKLSKYAYGEDYHFVIKDKLKDLMAFIHEEIGEVGGRAFVDSAPVMDKAWAKRSGVGWVGKHSNLINRQMGSFFFIGELILDLELEPDGPITDYCGTCTRCLDACPTEAIVSPYVVDGSKCISYFTIELKEAIPDEVRGKFDNWVFGCDICQNVCPWNRFARPHQTPAFDPHPDLAEFSRTDWEEITEEVFREVFRRSAVKRTKLDGLKRNVTFAKNSTY

SEQ ID NO: 81176 - protein, 359 aa, Spongiibacter sp.
  REGION 1..359: note = tr|A0A2D7WD31|A0A2D7WD31_9GAMM Epoxyqueuosine reductase OS=Spongiibacter sp. OX=2024860 GN=queG PE=3 SV=1
MSKVLSPEALADLATQLKQWGKELGFAHIGIGPAEPSHHAERLTQWLAKGFHGEMHYMAERESLRRAPESLLPGTLRVISARMDYRPEASDALQILKQADKAYISRYALGRDYHKLIRKRLAQLADRLGGQQQRAFVDSAPVLERGFAEQAGLGWIGKNTMLINSRAGSWFFLGEIYTDLALPIDPPQETGHCGSCQACLDDCPTQAIVAPYQVDARRCISYLTIELKGAIPEDLRPAMGNRVFGCDDCQLVCPWNKFSQPTSEPDFAPRHQLDDRELLDLFLWTEEEFLSRTAGSPIRRIGYQRWLRNLAVGLGNAPFNPDIVAGLKKQRPQAEPMAAEHIDWALARQQHTDTLAHSH

SEQ ID NO: 81177 - protein, 385 aa, Spongiibacter sp.
  REGION 1..385: note = tr|A0A0F7M9G5|A0A0F7M9G5_9GAMM Epoxyqueuosine reductase OS=Spongiibacter sp. IMCC21906 OX=1620392; GN = queG PE=3 SV=1
MKDETDHNAELDTLAQSLKDWAKELGFAHLGITLADPVHHAERLRDWLAKDFHGEMHYMANREALRANPAELLPGTVRVISARMDYLPDAAATEAILNTPEKAYISRYALGRDYHKLIRKRLSQLAQKLQAEGGGQHRAFVDSAPVLERGFAEQAGLGWIGKNSMLINSKAGSWFFLGEIYTDIPLPVDPPQPSGHCGSCTACLQDCPTAAIVAPYQVDARRCISYLTIELKEAIPEEFRAPMGNRVFGCDDCQLVCPWNKFAQPTAETDFAPRHQLDNSDLLSLFMWTEEEFLRNTEGSAIRRIGYARWLRNLSVGLGNATYQANIVNALQQRRNELDTCHQDATAYDATNNTTDTNAMLAEHFDWALQCQQQKADSLKTPHQA

SEQ ID NO: 81178 - protein, 361 aa, unidentified
  source 1..361: note = Spongiibacteraceae bacterium
  REGION 1..361: note = tr|A0A2E2K2Q1|A0A2E2K2Q1_9GAMM Epoxyqueuosine reductase OS=Spongiibacteraceae bacterium OX=2026793; GN = queG PE=3 SV=1
MSTIPQTDLSRLASDIKRWGAELGFQQVGITDADISQHADKLKQWLAKGFHGDMAYMAEREGLRNKPDELVPDTVRVISFRMDYFPDEQHTAERLQQPEQAYVSRYALGRDYHKLIRKRLATIAERLREAGGEHCRAFVDSAPVLERGFAEKAGLGWIGKNSMLINPKAGSWFFLGEIYTDLPLPTDPPQESLHCGSCTACLDDCPTGAIVAPFQVDARRCISYLTIELHGSIPEELRPLMGNRIFGCDDCQLVCPWNKFAEPTTEVDFSPRHKLDQADLLSLFAWTEAEFDRNTQGSAIRRVGYARWLRNIAVALGNAPPNQDTIKALEEKLGTVDAVVDEHIRWALQRQKDESPRPDRQ

SEQ ID NO: 81179 - protein, 360 aa, unidentified
  source 1..360: note = Spongiibacteraceae bacterium
  REGION 1..360: note = tr|A0A2E7IN34|A0A2E7IN34_9GAMM Epoxyqueuosine reductase OS=Spongiibacteraceae bacterium OX=2026793; GN = queG PE=3 SV=1
MLQNTPQLSDDELRSLAADIHRWGLEMGFQQVGITDTDISTHSGKLREWLAKNYHGDMHYMADRESLRRQPDALLPETLRVISFRMDYLPDESNPPEEQLAQKDAAYISRYALGRDYHKLIRKRLSQIADNIRERGGLGGRAFVDSAPVLERGFAEKAGLGWIGKNSMLINPKAGSWFFLGEIYSDLALPTDPPQETGHCGSCRACLDDCPTGAIVAPYQVDARRCISYLTIELKTAIPEDLRPLMGNRVFGCDDCQLVCPWNKFATSTGENDFKPRHGLENAQLLELFNWTEQEFDTRTLGSAIRRIGYERWLRNLAVALGNAPHSREIVLALKGKREGVSEMVREHIDWALERQRCSR

SEQ ID NO: 81180 - protein, 337 aa, Sporanaerobacter acetigenes
  REGION 1..337: note = tr|A0A1M5X655|A0A1M5X655_9FIRM Epoxyqueuosine reductase OS=Sporanaerobacter acetigenes DSM 13106; OX = 1123281 GN=SAMN02745180_01494 PE=4 SV=1
MNLKQYIIQKSQEVGIDIIGFTDSGRLDDLKDYLYERRENNRETEFEEKDLEKRVDPKSIFPHCKSIIVVGISYNVDFNEKVDFELKGKISKSSWGEDYHRVVKDRIEKLIDEIEKEIEFNYISFVDTGPLVDRELARKAGVGWYGKNCSIINDKYGSFIFIGYILTDLDIESDNPILSQCGDCNLCLRACPTGALEAPYKFNPKKCISYLTQTKDEIPYELREKMGIKVYGCDTCQIVCPKNKSALNSKNNEFVPVNTKGYIDIEEIFNMSNSEFKKKYGSMAGSWRGKNILKRNCIIAIGNMKDVNNIEFLEKALKDPSPMIRQYANWAIKKIKT

SEQ ID NO: 81181 - protein, 369 aa, Sporanaerobacter sp.
  REGION 1..369: note = tr|A0A410QEG8|A0A410QEG8_9FIRM tRNA epoxyqueuosine(34) reductase QueG OS=Sporanaerobacter sp. JN28 OX=2507161 GN=queG PE=4 SV=1
MNIKKYIMDKSKELNIDMIRFTDSSPLVDIKDFIMERKNLGYSTEFEEKDIERRINPKIILLDCKSIIAIALSYNIKYNENLNTDLKGKLSRCSWGLDYHKVLNNKMKKLIEEMEKKVKFNYSYFADTGPLVDREIAKKSGLGYYGKNCTIINEKFGSFIFLGYILTDLDIEEDGIIEGYNCGECNLCLKACPTGALEAPYRLNPKKCISYLTQTKGDIPYEQRKKMGINVYGCDVCQLVCPKNKYAEESSNKEFLPLRTKGYIDIKELFKISNREFKNEYGNMAGSWVGRNTLRRNAIIALGNMKKGENVSFLKELLSLNNIDFNLRKYIYWSLLNIDKKLGKEIIGDGIKDRIDIDEIEKLLRYFKI

SEQ ID NO: 81182 - protein, 369 aa, Sporanaerobacter sp.
  REGION 1..369: note = tr|A0A1G4FKE3|A0A1G4FKE3_9FIRM Epoxyqueuosine reductase OS=Sporanaerobacter sp. PP17-6a OX=1891289; GN = queG PE=4 SV=1
MNIKKYIMDKSKELNIDMIRFTDSSPLIDIKDFIMERKNLGYSTEFEEKDIERRINPKIILPDCKSIIAIALSYNIKYNENLNTDLKGKLSRCSWGLDYHKVLNNKMKKLIEEMEKKVKFNYSYFADTGPLVDREIAKKSGLGYYGKNCTIINEKFGSFIFLGYILTDLDIEEDGIIEGYNCGECNLCLKACPTGALEAPYRLNPKKCISYLTQTKGDIPYEQRKKMGINVYGCDVCQLVCPKNKYAEESSNKEFLPLRTKGYIDIKELFKISNREFKNEYGNMAGSWVGRNTLRRNAIIALGNMKKGENVSFLKELLSLNNIDFNLRKYIYWSLLNIDKKLGKEIIGDGIKDRIDIDEIEKLLRYFKI

SEQ ID NO: 81183 - protein, 295 aa, Sporobacter termitidis
  REGION 1..295: note = tr|A0A1M5WH58|A0A1M5WH58_9FIRM Epoxyqueuosine reductase QueG (Queuosine biosynthesis) OS=Sporobacter termitidis DSM 10068 OX=1123282 GN=SAMN02745823_01271 PE=4; SV = 1
MDITGMIKDAAKRYGMDMCGVAGVDRFDESPPGRHPTDILPGCKSVVVVGVRLLDGIVQANFRTFENGRQDLKGLYGTYGYTMLPNFELTYACYAVAQFIERETGEAATPLSTGPMTNGAQISIRHAAVAAGLGEFGWLSIVLTPEFGPRNRFGVILTTAGLAPDPLYGGPRLCNPEVCHICTDVCPTKAIGAYGSEDFRTCGLGTYGKVSFPRCQVPTQGLRRAFGGAEDYVTTDDPVGRDIAEANARQPIMERGLQHHESWHCGMCLSYCPAGRWKEHFLDRALTGGAGAVAK

SEQ ID NO: 81184 - protein, 343 aa, Sporobacter termitidis
  REGION 1..343: note = tr|A0A1M5YN07|A0A1M5YN07_9FIRM Epoxyqueuosine reductase OS=Sporobacter termitidis DSM 10068 OX=1123282; GN = SAMN02745823_02679 PE=4 SV=1
MNAMEEKIARRALALGYEKCGIVRLAAMEGYDEKLSERIQKVPESAPFYENQKRLTNLAEQYPWARSVVVAVHPYGRYNVPQNADGHIGKHYLFDTRVSEASPEYKACTELEKYLQELGLKTAGNRKFGVVGLRWAAMQAGLGLVRRNNFFYTESGSWVTLEGWLTDGDLELIQANALPQCPENCGQCVKACPSGALFDRYTMSPGRCVSFLTTFGGRDLPENPLAKRFGPWYYGCDACQDACPMNRGKWTGGEEFPGLAELSPCLSPENVLRMDDAFYREKIQPRFFYLSPEELWKWKVDVLNYMHNNYTEDYGPYILAACGDENDKVGDMARHVATERSLL

SEQ ID NO: 81185 - protein, 304 aa, Sporocytophaga myxococcoides
  REGION 1..304: note = tr|A0A098LLX5|A0A098LLX5_9BACT Epoxyqueuosine reductase OS=Sporocytophaga myxococcoides OX=153721; GN = queG PE=3 SV=1
MFSSKSKHTLLIKNKAKELGFDYCGISRADFLEEEAPRLENWLKNNYHGEMKWMENHFDKRLDPRKLVEGSKSVISFLLNYFPEETVDHQLKISKYAYGRDYHTVIKDKLKELMLHMKQEIGDFNGRAFVDSAPVMDKTWAERGGLGWRGKNSNLINPKSGSFFFIAELITDLDLEYDGPMKDYCGTCTRCIDACPTDAISQAYVVDGSKCISYLTIELKNNIPSDFKGKMDNWIFGCDVCQDVCPWNRFSKAHNEPQFLPSEEFKSLKEWTELTSELFDEIFKKTAIKRTKFEGLQRNIKFLA

SEQ ID NO: 81186 - protein, 385 aa, Sporolactobacillus inulinus
  REGION 1..385: note = tr|A0A4Y3T908|A0A4Y3T908_9BACL Epoxyqueuosine reductase OS=Sporolactobacillus inulinus OX=2078 GN=queG; PE = 3 SV=1
MMDFQELKEQLIRYSKEIGVDKIGFTTADPFTELKARLYRQRELGYQSGFEEKDIEKRTEPSLLMDGVQSIVSIAMAYPKKMAERPANTKGHRRGAFARVSWGQDYHTILRDRMQKLGEFLVETVPGATFKSMVDTGELSDRAVAERAGIGWAGKSTNLITKEFGSYVYLGEMLTNIPFPPDKPATDLCGDCTICIDHCPTGALVQGGQLNSQKCIAYLTQTKQELPEEYKKAIGNRLYGCDMCQQVCPYNRDVDSHFHEEMEPDPELAHPLLTPLLTLSNRAFKETFGDVSGSWRGKKPIQRNAIVALGNYKEVAAALELLRLLHDDPRPVIRRTVTWALQQMWDRLEPDMRAHMIQSFEDLLAKEEDEKVHQWIKAKLDAEEG

SEQ ID NO: 81187 - protein, 384 aa, Sporolactobacillus inulinus
  REGION 1..384: note = tr|A0A0U1QLE6|A0A0U1QLE6_9BACL Epoxyqueuosine reductase OS=Sporolactobacillus inulinus CASD OX=1069536; GN = queG PE=3 SV=1
MDFQELKEQLIRYSKEIGVDKIGFTTADPFTELKARLYRQRELGYQSGFEEKDIEKRTEPSLLMDGVQSIVSIAMAYPKKMAERPANTKGHRRGAFARVSWGQDYHTILRDRMQKLGEFLVETVPGATFKSMVDTGELSDRAVAERAGIGWAGKSTNLITKEFGSYVYLGEMLTNIPFPPDKPATDLCGDCTICIDHCPTGALVQGGQLNSQKCIAYLTQTKQELPEEYKKAIGNRLYGCDMCQQVCPYNRDVDSHFHEEMEPDPELAHPLLTPLLTLSNRAFKETFGDVSGSWRGKKPIQRNAIVALGNYKEVAAALELLRLLHDDPRPVIRRTVTWALQQMWDRLEPDMRAHMIQSFEDLLAKEEDEKVHQWIKAKLDAEEG

SEQ ID NO: 81188 - protein, 388 aa, Sporolactobacillus laevolacticus
  REGION 1..388: note = tr|V6J3U7|V6J3U7_9BACL Epoxyqueuosine reductase; OS = Sporolactobacillus laevolacticus DSM 442 OX=1395513; GN = queG PE=3 SV=1
MTDFQKLKEQLITYSKEIGVDKIGFTTADPFTELKGRLYQQQALGFQSGFEEKDIEKRTEPSLLMDGVQSIVSIAMAYPKRMPERLANTKGHRRGAFARVSWGQDYHMILRKAMQKLGEFLVDTIPGAQYKSMVDTGELSDRAVAERAGIGWSGKSTNLITKEFGSYVYLGEMLTNIPFPPDKPATDLCGDCTICIDHCPTGALVQGGQLNSKKCIAYLTQTKQELPEEYKKAIGNRLYGCDTCQQVCPYNRDVDSHFHEEMEPEPELARPLLQPLLSLSNREFKETFGPLSGSWRGKKPIQRNAIVALGNYKEVSAAPELLRLLNEDPRPVIRRTVTWTLQQMWDRFEPDTRAQMIQSLENLLTKETDEKVHRWIKERLDTDKSTEK

SEQ ID NO: 81189 - protein, 388 aa, unidentified
  source 1..388: note = Sporolactobacillus nakayamae
  REGION 1..388: note = tr|A0A1I2VXZ0|A0A1I2VXZ0_9BACL Epoxyqueuosine reductase OS=Sporolactobacillus nakayamae OX=269670; GN = queG PE=3 SV=1
MTDFQKLKEQLITYSKKMGVDKIGFTTADPFTELKARLYQQRELGYQSGFEEKDIEKRTEPSLLMDGAQSIVSIAMAYPKKMAERPANTKGQRRGAFARVSWGQDYHMILRKALEKLGDFLVDTTPGARYKSMVDTGELSDRAVAERAGIGWAGKSTNLITEEFGSYVYLGEMLTNIPFPPDKPATDLCGDCTICIDHCPTGALVQGGQLNSQKCIAYLTQTKQELPEPYKKAIGNRIYGCDTCQQVCPYNRDVDSHFHEEMEADPELARPLLIPLLSLSNRDFKETFGELSGSWRGKKPIQRNAIVALGNYKDVSAAPELLRLLDEDPRPVIRRTVTWALQKMWDRFDPNMRVQVVQSLENLLVKEDDEKVFQWIKEKLDAEKGNCC

SEQ ID NO: 81190 - protein, 388 aa, unidentified
  source 1..388: note = Sporolactobacillus shoreae
  REGION 1..388: note = tr|A0A4Z0GQE6|A0A4Z0GQE6_9BACL Epoxyqueuosine reductase OS=Sporolactobacillus shoreae OX=1465501 GN=queG; PE = 3 SV=1
MTDFQKLKEQLITYSKEIGVDKIGFTTADPFAELKARLYEQRALGFQSGFEEKDIEKRTEPSLLMDGVQSIVSIAMAYPKRMPERPANTKGHRRGAFARVSWGQDYHMILRDRLQKLGEFLVDTIHGAKYKSMVDTGELSDRAVAERAGIGWAGKSTNLITKELGSYVYLGEMLTNIPFPPDKPATDLCGDCTICIDHCPTGALVQGGQLNSQKCIAYLTQTKQELPEEYKKAIGNRLYGCDTCQQVCPYNRDVDSHFHEEMEPDPELARPLLQPLLSLSNREFKETFGPLSGSWRGKKPIQRNAIVALGNYKEISAAPELLRLLSEDPRPVIRRTITWALQQMWDRFEPDTRAQMIQSLENLLAKETDEKIHQWIKERLDADKSTEK

SEQ ID NO: 81191 - protein, 388 aa, Sporolactobacillus sp.
  REGION 1..388: note = tr|A0A4Q4IC81|A0A4Q4IC81_9BACL Epoxyqueuosine reductase OS=Sporolactobacillus sp. THM19-2 OX=2511171; GN = queG PE=3 SV=1
MTDFHRLKKELITYSKKAGIDKIGFTTADPFTELKARLYKQQALGYQSGFEEKDIEKRTEPSLLMDGVKSIISIAMAYPKKMARRPANTRGNRRGAFARVSWGKDYHVILRDRLQKLGDFLVDQVPGARYKSMVDTGELSDRAVAERAGIGWSGKNTNLITQEFGSYVYLGEMLTNIPFPPNRPATDLCGDCTICLDHCPTGALIQGGQLNSRKCIAYLTQTRQELPDAYKKAVGNRLYGCDTCQQVCPYNRDVDSHFHEEMEPDPELARPLLKPLLSLSNREFRETFGALSGSWRGKKPIQRNAIVALGNYKETDAAPELLRLLREDPRPVIRRTATWALQKMWDRLEHDMRTHIIQSLEDLYGKETDEKVRSWIEGRLDSGADSSS

SEQ ID NO: 81192 - protein, 382 aa, Sporolactobacillus sp.
  REGION 1..382: note = tr|A0A4Q4JG47|A0A4Q4JG47_9BACL Epoxyqueuosine reductase OS=Sporolactobacillus sp. THM7-7 OX=2511172; GN = queG PE=3 SV=1
MTDFAELKKKIIAYSKEIGVDKIGFTTADPFTELKARLYQQQALGYQSGFEEKDIEKRTKPALLMDGVQSIVAIAMAYPKKMAVRPENTKTDRRGAFARVSWGTDYHVILRDRLQKLGEFLVENAPGAAFKNMVDTGALSDRAVAERAGIGWAGKNTNVITKEFGSYVYLGEMLTNVPFPPDKPAENLCGDCTRCIDHCPTGALVQGGQLNSHKCIAFLTQTKQDIPEYYRKAIGNRVYGCDTCQQVCPYNRDVDSHFHEEMEPDPELVRPRLKPLLSLSNRSFKEKFGSLSGAWRGKKPIQRNAIIALGNYKDVTAAPELVRLLREDPRPVIRRAAIWAINKMRDRLNPDDRDNLDQSLRSLLETETDPSVRENIKNVLGE

SEQ ID NO: 81193 - protein, 385 aa, Sporolactobacillus terrae
  REGION 1..385: note = tr|A0A410D5K4|A0A410D5K4_9BACL Epoxyqueuosine reductase OS=Sporolactobacillus terrae OX=269673 GN=queG; PE = 3 SV=1
MTDFQELKEQLIRYSKEIGVDKIGFTTADPFTELKARLYRQRELGYQSGFEEKDIEKRTEPSLLMDGVQSIVSIAMAYPKKMAERPANTKGHRRGAFARVSWGQDYHTILRNRMQKLGEFLVETVPGAKFKSMVDTGELSDRAVAERAGIGWAGKSTNLITKEFGSYVYLGEMLTNIPFPPDKPATDLCGDCTICIDHCPTGALVQGGQLNSQKCIAYLTQTKQELPEEYKKAIGNRLYGCDTCQQVCPYNRDVDSHFHEEMEPDPELSRPLLAPLLSLSNRAFKETFGELSGSWRGKKPIQRNAIVALGNYKEVAAAPELLRLLHDDPRPVIRRTVTWALQQMWDRLEPDMRAHMIQSFEDLLAKEEDEKVHQWIKAKLDAEEG

SEQ ID NO: 81194 - protein, 300 aa, Sporolituus thermophilus
  REGION 1..300: note = tr|A0A1G7IRC8|A0A1G7IRC8_9FIRM Epoxyqueuosine reductase OS=Sporolituus thermophilus DSM 23256 OX=1123285; GN = SAMN05660235_00586 PE=4 SV=1
MKEKLKQFCRSQGLEYVGIAPPGPYPELAAILHDRMAKGQCTEFDGPEIAKRIDPRLTMADVQSVIVCLFPYYIGHQAPANLAKYTYGLDYHHIIRRKLDEIGIYLQANIPGFAYQPFVDTGPLVDRYLAYLAGLGFYGINSHIITDKYGSYVFIGYLLTNYPFAPDRPQNRTCIQCGQCVKMCPGQIILGNFAIDPRGCRSYLTQKKGDLSPAEISIIQKTGLVFGCDVCQDVCPHNRDVALTPLAEFRQQLLPWLDETEVAALSNKEFTCRYGDRAFSWRGKKILLRNFAYIQGRQCR

SEQ ID NO: 81195 - protein, 338 aa, Sporomusa acidovorans
  REGION 1..338: note = tr|A0A259V0U6|A0A259V0U6_9FIRM Epoxyqueuosine reductase OS=Sporomusa acidovorans DSM 3132 OX=1123286; GN = queG_1 PE=4 SV=1
MASLENGIKEKARQLGYEACGIIAAGIFEEFLTQLNTRSELFPHAKPFYDNLRKLAIPKQQIDWAKSVIVCVRRYDKYRIPDGLDRLIGKVFLCDGRLNYSQEYKNNVAFEEYLQQLGFRTVTNAVPARWAAVKAGLGKFRNNNFLYREQGSWVWVDTWVVDKGLEVQPAVDSPQFSCPEGCQKCIKACPTGALSAPLTMDATKCIACRTFRSELKVEESLLEKMGTWLYGCDICQNVCPANANTWQENESCFEEPLSLPELITLEKLFSLDDSTYRTNIQPRFWYINAEDGWFWKCKVIRAMANEDAQKYQDYFLQALNDSHEEVKKMARWALRRRQ

SEQ ID NO: 81196 - protein, 233 aa, Sporomusa acidovorans
  REGION 1..233: note = tr|A0A259U5R1|A0A259U5R1_9FIRM Epoxyqueuosine reductase OS=Sporomusa acidovorans DSM 3132 OX=1123286; GN = queG_4 PE=4 SV=1
MINAVNAMEIKRRVRELGADLCGIAPAARFEDAPQGFQPTDVLKECKSIIVVALRFPLSTLSSSSPAAYTFVRNQLCGKIDTLTFQISSELEQLGCCAVPVPSSEPYEFWDESRRHGQGIVSLKHAAVRAGLGKMGKNTLLINDQLGNMLWLGAVLADADLEPDQVADYQACLPNCNICLEACPAKALDGITIEQRQCRAVSAKYSEGGGGVYTCNLCRKICPQYRGIKVEAG

SEQ ID NO: 81197 - protein, 228 aa, Sporomusa malonica
  REGION 1..228: note = tr|A0A1W2ET02|A0A1W2ET02_9FIRM Epoxyqueuosine reductase QueG (Queuosine biosynthesis) OS=Sporomusa malonica OX=112901 GN=SAMN04488500_12852 PE=4 SV=1
MKTISAEEIRCRAKELGADLCGIASVERFDDAPPGFHPTDVALGCKSVIVLAARFPSSTLAASSQAAYTFVRNRLVDRIDSITVQISSELEQLGYCAVPIPSSDPYDYWDDSRRHGQGILSLKHAAVRAGLGHMGKNTLLVNDELGNMLWLGAVLIDKELEPDLIAGYQTCNPDCRICLDSCPANALDGTTIDQRKCRGVSAKYTEGGGGVYACNLCRKLCPQNKGIK

SEQ ID NO: 81198 - protein, 342 aa, Sporomusa malonica
  REGION 1..342: note = tr|A0A1W2CXI6|A0A1W2CXI6_9FIRM Epoxyqueuosine reductase QueG (Queuosine biosynthesis) OS=Sporomusa malonica OX=112901 GN=SAMN04488500_11281 PE=4 SV=1
MCKSSLALRIREKAVELGFAACGIIKLDAIKGYAEKLEERMDCLPETRSMYEVFLKYATPEQSYGWAKSVVVCITRYGKYKVPENLEGLIGKYYLYDYKLQGHTREFQNHARFEEYLKSLNLKTARELHGVTAARWVAAKAGLGIIRKNNFLYTEHGSWVIIDTWLIDEELELIEEPKIPDCPEGCSECVQSCPTQALTQSYCTSMLTCITRLTWGIKDLPPEDLWDKMGKWVYGCDECQNACPMNYGKWEATDNYPGLGELAEKLSLESIVAMDNEELKNQMLSKFWFIRQETVYQWKVNALRAMANSYESRYEKYIIGALSDENAQVREIAKWACAKNKL

SEQ ID NO: 81199 - protein, 250 aa, Sporomusa silvacetica
  REGION 1..250: note = tr|A0A259URB9|A0A259URB9_9FIRM Epoxyqueuosine reductase OS=Sporomusa silvacetica DSM 10669 OX=1123289; GN = queG_1 PE=4 SV=1
MEETIRKYVLDLGVDDIGFLSVQDYKSPASPAIDSIFPEARSIIILAYHELATCESPSPITAMNGRMDLMEFSRSCNYKLARFLTKDFCAKAMTVPFSYPMDLGNSIAGQLSLRHAAVSAGLGTFGRHNIVVHPQFGTRVCFTAVLTDLELKTTNSTLEDICVNCNQCVTNCPANALDQPGQTDVLRCLQKSQPYGIVASAGFWVKFVNSSADEQNVMLRSEFYAKMYQSQFIGFQYYCFNCMKTCPVGR

SEQ ID NO: 81200 - protein, 251 aa, Sporomusa silvacetica
  REGION 1..251: note = tr|A0A259U9Q3|A0A259U9Q3_9FIRM Epoxyqueuosine reductase OS=Sporomusa silvacetica DSM 10669 OX=1123289; GN = queG_5 PE=4 SV=1
MPEEFYPQNVWPLAKTVIVLGVPVWLPIVEAAPAQLGREQYTITNELLDEAAYRLAAYLNRNGHAAINTCRDGYGDSDVLMENPVAVFSHVWAAHYAGLGRVGWNHTLLTPQFGPRLRLVSILTALELPGDPMIEKDLCTHCMLCQKICPANALAGDRTDLYANMDKRACTGNGKRLRKAYRNPCGFCIKVCPVGKDRQLFQSTNVQKYFKEQEILAQNPDAPEYRSWQHLRKYGGHALEGEIQAARKVEK

SEQ ID NO: 81201 - protein, 345 aa, Sporomusa sp.
  REGION 1..345: note = tr|A0A562GSB6|A0A562GSB6_9FIRM Epoxyqueuosine reductase OS=Sporomusa sp. KB1 OX=943346 GN=Salpa_5623; PE = 4 SV=1
MMDKKELTKKIKMKALELGFSKIGTTTADDFVEYEQELNSRPDYTPWINTPGTGYLIDGCRPSTFYPEGKSIICTVYGFSDILFPEELTPYVGRAYLSRSYRPLEESSCGLRVNAFKDFIKSLGISMYEGGIIVPERMACARAGVITYGKNNFAYTEEDGSFIILYTFVVDTELECDEPTIICKCPPDCQECIKACPTHAIAQARRLLPLNCVLRNNLSNMVIPYELRECLGTKIHGCDACQLACPRNKKVLANASKKDLFLEELKKDFDLERILLLDEKYYQNVVYPIMYNYIRDMDLFRRNAAIALGNTGDQSHIPALKKALENANPLVRDVAQWAIDKLSVK

SEQ ID NO: 81202 - protein, 288 aa, Sporomusa sp.
  REGION 1..288: note = tr|A0A562GLV4|A0A562GLV4_9FIRM Epoxyqueuosine reductase QueG OS=Sporomusa sp. KB1 OX=943346; GN = Salpa_3640 PE=4 SV=1
MKEQIVRKIIDLAGSLSSNRWRSGDDLLAYFDEPLVGFASVNDPLFLKYKQDIGEFYLTPQELFEEEFGSGALSAGTIISVILPVSEVLLQSNRGQSGFPSREWAQLSAYGGQYAAELRSSVIAYMNQLGHRAIAPVLSLKWKTLQVPSNAHTTNWSERHAAYAAGLGTFSLAGALISKRGIAHRTFSVITDWELEPDKRPYTGLYDYCLYYNSDSCGACVSRCSGGAITARGYNNELCYRHNRSPQYMALRAEYGVEKTGCSLCQTKVPCEKSIPVQKRSDRGLVGD

SEQ ID NO: 81203 - protein, 252 aa, Sporomusa sphaeroides
  REGION 1..252: note = tr|A0A1U7MC08|A0A1U7MC08_9FIRM Epoxyqueuosine reductase OS=Sporomusa sphaeroides DSM 2875 OX=1337886; GN = queG_5 PE=4 SV=1
MEEQIRNYILDLGVDDVGFACAQDYHSPKSYEITKLLPEAKSIIVLAFKPLSSCESPSMSAAQNGYLDLGSFARSASYRISRFLERNYKAKIATMPIAYPFEIHNDRKALADFSQRHAAVAAGLGSFGRHNLVIHPQFGTRVIFTSIITNLTLQPSPQCEDFCTQCNLCVENCPARALDEAGKTDIRKCLGHSQPYGLIADITFQLQQLGRSPEEQKQMLMDEQYARLRQAAHLGNQYMCFNCLKSCPIGLA

SEQ ID NO: 81204 - protein, 246 aa, Sporomusa sphaeroides
  REGION 1..246: note = tr|A0A1U7MJE2|A0A1U7MJE2_9FIRM Epoxyqueuosine reductase OS=Sporomusa sphaeroides DSM 2875 OX=1337886; GN = queG_2 PE=4 SV=1
MSMKNQIEQLIVEKVASLNRPDLFRRPIVSFSSATDSRYSELKEIIGPWHLNPTELLPDAQSVISYFVPFTSLVVAAPKTVDGGSEAWGEAYAIINPYFNVVNQAVIQYLSDLGYSASAVQATHTYDPKDMKSIWSHRSAAAIAGLGTFGANRMLITEKGSGGRFCSVLTSATLYEEQAPAETRCLYVKNGSCGLCFKICPVNALVPDSFDKFICQDECNKNQKQDRHGADTCGKCISVCPVAYID

SEQ ID NO: 81205 - protein, 253 aa, Sporomusa termitida
  REGION 1..253: note = tr|A0A517DWC0|A0A517DWC0_9FIRM Epoxyqueuosine reductase OS=Sporomusa termitida OX=2377 GN=queG_5 PE=4; SV = 1
MEQQIRDYILELGVDDVGVACAADYQSPKSYAITKFLPDAKSVIVLAFKPLTSCESPSMSAAQNGYLDLGSFAHTASYRIARQLENKYQAKVATISISYPFEMHNDRRAIADFSQRHAAVAAGLGKIGRHNLVIHPRFGTRVIFTSIITNLDLRPSARCDEDFCIHCNLCVENCPAGALAEEGRTDVMKCLSHSQPYGLGADITFQLQRLGKSPAEQQAMLVDEHYARLRQAAYLGNQYMCFNCLKNCPVGLA

SEQ ID NO: 81206 - protein, 353 aa, Sporomusa termitida
  REGION 1..353: note = tr|A0A517DV91|A0A517DV91_9FIRM Epoxyqueuosine reductase OS=Sporomusa termitida OX=2377 GN=queG_4 PE=4; SV = 1
MCVDAKSFFASDELGYEKCGIIPIQEMDGYAEKLEERIQKVPASEKFYQGQRRLLNLQISYPWAKSVVVLARRYGRYKIPQPVKGQIAKSYLLDLRADPELKEYKSSQAMDQYLQSLGLQVATNRKCGIVGLRWAAMQAGLGVIRRNNFFYAQSGSWVALEAWLTDKEMELRETSDLPPCPKGCNRCVVACPTRSLSEPYTMLPTTCVSFLTTFGGRNLPKEPLSKAFGRCIYGCDICQDVCPMNKGRWQENEDFPGLSELAPTLTPESILEMDEDYYKEKIQPKFFYLSSDELWKWKVNVLCFMRNNYQKEYKSYIIAACENENIKVQEMARAIRDEWGLSNGNTSTALIEY

SEQ ID NO: 81207 - protein, 77 aa, unidentified
  source 1..77: note = Sporomusaceae bacterium
  REGION 1..77: note = tr|A0A3C0UF59|A0A3C0UF59_9FIRM Fe-S oxidoreductase (Fragment) OS=Sporomusaceae bacterium OX=1917525; GN = DCP36_08675 PE=4 SV=1
STPYTMLPNTCVSFMTTFGGRNLPQESLRKTFGNCIYGCDICQDVCPMNKGKWQEEENFPGLAELSPALTPENILQM

SEQ ID NO: 81208 - protein, 73 aa, unidentified
  source 1..73: note = Sporomusaceae bacterium
  REGION 1..73: note = tr|A0A3C0UGZ9|A0A3C0UGZ9_9FIRM tRNA epoxyqueuosine(34) reductase QueG (Fragment); OS = Sporomusaceae bacterium OX=1917525 GN=DCP36_13020 PE=4; SV = 1
MPLNRVCLQCGRCQAACPGQIILGDFTIDPRGCKSYLTQKKAALSPAEVAIIGKTPLVFGCDICQDVCPHNRN

SEQ ID NO: 81209 - protein, 377 aa, Sporosarcina globispora
  REGION 1..377: note = tr|A0A0M0GII4|A0A0M0GII4_SPOGL Iron-sulfur cluster-binding protein OS=Sporosarcina globispora OX=1459; GN = AF332_24450 PE=4 SV=1
MDIVQFKQEVIEYSKTIGIDKIGFTSASTFDEMKNRLIRQQAHHYQSGFEEPDIEKRVNPSLLMDKPRSIISIAVAYPSKMKVRVVSKRGERRGIFCRASWGKDYHHILRERLQKLEEFIQARIPEAICKSMVDTGELVDRAVAQRAGIGWSGKNCSIITPEFGSYVYLGEMITSLPFEPDEPMEDRCGSCNKCVDVCPTGALIQGGQLDAQKCVAFLTQTKGFLAEQYREKLGNRLYGCDTCQTVCPENKGKDFHLHKEMEPDPEVAKPLLRPLLFIGNREFKEKFGPVSGSWRGKKPIQRNAIIALAHYKDETAVDDLIKVMTEDPRPVIRGTAAWALGKIGGEESLAALKQALQQEKDGEVIPEIEKGLSFIEQ

SEQ ID NO: 81210 - protein, 379 aa, Sporosarcina luteola
  REGION 1..379: note = tr|A0A511Z5K8|A0A511Z5K8_9BACL Epoxyqueuosine reductase OS=Sporosarcina luteola OX=582850 GN=queG PE=4; SV = 1
MNVAQLQKSIKEYAASIGIDKIGFTTAAPFLELKNRLRRQQELGYQSGFEESDIEKRTEPVLLLDRAESILSIAIAYPSKMEGSPKGKRGERRGIFCRASWGMDYHHVLREKLQLLEEYISEWLPDAKMRSMVDTGELVDRAVAQRAGIGWSAKNCSIITPEFGSYVYLGEMITNIPFEPDIPMEDQCGDCTLCLDACPTGALIQGGQLNAQRCIAFLTQSKKPIPEEFRAKIGNRVYGCDTCQTVCPKNKGKYNLHQPSFEPEPELTKPLLVPMLNLSNREFKETYGHMSGSWRGKNPIQRNAILALAHFKDESSVPVLAELLVKDPRPVIRGTIAWALGEIGSSEGKAAIERAILQEEDPEVRMEMEKVLETNQRKC

SEQ ID NO: 81211 - protein, 384 aa, Sporosarcina newyorkensis
  REGION 1..384: note = tr|A0A1T4YH18|A0A1T4YH18_9BACL Epoxyqueuosine reductase OS=Sporosarcina newyorkensis OX=759851; GN = SAMN04244570_2589 PE=4 SV=1
MVNVAQLQQEIREFAASIGIDKIGFTTAAPFVKLKDRLKQQQELNYQSGFEEPDVEKRTKPFLLLEGAESIISIAVAYPSKMADSPRGKKGERRGMFCRASWGEDYHTVLRDKLAQLELFILTKVPDARLRSMVDTGELVDRAVAERAGIGWSAKNCSIITPEFGSYVYLGEMITNLPFAPDRAMEDQCLDCTLCLDACPTGALIQPGQLNAQRCIAFLTQTKQPVPEEFRQKIGNRLYGCDTCQTVCPKNKGMNHTHQPAFTPEPERVKPLLLSLLSLSNRQFKEQYGHMSGSWRGKNPIQRNALIALAHFKDESAIPELGRLVREDARPMIRGTAVWALGRIGTEPAEEILQKVSQIEQDEAVIAEINKAMKQLSSNQKKEV

SEQ ID NO: 81212 - protein, 384 aa, Sporosarcina newyorkensis
  REGION 1..384: note = tr|F9DXU8|F9DXU8_9BACL Iron-sulfur cluster-binding protein OS=Sporosarcina newyorkensis 2681 OX=1027292; GN = HMPREF9372_3629 PE=4 SV=1
MVNVAQLQQEIREFAASIGIDKIGFTTAAPFVKLKDRLKQQQELNYQSGFEEPDVEKRTKPLLLLEGAESIISIAVAYPSKLADSPRGKRGERRGIFCRASWGEDYHTVLRDKLAQLELFILTKVPDARLRSMVDTGELVDRAVAERAGIGWSAKNCSIITPEFGSYVYLGEMITNLPFAPDEAMEDQCLDCTLCLDACPTGALIQPGQLNAQRCIAFLTQTKQSVPEEFRQKIGNRLYGCDTCQTVCPKNKGMNHTHQPAFTPEPERVKPLLLSLLSLSNRQFKEQYGHMSGSWRGKNPIQRNALIALAHFKDESAIPELGRLVTEDPRPMIRGTAAWALGRIGTEQAEDILEKVSQIEQDEAVAEEIHKAMKQLSSNQKKEV

SEQ ID NO: 81213 - protein, 381 aa, Sporosarcina pasteurii
  REGION 1..381: note = tr|A0A380CAN3|A0A380CAN3_SPOPA Epoxyqueuosine reductase OS=Sporosarcina pasteurii OX=1474 GN=queG PE=4; SV = 1
MNILELQEEVKKYAATIGIDKIGFTTAAPFHELRNRLVRQQELGFQSGFEEKDINKRTEPALLLDRPESIIAIAIAYPSRMENSVRGKKGERRGIFCRASWGTDYHIVLRERLKLLEEFILARVPTAKLRSMVDTGELADRAVAERAGIGWSGKNCSIITPEFGSYVYLGEMITNIPFAPDEPMEDECGDCTLCLDACPTGALIQGGQLNAQRCIAFLTQTKTSIPEEFRAKIGNRVYGCDTCQTICPKNRKKYNMHQEAFEPEPELVKPILEPMLDLSNRQFREQFGHMAGSWRGKNPIQRNAIIALAHFKEEAAIPKLMEMLLNDQRPVMRGTVAWALGKIGTTASYEAIQAALETEEHADVRLELEKALENWQEETHI

SEQ ID NO: 81214 - protein, 379 aa, Sporosarcina psychrophila
  REGION 1..379: note = tr|A0A127VV25|A0A127VV25_SPOPS Epoxyqueuosine reductase OS=Sporosarcina psychrophila OX=1476; GN = AZE41_03890 PE=4 SV=1
MNAVQLQQSVRDYAESIGIDKIGFTTAAPFRELKNRLKRQQELGYQSGFEEKDLDKRTEPALLLDQAESIIAIAVAYPSKMADSPRGKKGERRGIFCRASWGTDYHTVLREKLSLLEEFILEHAPKAKVRSMVDTGELADRAVAERAGIGWSAKNCSIITPEFGSYVYLGEMITNIPFAPDVPMEDECGDCTLCLDVCPTGALIQGGQLNAQRCIAFLTQSKKPIPEEFRAEFGNRIYGCDTCQTVCPKNKGKHNLHQQAFQPDPELAKPLLQPVLRLSNREFKEKFGHVSGSWRGKNPIQRNAIIALAHFKEESAVPELISMLENDPRPVIRGTIAWALGRIGLEEGYVAIKEALSKEEDPEVRAELEKAADTYILKK

SEQ ID NO: 81215 - protein, 379 aa, Sporosarcina sp.
  REGION 1..379: note = tr|A0A5B0BRF7|A0A5B0BRF7_9BACL tRNA epoxyqueuosine(34) reductase QueG OS=Sporosarcina sp. ANT_H38 OX=2597358 GN=queG PE=4 SV=1
MNAVQLQQSVRNYAESIGIDKIGFTTAAPFRELKNRLKRQQELGYQSGFEEKDLDKRTEPALLLDQAESIIAIAVAYPSKMADSPRGKKGERRGIFCRASWGTDYHTVLREKLRLLEEFILEHAPAAKVRSMVDTGELVDRAVAERAGIGWSAKNCSIITPEFGSYVYLGEMITNIPFAPDVPMEDECGDCTLCLDVCPTGALIQGGQLNAQRCIAFLTQSKMPIPEEFRTEFGNRVYGCDTCQTVCPKNKGKHNLHQQAFQPEPELAKPLLQPILRLSNREFKEIFGHVSGSWRGKNPIQRNAIIALAHFKDESAVPELISMLKNDPRPVIRGTIAWALSRIGLEEGYIAIMEALVIEEDPEVRAELTKASDNWKEKV

SEQ ID NO: 81216 - protein, 377 aa, Sporosarcina sp.
  REGION 1..377: note = tr|A0A345P228|A0A345P228_9BACL tRNA epoxyqueuosine(34) reductase QueG OS=Sporosarcina sp. PTS2304 OX=2283194 GN=queG PE=4 SV=1
MNVAQLQEEVRAFATSIGIDKIGFTTAAPFIKLKDRLKRQQQLNYQSGFEESDIEKRTEPLLLLDQAESIISIAVAYPSKMTESPRGKRGERRGVFCRASWGEDYHTVLRDKLAQLELFIVTKVPHARLRSMVDTGELVDRAVAERAGIGWSAKNCSIITPEFGSYVYLGEMITNLPFEPNEPMEDQCLDCTLCLDVCPTGALVQPGQLNAQRCIAFLTQTKQSIPEEFRHKIGNRVYGCDTCQTVCPKNKGVNSTHQLDFTPDPERVKPLLLSLLSLSNRQFKEQFGHMSGSWRGKNPIQRNALIALAHFKEESAISDITKVLTEDPRPVMRGTAAWALGQIGTSEAIEGLQLGSIVNQEEAVTIEIERALMHCTK

SEQ ID NO: 81217 - protein, 347 aa, Stakelama pacifica
  REGION 1..347: note = tr|A0A4V3BTL6|A0A4V3BTL6_9SPHN Epoxyqueuosine reductase OS=Stakelama pacifica OX=517720 GN=queG PE=3 SV=1
MSEDKSLESRIFEKAAELGFVACGFAPADAAPRTAERLRQWLAEGRHGDMIWMENRAHHRESPKGLWPEVRSVIALGMSYAPGYDPLALEDAGERGRISVYAQGRDYHDIVKKALKALARWLVENAGGELKVFVDTAPVMEKPLSEAAGLGWQGKHTNLVSRDHGSWLFLGAIYTTLDLAPTGAGRDSCGSCDACQTACPTDAFPAPYQLDARRCISYLTIELHGPIPHEFRESIGNRIYGCDDCLAACPWNKFARAAAANRAFLPRGELTAPRLADLLALDDAAFREVFSGSPIKRIGRDRMVRNCLIAAGNSGDASLTPPVRALMDDPDPVVQEAAQWALERLPA

SEQ ID NO: 81218 - protein, 316 aa, unidentified
  source 1..316: note = Stanieria cyanosphaera
  REGION 1..316: note = tr|K9XX60|K9XX60_STAC7 Epoxyqueuosine reductase; OS = Stanieria cyanosphaera (strain ATCC 29371 / PCC 7437); OX = 111780 GN=queG PE=3 SV=1
MSQNLNSEDIKSAAKSFGFHKVGIATINNNYQDDAVAHLQTWLALGYHADLSWMANPKRENITACMPEVRSVICVALNYYTPHQHSNHPEVAKISRYGWGRDYHKIMDKKLKALSNWLTAQQEGIKTRYYADTGPIQDKVWAQRAGIGWIAKNGNVITRDYGSWVFLGEILTNLELPPDRPHTQHCGTCTRCLDACPTGAITKPFVVDANRCLAYHTIENRAEQLPDAIANNLQGWVAGCDICQDVCPWNQRFAQETDIKEFQPYPENLNPKLTELAEITEPEWDSRFRASALRRIKLPMLQRNALANLKSKKMMS

SEQ ID NO: 81219 - protein, 314 aa, unidentified
  source 1..314: note = Stanieria sp.
  REGION 1..314: note = tr|A0A140K8T8|A0A140K8T8_9CYAN Epoxyqueuosine reductase OS=Stanieria sp. NIES-3757 OX=1807358 GN=queG; PE = 3 SV=1
MSQNLNSEDIKSAAKSFGFHKVGIATINNNYQDDAVAHLQTWLALGYHADLSWMANPKRKNIAACMPEVRSVICVALNYYTPHQHSNHPEVAKISRYGWGRDYHKIMEKKLKALNNWLTAQQEGIKTRYYADTGPIQDKVWAQRAGIGWIAKNGNVITRDYGSWVFLGEILTNLELTPDRPHTQHCGTCTRCLDACPTKAITKPFVVDANRCIAYHTIENRAEQLPDAIAANLQGWVAGCDICQDVCPWNQRFAQETDVEDFQPYPENLNPKLTELAEISEPEWNRRFRASALRRIKLPMLQRNALANLKSKKE

SEQ ID NO: 81220 - protein, 375 aa, Staphylococcus agnetis
  REGION 1..375: note = tr|A0A2T4MS03|A0A2T4MS03_9STAP tRNA epoxyqueuosine(34) reductase QueG OS=Staphylococcus agnetis OX=985762 GN=queG PE=4 SV=1
MDLVTLKQEIIAYAHQIGIDDIGFTTADPFDELKNKLIEYHEKGYASGFEESDISLRVDPKLSMSSAQSIIAIAVGYPNKLKGAPKSVRGERRGMFARASWGQDYHSIMRRRLNDLGLFIQSKVPEAEMMSMVDTGVLSDRAVAERAGLGFIGRNGFVINPELGTWTYLGEMLINLPFPPDEQILDSCGTCTICVDRCPTGALVGDGQLNSQKCISFLTQTKGYLKDEYRYKIGNRLYGCDTCQQVCPKNRGINTEQEDIILEPEILKPKLVPLLQMSNKEFKATYGHLAGAWRGKKPIQRNAIIALAHFNETTAIPDLKQVAENDPRPMIRGTAYWAIGQILGEAAREYIMSRYDDELEEVQQEMIKGLEMRRL

SEQ ID NO: 81221 - protein, 375 aa, Staphylococcus agnetis
  REGION 1..375: note = tr|A0A2T4MJV7|A0A2T4MJV7_9STAP tRNA epoxyqueuosine(34) reductase QueG OS=Staphylococcus agnetis OX=985762 GN=queG PE=4 SV=1
MDLVTLKQEIIAYAHQIGIDDIGFTTADPFDELKNKLIEYHTKGYASGFEESDIALRVEPKLSMSSAESIIAIAVGYPNKLKNAPKSVRGERRGMFARASWGQDYHTIMRRRLDDLAAFIQSKVPDVEIMSMVDTGVLSDRAVAERAGLGFTGRNGFVINPELGTWTYLGEMLINLPFPPDEQILDSCGECTICVDRCPTGALVGNGQLNSQKCISYLTQTKGYLKDEYRYKIGNRLYGCDTCQQVCPKNRGINTEQEDIILEPEILKPKLVPLLQMSNKEFKATYGHLAGAWRGKKPIQRNAIIALAHFNETTAIPDLKQVAEDDPRPMIRGTAYWAIGQILGEAAREYIMSRYDDELEEVQQEMIKGLEMRRL

SEQ ID NO: 81222 - protein, 375 aa, unidentified
  source 1..375: note = Staphylococcus argensis
  REGION 1..375: note = tr|A0A2K4FG71|A0A2K4FG71_9STAP Epoxyqueuosine reductase OS=Staphylococcus argensis OX=1607738 GN=queG; PE = 3 SV=1
MDVKQLKEDVIAYAHTIGIDSIGFTTADPFDELKQKLVDYHAKGYASGFEEDDIQLRTEPKLSLPTARSIIAIAVGYPNKLKGAPRSKRGERRGMFARASWGQDYHTIMRKRLDKLAEYIESRVPDVEMKSMVDTGVLSDRAVAERAGLGYTGRNGFVINPDLGTWTYLGEMLVSIPFPPDDPLIDSCGDCTMCVDRCPTGALVGNGQLNAQKCISFLTQTKGYLQDEYRYKIGNRLYGCDTCQQVCPRNRGINTEHDDIVLEPEILKPRLVPLLQMSNREFKETYGHLAGAWRGKKPIQRNAIIALAHFKETSAIPELEEVAVNDPRPMIRATAYWAIGQIQGDEARPFIEAHYDEELEEVQEEMIKGLEMGRT

SEQ ID NO: 81223 - protein, 376 aa, unidentified
  source 1..376: note = Staphylococcus argenteus
  REGION 1..376: note = tr|A0A348BCC4|A0A348BCC4_9STAP Epoxyqueuosine reductase OS=Staphylococcus argenteus OX=985002 GN=queG; PE = 3 SV=1
MDTKQLKQDIIDYAYTIGIDSIGFTTADPFDELKQKLEAYHSNGYASGFEESDIALRTEPKLSLPTSRSIIAIAVGYPNKLKGAPKSVRGDRRGLFARASWGQDYHSIMRKRLDKLAAFIESKVPNVEIKSMVDTGVLSDRAVAERAGLGFVGRNGFVINPNLGTWTYLGEMLVSIPFEPDDPLLDSCGDCTICVDRCPTSALVGNGQLNSQKCISFLTQTKGYMPDQYRYKIGNRLYGCDTCQQVCPKNRGINTEQDDIILEPEILKPRLIPLLRMSNKEFKQTYGHLAGAWRGKKPIQRNAILALAHFNEVDAIPELKKVATTDERPMIRATAYWAIGQILGDDAKDFINANYEKEDAEVQQEMIKGIETRREK

SEQ ID NO: 81224 - protein, 381 aa, unidentified
  source 1..381: note = Staphylococcus argenteus
  REGION 1..381: note = tr|A0A4U7FZA4|A0A4U7FZA4_9STAP Epoxyqueuosine reductase OS=Staphylococcus argenteus OX=985002 GN=queG; PE = 3 SV=1
MGGIRLDTKQLKQDIIDYAYTIGIDSIGFTTADPFDELKQKLEAYHSNGYASGFEESDIALRTEPKLSLPTSRSIIAIAVGYPNKLKGAPKSVRGDRRGLFARASWGQDYHSIMRKRLDKLAAFIESKVPNVEIKSMVDTGVLSDRAVAERAGLGFVGRNGFVINPNLGTWTYLGEMLVSIPFEPDDPLLDSCGDCTICVDRCPTSALVGNGQLNSQKCISFLTQTKGYMPDQYRYKIGNRLYGCDTCQQVCPKNRGINTEQDDIILEPEILKPRLIPLLRMSNKEFKQTYGHLAGAWRGKKPIQRNAILALAHFNEVDAIPELKKVATTDERPMIRATAYWAIGQILGDDAKDFINANYEKEDAEVQQEMIKGIETRREK

SEQ ID NO: 81225 - protein, 371 aa, Staphylococcus arlettae
  REGION 1..371: note = tr|A0A380CC22|A0A380CC22_9STAP (Fe-S)-binding protein OS=Staphylococcus arlettae OX=29378 GN=queG PE=4; SV = 1
MKQEVIDYAHSIGIDHIGFTTADPFDELKQKLEDYHSKGYASGFEEPDINLRTEPKLSLPTARSIIAIAVGYPNKLKGAPKSVRGDRRGLFARASWGQDYHTIMRKRLDKLEQFLRSKVADIEVKSMVDTGVLSDRAVAERAGLGFTGRNGFVINPDLGTWTYLGEMLVSVPFAPDDPLLDSCGDCTICVDRCPTGALVGDGQLNSQKCISFLTQTKGYMADEYRYKIGNRLYGCDTCQQVCPKNRGINTQHDDIVLEPEILKPRLVPLLKMSNKEFKNTYGHLAGAWRGKKPIQRNAILALAHFKEEAAIPDLKDVALTDPRPMIRATAYWAIGQILGEEARPFIDAYYDTEIEEVQQEMLKGLEQRREH

SEQ ID NO: 81226 - protein, 376 aa, Staphylococcus arlettae
  REGION 1..376: note = tr|A0A5F0THP9|A0A5F0THP9_9STAP tRNA epoxyqueuosine(34) reductase QueG OS=Staphylococcus arlettae OX=29378 GN=queG PE=4 SV=1
MDINQLKQEVIDYAHSIGIDHIGFTTADPFDELKQKLEDYHSKGYASGFEEPDINLRTEPKLSLPTARSIIAIAVGYPNKLKGAPKSVRGDRRGLFARASWGQDYHTIMRNRLDKLEQFLRSKVADIEVKSMVDTGVLSDRAVAERAGLGFTGRNGFVINPDLGTWTYLGEMLVSVPFAPDDPLLDSCGDCTICVDRCPTGALVGDGQLNSQKCISFLTQTKGYMADEYRYKIGNRLYGCDTCQQVCPKNRGINTQHDDIVLEPEILKPRLVPLLKMSNKEFKNTYGHLAGAWRGKKPIQRNAILALAHFKEEAAIPDLKDVALTDPRPMIRATAYWAIGQILGEEARPFIDAYYDTEIEEVQQEMLKGLEQRREH

SEQ ID NO: 81227 - protein, 376 aa, Staphylococcus aureus; identical to SEQ ID NO: 81223
  REGION 1..376: note = tr|A0A0U1MQK9|A0A0U1MQK9_STAAU Epoxyqueuosine reductase OS=Staphylococcus aureus OX=1280 GN=queG PE=3; SV = 1

SEQ ID NO: 81228 - protein, 375 aa, Staphylococcus aureus
  REGION 1..375: note = tr|A0A0E1AHL9|A0A0E1AHL9_STAAU Epoxyqueuosine reductase OS=Staphylococcus aureus subsp. aureus Z172; OX = 1406863 GN=queG PE=3 SV=1
MDTKQLKQDIIDYAYTIGIDSIGFTTADPFDELKQKLEAYHANGYASGFEESDIALRTEPKLSLPTARSIIAIAVGYPNKLKGAPKSVRGDRRGLFARASWGQDYHTIMRKRLDMLAAFIESKVPDVEIKSMVDTGVLSDRAVAERAGLGFVGRNGFVINPKLGTWTYLGEMLVSIPFEPDDPLLDSCGDCTICVDRCPTSALVGNGQLNSQKCISFLTQTKGYMPDQYRYKIGNRLYGCDTCQQVCPKNRGINTEQDDIILEPEILKPRLVPLLRMSNKEFKQTYGHLAGAWRGKKPIQRNAILALAHFNEVDAIPELKKVATTDERPLIRATAYWAIGQILGEEARDFINANYDQEDAEVQNEMIKGLDTRRE

SEQ ID NO: 81229 - protein, 376 aa, Staphylococcus auricularis
  REGION 1..376: note = tr|A0A2T4MAJ7|A0A2T4MAJ7_9STAP tRNA epoxyqueuosine(34) reductase QueG OS=Staphylococcus auricularis OX=29379 GN=queG PE=4 SV=1
MDLKQLKQDVIEYAHSIGIDSIGFTTADPFDELKQKLVDYHAKGYASGFEEDDINLRTEPKLSLPTARSIIAIAVGYPNKMKGAPKSVRGDRRGMFARASWGQDYHTIMRTRLDKLADYLRSRVEDVEIKSMVDTGVLSDRSVAERAGLGYVGRNGFVINPDLGTWTYLGEMLVSIPFEPDDPLLDSCGDCTICVDRCPTGALVGNGQLNSQKCISFLTQTKGYLEDRYRYKIGNRLYGCDTCQQVCPRNRGINTQHDDIVLEPEVLKPRLVPLLKMSNKEFKNTYGHLAGAWRGKKPIQRNAIIALAHFKEETAIPDLEDVALNDPRPMIRGTAYWAIGQIQGEDARPFIEAHYDDEIEEVQAEMIKGLEMGRES

SEQ ID NO: 81230 - protein, 376 aa, Staphylococcus auricularis
  REGION 1..376: note = tr|A0A2K4BWR0|A0A2K4BWR0_9STAP (Fe-S)-binding protein OS=Staphylococcus auricularis OX=29379 GN=queG; PE = 4 SV=1
MDLKQLKQDVIEYAHSIGIDSIGFTTADPFDELKQKLVDYHAKGYASGFEEDDINLRTEPKLSLPTARSIIAIAVGYPNKMKGAPKSVRGDRRGMFARASWGQDYHTIMRTRLDKLADYLRSRVEDVEIKSMVDTGALSDRSVAERAGLGYVGRNGFVINPDLGTWTYLGEMLVSIPFEPDDPLLDSCGDCTICVDRCPTGALVGNGQLNSQKCISFLTQTKGYLEDRYRYKIGNRLYGCDTCQQVCPRNRGINTQHDDIVLEPEVLKPRLVPLLKMSNKEFKNTYGHLAGAWRGKKPIQRNAIIALAHFKEETAIPDLEDVALNDPRPMIRGTAYWAIGQIQGEDARPFIEAHYDDEIEEVQAEMIKGLEMGRES

SEQ ID NO: 81231 - protein, 375 aa, Staphylococcus capitis
  REGION 1..375: note = tr|A0A0U1EA51|A0A0U1EA51_STACP Epoxyqueuosine reductase OS=Staphylococcus capitis OX=29388 GN=queG PE=3; SV = 1
MDYKQLKREIIDYAHSIGIDSIGFTTADPFDELKQKLESYHSKGFASGFEESDIALRTEPKLSLPSARSIIAIAVGYPNKLKGAPKSVRGDRRGMFARASWGQDYHTIMRKRLDKLSEFLREKVPDVEIQSMVDTGVLSDRAVAERAGLGFVGRNGFVISPELGTWTYLGEMLVSIPFEPDDPILDSCGDCTICVDRCPTGALVGNGQLNSQKCISFLTQTKGYLQDEYRYKIGNRLYGCDTCQQVCPKNRGINTQHDDIVLEPEILKPRLVPLLQMSNKEFKNTYGHLAGAWRGKKPIQRNAILALAHFNEESAIPELKEVALNDPRPMIRGTAYWAIGQIQGEDAKAFINENYEKEIEEVQVEMKKGLDMRRD

SEQ ID NO: 81232 - protein, 387 aa, Staphylococcus capitis
  REGION 1..387: note = tr|A0A341ERD2|A0A341ERD2_STACP tRNA epoxyqueuosine(34) reductase QueG OS=Staphylococcus capitis subsp. capitis OX=72758 GN=queG PE=4 SV=1
MTYVILCEGAKLVDYKQLKREIIDYAHSIGIDSIGFTTADPFDELKQKLESYHSKGFASGFEESDIALRTEPKLSLPSARSIIAIAVGYPNKLKGAPKSVRGDRRGMFARASWGQDYHTIMRKRLDKLSEFLRVKVPDVEIQSMVDTGVLSDRAVAERAGLGFVGRNGFVISPELGTWTYLGEMLVSIPFEPDDPILDSCGDCTICVDRCPTGALVGNGQLNSQKCISFLTQTKGYLQDEYRYKIGNRLYGCDTCQQVCPKNRGINTQHDDIVLEPEILKPRLVPLLQKNNKEFKNTYGHLAGAWRGKKPIQRNAILALAHFNEESAIPELKEVALNDPRPMIRGTAYWAIGQIQGEDAKAFINENYEKEIEEVQVEMKKGLDMRRD

SEQ ID NO: 81233 - protein, 375 aa, Staphylococcus caprae
  REGION 1..375: note = tr|C5QTJ1|C5QTJ1_9STAP Epoxyqueuosine reductase; OS = Staphylococcus caprae M23864:W1 OX=525378 GN=queG PE=3; SV = 1
MDYKQLKREIIDYAHSIGIDSIGFTTADPFDELKQKLESYHSRGYASGFEESDIALRTEPKLSLPSARSIIAIAVGYPNKLKGAPKSVRGDRRGMFARASWGQDYHTIMRKRLDKLSEFLRERVPNVEIQSMVDTGVLSDRAVAERAGLGFVGRNGFVISPELGTWTYLGEMLVSIPFEPDDPILDSCGDCTICVDRCPTGALVGNGQLNSQKCISFLTQTKGYLEDEYRYKIGNRLYGCDTCQQVCPKNRGINTQHDDIVLEPEILKPRLVPLLQMSNKEFKNTYGHLAGAWRGKKPIQRNAIIALAHFKEENAIPELKEVALNDPRPMIRGTAYWAIGQIQGEDARHFINENFEKEIEEVQVEMKKGLEMRRD

SEQ ID NO: 81234 - protein, 375 aa, Staphylococcus carnosus
  REGION 1..375: note = tr|B9DMX7|B9DMX7_STACT Epoxyqueuosine reductase; OS = Staphylococcus carnosus (strain TM300) OX=396513; GN = queG PE=3 SV=1
MLDYKQLKKDIIEYAYQIGIDSIGFTTADPFDELKQKLVDYHAKGYASGFEESDIDLRVNPKLSMPTVRSIIAIAVGYPNKLKGAPRSVRGDRRGMFARASWGQDYHTIMRKRLDKLAEYIKTRVPDVEMMSMVDTGVLSDRAVAERAGLGYTGRNGFVINPDLGTWTYLGEMLVSIPFEPDDPLLDSCGDCTICVDRCPTGALVGDGQLNSQKCISFLTQTKGYLPDEYRSKIGNRLYGCDTCQQVCPRNRGINTEHDDIVLEPEILKPRLIPLLQMSNKEFKNTYGHLAGAWRGKKPIQRNAIIALAHFKEETAIPELKEVAINDPRPMIRGTAYWAIGQIAGETERDFIEQHLADELDEVQEEMVKGLEKRN

SEQ ID NO: 81235 - protein, 375 aa, Staphylococcus carnosus
  REGION 1..375: note = tr|A0A380F4H5|A0A380F4H5_STACA Epoxyqueuosine reductase OS=Staphylococcus carnosus subsp. utilis; OX = 147449 GN=queG PE=3 SV=1
MLDYKQLKKDIIEYAYQIGIDSIGFTTADPFDELKQKLVDYHAKGYASGFEESDIDLRVNPKLSMSTVRSIIAIAVGYPNKLKGAPRSVRGDRRGMFARASWGQDYHTIMRKRLDKLAEYIKTRVPDVEMMSMVDTGVLSDRAVAERAGLGYTGRNGFVINPDLGTWTYLGEMLVSIPFEPDDPLLDSCGDCTICVDRCPTGALVGDGQLNSQKCISFLTQTKGYLPDEYRSKIGNRLYGCDTCQQVCPRNRGINTEHDDIVLEPEILKPRLIPLLQMSNKEFKNTYGHLAGAWRGKKPIQRNAIIALAHFKEETAIPELKEVAINDPRPMIRGTAYWAIGQIAGETERDFIEQHLADELDEVQEEMVKGLEKRN

SEQ ID NO: 81236 - protein, 377 aa, Staphylococcus chromogenes
  REGION 1..377: note = tr|A0A4U0D931|A0A4U0D931_STACR tRNA epoxyqueuosine(34) reductase QueG OS=Staphylococcus chromogenes OX=46126 GN=queG PE=4 SV=1
MDIKTLKQEIIDYAQQIGIDDIGFTTADPFDELKNKLIDYHENGYASGFEESDIQLRTEPKLSMASAQSIIAIAVGYPNKLKNAPKSVRGDRRGMFARASWGQDYHTIMRRRLDDLATFISSKVPEAEMMSMVDTGVLSDRAVAERAGLGFTGRNGFVINPKLGTWSYLGEMLINIPFPPDEQIMDSCGTCTICVNRCPTGALVGDGQLNSQKCISFLTQTKGYLKDEYRYKIGNRLYGCDTCQQVCPKNRGINTEQEDIILEPEILKPRLIPLLQMTNKEFKNTYGHLAGAWRGKKPIQRNAIIALAHFNEVSAIPELKQVAENDPRPMIRGTAYWAIGQILGVDAKEYIMSHYDDELEEVQNEMLKGLEMRRQTK

SEQ ID NO: 81237 - protein, 377 aa, Staphylococcus chromogenes
  REGION 1..377: note = tr|A0A2T4LZ25|A0A2T4LZ25_STACR tRNA epoxyqueuosine(34) reductase QueG OS=Staphylococcus chromogenes OX=46126 GN=queG PE=4 SV=1
MDIKTLKQEIIDYAQQIGIDDIGFTTADPFDELKNKLIDYHENGYASGFEESDIQLRTEPKLSMASAQSIIAIAVGYPNKLKNAPKSVRGDRRGMFARASWGQDYHTIMRRRLDDLATFISSKVPEAEMMSMVDTGVLSDRAVAERAGLGFTGRNGFVINPKLGTWSYLGEILINIPFPPDEQIMDSCGTCTICVDRCPTGALVGDGQLNSQKCISFLTQTKGYLKDEYRYKIGNRLYGCDTCQQVCPKNRGINTEQEDIILEPEILKPRLIPLLQMTNKEFKNTYGHLAGAWRGKKPIQRNAIIALAHFNEVSAIPELKQVAENDPRPMIRGTAYWAIGQILGVDAKEYIMSHYDDELEEVQNEMLKGLEMRRQTK

SEQ ID NO: 81238 - protein, 375 aa, Staphylococcus cohnii
  REGION 1..375: note = tr|A0A3A0MHU2|A0A3A0MHU2_9STAP tRNA epoxyqueuosine(34) reductase QueG OS=Staphylococcus cohnii; OX = 29382 GN=queG PE=4 SV=1
MNINQLKQDVIDYAHSIGIDSIGFTTADPFDELKQKLVDYHEKGYASGFEEPDIGLRTEPKLTLPTARSIIAIAVGYPNKLKGAPRSVRGDRRGMFARASWGQDYHSIMRKRLDKLAEYLETRVPDVEIKSMVDTGVLSDRAVAERAGLGYVGRNGFVINPDLGTWTYLGEMLVSVPFPPDDPIIDSCGDCTICVDRCPTGALVGDGQLNSQKCISFLTQTKGYLQDEYRYKIGNRLYGCDTCQQVCPRNRGINTQHDDIVLEPEILKPRLVPLLQMSNKEFKNTYGHLAGAWRGKKPIQRNAILALAHFKEETAIPELQEVALNDPRPMIRATAFWAIGQIQGEQARSFIESHYESELEEVQHEMIKGLNMRRE

SEQ ID NO: 81239 - protein, 375 aa, Staphylococcus cohnii; identical to SEQ ID NO: 74978
  REGION 1..375: note = tr|A0A0M2NRK2|A0A0M2NRK2_STACC Epoxyqueuosine (OQ) reductase QueG OS=Staphylococcus cohnii subsp. cohnii; OX = 74704 GN=UF66_2046 PE=4 SV=1

SEQ ID NO: 81240 - protein, 375 aa, Staphylococcus condimenti
  REGION 1..375: note = tr|A0A448JH32|A0A448JH32_9STAP Epoxyqueuosine reductase OS=Staphylococcus condimenti OX=70255 GN=queG; PE = 3 SV=1
MLDYKQLKKDIIEYAYQIGIDSIGFTTADPFDELKQKLVDYHAKGYASGFEESDIELRVNPKLSMPTARSIIAIAVGYPNKLKGAPRSVRGDRRGMFARASWGQDYHTIMRKRLDKLAEYIKTRVPDVEMLSMVDTGVLSDRAVAERAGLGYTGRNGFVINPDLGTWTYLGEMLVSIPFEPDDPLLDSCGDCTICVDRCPTGALVGDGQLNSQKCISFLTQTKGYLPDDYRSKIGNRLYGCDTCQQVCPRNRGINTEQDDIVLEPEILKPRLIPLLQMSNKEFKNTYGHLAGAWRGKKPIQRNAIIALAHFKEETAIPELKEVAINDPRPMIRGTAYWAIGQIAGESERDFIEQHLADELDEVQKEMVKGLEKRN

SEQ ID NO: 81241 - protein, 374 aa, Staphylococcus condimenti
  REGION 1..374: note = tr|A0A4Q7CQ56|A0A4Q7CQ56_9STAP Epoxyqueuosine reductase OS=Staphylococcus condimenti OX=70255 GN=queG; PE = 3 SV=1
MDYKQLKKDIIEYAYQIGIDSIGFTTADPFDELKQKLVDYHAKGYASGFEESDIELRVNPKLSMPTARSIIAIAVGYPNKLKGAPRSVRRDRRGMFARASWGQDYHTIMRKRLDKLAEYIKTRVPDVEMLSMVDTGVLSDRAVAERAGLGYTGRNGFVINPDLGTWTYLGEMLVSIPFEPDDPLLDSCGDCTICVDRCPTGALVGDGQLNSQKCISFLTQTKGYLPDDYRSKIGNRLYGCDTCQQVCPRNRGINTEQDDIVLEPEILKPRLIPLLQMSNKEFKNTYGHLAGAWRGKKPIQRNAIIALAHFKEETAIPELKEVAINDPRPMIRGTAYWAIGQIAGESERDFIEQHLADELDEVQKEMVKGLEKRN

SEQ ID NO: 81242 - protein, 376 aa, Staphylococcus delphini
  REGION 1..376: note = tr|A0A447YX50|A0A447YX50_9STAP Iron-sulfur cluster-binding protein OS=Staphylococcus delphini; OX = 53344 GN=queG PE=4 SV=1
MDVRALKEEIIAYAHTIGINRIGFTTADPFDELKQKLVDYHAKGYASGFEPSDIALRTEPKLSLPTARSIIAIAVGYPNKLKGAPKSVRGDRRGMFARASWGQDYHSIMRRRLDDLAAFIQSKVPDVELMSMVDTGVLSDRAVAERAGLGFVGRNGFVINPDLGTWSYLGEMLVSIPFPPDDPLLDSCGDCTICVDRCPTGALVGNGQLNSQKCISFLTQTKSYLPDEYRYKIGNRLYGCDTCQQVCPKNRGINTEQDDIHLEPEILKPRLVPLLKMNNKTFKNTFGHLAGAWRGKKPIQRNAILALAHFKEETAIPDLKDVAETDPRPMIRATAFWAIGQILGDAAKDYVMSHYDNELEEVQVEMIKGLEMRRDE

SEQ ID NO: 81243 - protein, 376 aa, Staphylococcus delphini
  REGION 1..376: note = tr|A0A2A4GVR0|A0A2A4GVR0_9STAP Epoxyqueuosine reductase OS=Staphylococcus delphini OX=53344 GN=queG PE=3; SV = 1
MDVRALKEEIIAYAHTIGINRIGFTTADPFDELKQKLVDYHAKGYASGFEPSDIALRTEPKLSLPTARSIIAIAVGYPNKLKGAPKSVRGDRRGMFARASWGQDYHSIMRRRLDDLAAFIQSKVPDVELMSMVDTGVLSDRAVAERAGLGFVGRNGFVINPDLGTWSYLGEMLVSIPFPPDDPLLDSCGDCTICVDRCPTGALVGNGQLNSQKCISFLTQTKGYLPDEYRYKIGNRLYGCDTCQQVCPKNRGINTEQDDIHLEPEILKPRLVPLLKMNNKTFKNTFGHLAGAWRGKKPIQRNAILALAHFKEETAIPDLKDVAETDPRPMIRATAFWAIGQILGDAAKDYVMSHYDNELEEVQVEMIKGLEMRRDE

SEQ ID NO: 81244 - protein, 375 aa, Staphylococcus devriesei
  REGION 1..375: note = tr|A0A2T4KG76|A0A2T4KG76_9STAP tRNA epoxyqueuosine(34) reductase QueG OS=Staphylococcus devriesei OX=586733 GN=queG PE=4 SV=1
MNYKELKREIIDFAHSIGIDSIGFTTADPFDELKQKLEDYHSKGYASGFEESDIALRTEPKLSLPTARSIIAIAVGYPNKLKGAPKSVRGDRRGMFARASWGQDYHTIMRKRFDKLAEYIQSKVPDVEIQSMVDTGVLSDRAVAERAGLGFAGRNGFIINPDLGTWTYLGEMLVSIPFEPDDPILDSCGDCTICVDRCPTGALVGNGQLNAQKCISFLTQTKGYLQDEYRYKIGNRLYGCDTCQQVCPKNRGINTVHEDIVLEPEILKPRLVPLLQMSNKEFKNTYGHLAGAWRGKKPIQRNAIIALAHFNEETAIPELKEVALNDPRPMIRGTAYWAIGQILGEEARSFIEEYYDSELEEVQQEMIKGLEMRKP

SEQ ID NO: 81245 - protein, 375 aa, Staphylococcus devriesei
  REGION 1..375: note = tr|A0A2T4K908|A0A2T4K908_9STAP Epoxyqueuosine reductase OS=Staphylococcus devriesei OX=586733 GN=queG; PE = 3 SV=1
MDYKELKSEIIDFAHSIGIDSIGFTTADPFDELKQKLEDYHSKGYASGFEESDIALRTEPKLSLPTARSIIAIAVGYPNKLKGAPKSVRGDRRGMFARASWGQDYHTIMRKRLDKLAEFIQTKVPDVEIQSMVDTGVLSDRAVAERAGLGFAGRNGFIINPDLGTWTYLGEMLVSIPFEPDDPILDSCGDCTICVDRCPTGALVGNGQLNAQKCISFLTQTKGYLQDEYRYKIGNRLYGCDTCQQVCPKNRGINTVHDDIVLEPEILKPRLVPLLQMSNKEFKNTYGHLAGAWRGKKPIQRNAIIALAHFNEETAIPELKEVALNDPRPMIRGTAYWAIGQILGEEARSFIEEHYDNELEEVQQEMTKGLEMRKP

SEQ ID NO: 81246 - protein, 375 aa, unidentified
  source 1..375: note = Staphylococcus edaphicus
  REGION 1..375: note = tr|A0A2C6WRT0|A0A2C6WRT0_9STAP tRNA epoxyqueuosine(34) reductase QueG OS=Staphylococcus edaphicus OX=1955013 GN=queG PE=4 SV=1
MDLNQLKQDVIDYAHTIGIDSIGFTTADPFDELKQKLADYHAKGYASGFEESDIELRTEPKLSLPTARSIIAIAVGYPNKLKGAPKSVRGDRRGMFARASWGQDYHSIMRKRLDKLGAYLETRVEDVEIQSMVDTGVLSDRAVAERAGLGYVGRNGFVINPELGTWTYLGEMLVSIPFPPDDPLIDSCGDCTICVDRCPTGALVGDGQLNSQKCISFLTQTKGYLADEYRYKIGNRLYGCDTCQQVCPRNKGINTQHDDIVLEPEILKPRLVPLLQMSNKEFKNTYGHLAGAWRGKKPIQRNAIVALAHFKDETAIPELKEVALNDPRPMIRGTAYWAIGQIQGETARPFILQQYDNELAEVQTEMMKGLEMRSE

SEQ ID NO: 81247 - protein, 380 aa, Staphylococcus epidermidis
  REGION 1..380: note = tr|A0A4Y7VR22|A0A4Y7VR22_STAEP Epoxyqueuosine reductase OS=Staphylococcus epidermidis OX=1282 GN=queG; PE = 3 SV=1
MAKLMNNKLKKEIIDFAHSIGIDSIGFTTADPFDELKQKLEEYHAKGYASGFEESNISLRTEPKLSLPSARSIIAIAVGYPNKLKGAPKSVKGDRRGMFARASWGQDYHSIMRKRLDKLADFIKEKVPDVEIQSMVDTGVLSDRAVAERAGLGFTGRNGFVISPELGTWSYLGEMLVSIPFEPDDPLLDSCGDCTICVDRCPTGALVGNGQLNSQKCISFLTQTKGYLQDEYRYKIGNRLYGCDTCQQVCPKNRGINTQHDDIVLEPEILKPRLVPLLQMSNKKFKSTYGHLAGAWRGKKPIQRNAIIALAHFKEESAIPELKEVALNDPRPMIRGTAYWAIGQILEDDAIPFIDAHYENEIEEVQIEMKKGLQMRREQK

SEQ ID NO: 81248 - protein, 380 aa, Staphylococcus epidermidis; identical to SEQ ID NO: 81247
  REGION 1..380: note = tr|A0A0E1VKB0|A0A0E1VKB0_STAEP Epoxyqueuosine reductase OS=Staphylococcus epidermidis W23144 OX=525376; GN = queG PE=3 SV=1

SEQ ID NO: 81249 - protein, 376 aa, Staphylococcus equorum
  REGION 1..376: note = tr|A0A1E5TNY5|A0A1E5TNY5_9STAP Epoxyqueuosine reductase OS=Staphylococcus equorum OX=246432 GN=queG PE=3; SV = 1
MDLNQLKQDVIDYAHSIGIDSIGFTTADPFDEMKQKLVDYHAKGYASGFEESDIELRTEPKLNLPTARSIIAIGVGYPNKLKGAPKSVRGDRRGMFARASWGQDYHSIMRKRLDKLGEYLESRVEDVEIKSMVDTGALSDRAVAERAGLGFVGRNGFVINPDLGTWTYLGEMLVSIPFAPDDPLIDSCGDCTICVDRCPTGALVGDGQLNSQKCISFLTQTKGYLEDEYRYKIGNRLYGCDTCQQVCPKNKGINTQHDDIELEPEILKPRLVPLLKMSNKEFKNTYGHLAGAWRGKKPIQRNAIIALAHFKEETAIPELQDVALDDPRPMIRATAYWAIGQIQGEAARPFIEQHYENELEEVQIEMLKGLETRSEK

SEQ ID NO: 81250 - protein, 376 aa, Staphylococcus equorum
  REGION 1..376: note = tr|A0A1B1GAI3|A0A1B1GAI3_9STAP Epoxyqueuosine reductase OS=Staphylococcus equorum OX=246432; GN = AVJ22_08095 PE=4 SV=1
MDLNQLKQDVIDYAHSIGIDSIGFTTADPFDEMKQKLVDYHAKGYASGFEESDIELRTEPKLNLPTARSIIAIGVGYPNKLKGAPKSVRGDRRGMFARASWGQDYHTIMRKRLDKLGEYLQSRVEDVEIKSMVDTGALSDRAVAERAGLGFVGRNGFVINPDLGTWTYLGEMLVSIPFAPDDPLIDSCGDCTICVDRCPTGALVGDGQLNSQKCISFLTQTKGYLEDEYRYKIGNRLYGCDTCQQVCPKNKGINTQHDDIVLEPEILKPRLVPLLKMSNKEFKNTYGHLAGAWRGKKPIQRNAIIALAHFKEETAIPELQDVALDDPRPMIRATAYWAIGQIQGEAARPFVEQHYENELEEVQTEMLKGLETRSEK

SEQ ID NO: 81251 - protein, 375 aa, Staphylococcus felis
  REGION 1..375: note = tr|A0A3E0IS47|A0A3E0IS47_9STAP tRNA epoxyqueuosine(34) reductase QueG OS=Staphylococcus felis; OX = 46127 GN=queG PE=4 SV=1
MDVKVLKKEVIEYAYTIGIDSIGFTTADPFDELKQKLKAYHSKGYASGFEESDINLRTEPKLSLPTARSIIAIAVGYPNKLKNAPKSTKGDRRGMFARASWGQDYHTIMRKRLDLLGQFIQSKVPDVDIMSMVDTGVLSDRAVAERAGLGFTGRNGFIISPELGTWTYLGEMLVSIPFPPDDPLMDSCGDCTICVDRCPTGALVGNGQLNSQKCISFLTQTKGYLQDEYRYKIGNRLYGCDTCQQVCPKNKGINTEQDDIILEPDILKPRLIPLLQMNNKTFKNTFGHLAGAWRGKKPIQRNAIIALAHFKEMTAIPTLKEVAEHDPRPMIRGTAFWAIGQIDGENQQDYLLRHFENEIEEVRHEIIKGLEMERI

SEQ ID NO: 81252 - protein, 375 aa, Staphylococcus felis
  REGION 1..375: note = tr|A0A2K3ZEN1|A0A2K3ZEN1_9STAP tRNA epoxyqueuosine(34) reductase QueG OS=Staphylococcus felis; OX = 46127 GN=queG PE=4 SV=1
MDVKVLKKEVIEYAYTIGIDSIGFTTADPFDELKQKLKAYHSKGYASGFEESDINLRTEPKLSLPTARSIIAIAVGYPNKLKNAPKSTKGDRRGMFARASWGQDYHTIMRKRLDLLGQFIQSKVPDVEIMSMVDTGVLSDRAVAERAGLGFTGRNGFIISPELGTWTYLGEMLVSIPFPPDDPLMDSCGDCTICVDRCPTGALVGNGQLNSQKCISFLTQTKGYLQDEYRYKIGNRLYGCDTCQQVCPKNKGINTEQDDIILEPDILKPRLIPLLQMNNKTFKNTFGHLAGAWRGKKPIQRNAIIALAHFKEMTAIPTLKEVAEHDPRPMIRGTAFWAIGQIDGENQQDYLLRHFENEIEEVRHEIIKGLEMERI

SEQ ID NO: 81253 - protein, 375 aa, Staphylococcus fleurettii
  REGION 1..375: note = tr|A0A3A0I1Z6|A0A3A0I1Z6_9STAP tRNA epoxyqueuosine(34) reductase QueG OS=Staphylococcus fleurettii OX=150056 GN=queG PE=4 SV=1
MNLDLLKQEVIDYAHSIGIDSIGFTTADPFDELKQKLEDYHSKGYASGFEESDIELRTVPKLTLPSARSIIAIAVGYPNKLKDAPKSVRGDRRGLFARASWGQDYHTIMRNRLDKLSLFLQEKVPDVEVKSMVDTGVLSDRAVAERAGLGFAGKNGFIINEDLGTWSYLGEMLVSIPFKPDDPVIDSCGDCNICVDRCPTGALVGDGQLNSQKCISFLTQTKGYLKDEYRYKIGNRLYGCDTCQQVCPRNRGINTEQDDIVLEPEVLKPRLVPLLKMSNKEFKNTYGHLAGAWRGKKPIQRNAIVALAHFNEESAIPDLKDVALTDPRPMVRGTAFWAIGQIQGEEARSFIMSHYEREIEEVQEEMIKGLEIRRK

SEQ ID NO: 81254 - protein, 375 aa, Staphylococcus gallinarum
  REGION 1..375: note = tr|A0A3A0VN16|A0A3A0VN16_STAGA tRNA epoxyqueuosine(34) reductase QueG OS=Staphylococcus gallinarum OX=1293 GN=queG PE=4 SV=1
MDLKQLKQDVINYAHTIGIDSIGFTTADPFDELKQKLVDYHTKGYASGFEESDINLRTEPKLTLPTARSIIAIAVGYPNKLKGAPKSVRGDRRGMFARASWGQDYHSIMRKRLDQLAEYLKSRVEGVEIKSMVDTGVLSDRAVAERAGLGYVGRNGFVINPDLGTWTYLGEMLVSIPFEPDDPLLDSCGDCTICVDRCPTGALVGDGQLNSQKCISFLTQTKGYLQDEYRYKIGNRLYGCDTCQQVCPRNRGINTQQDDIVLEPEILKPRLVPLLKMSNKEFKNTYGHLAGAWRGKKPIQRNAIIALAHFKEESAIPELQDVALEDPRPMIRATAYWAIGQIQGEGARPFIEANYANEIEEVQQEMVKGLEMRSE

SEQ ID NO: 81255 - protein, 281 aa, Staphylococcus gallinarum
  REGION 1..281: note = tr|A0A512SCE3|A0A512SCE3_STAGA Uncharacterized protein OS=Staphylococcus gallinarum OX=1293; GN = SGA02_14320 PE=4 SV=1
MFARASWGQDYHSIMRNRLDKLSEYLQSRVKDVEIKSMVDTGVLSDRAVAERAGLGYVGRNGFVINPDLGTWTYLGEMLVSIPFEPDDPLLDSCGECTLCVDRCPTGALVGDGQLNSQKCISFLTQTKGYLQDEYRYKIGNRLYGCDTCQQVCPRNRGINTQHDDIVLEPEILKPRLVPLLKMSNKEFNNTYGHLAGAWRGKKPIQRNAIIALAHFKEESAIPELQDVALEDPRPMIRATAYWAIGQIQGELARPFIEAHYDKEIEEVQQEMIKGLEMRSE

SEQ ID NO: 81256 - protein, 375 aa, Staphylococcus haemolyticus
  REGION 1..375: note = tr|A0A2A1K8G1|A0A2A1K8G1_STAHA Epoxyqueuosine reductase OS=Staphylococcus haemolyticus OX=1283 GN=queG; PE = 3 SV=1
MDYNWLKQEIIDYAYSIGIDSIGFTTADPFDELKKKLEDYHANGYASGFEESDISLRTEPKLSLPTARSIIAIAVGYPNKLKGAPKSVRGDRRGMFARASWGQDYHSIMRKRLDKLADFIQSKVPDVELKSMVDTGVLSDRAVAERAGLGFAGRNGFIINPDLGTWSYLGELLVSIPFEPDDPLLDSCGDCTICVDRCPTGALVGNGQLNSQKCISFLTQTKGYLQDEYRYKIGNRLYGCDTCQQVCPRNRGINTTHDDIILEPEILKPRLVPLLQMSNKEFKQTYGHLAGAWRGKKPIQRNAIIALAHFNEETAIPELKEVALNDPRPMIRGTAYWAIGQIQGEDAREFIVANYENEIEEVQNEMIKGLEMRKL

SEQ ID NO: 81257 - protein, 375 aa, Staphylococcus haemolyticus; identical to SEQ ID NO: 81256
  REGION 1..375: note = tr|Q4L7G0|Q4L7G0_STAHJ Epoxyqueuosine reductase; OS = Staphylococcus haemolyticus (strain JCSC1435) OX=279808; GN = queG PE=3 SV=1

SEQ ID NO: 81258 - protein, 373 aa, Staphylococcus hominis
  REGION 1..373: note = tr|A0A3S7H086|A0A3S7H086_STAHO Epoxyqueuosine reductase OS=Staphylococcus hominis OX=1290 GN=queG PE=3; SV = 1
MNHQLKQEIIDYAYSIGIDSIGFTTADPFDELKQKLVDYHEKGYASGFEESDIALRTEPKLSLPTARSIIAIAVGYPNKLKGAPKSVKGDRRGMFARASWGQDYHSIMKKRLDKLSEFIQSKVPDVEIKSMVDTGVLSDRAVAERAGLGFVGRNGFVINPKLGTWTYLGEMLVSIPFEPDDPILDSCGDCTICVDRCPTGALVGNGQLNSQKCISFLTQTKGYLKDEYRYKIGNRLYGCDTCQQVCPKNRGINTTHEDIILEPEILKPRLVPLLQMSNKEFKNTYGHLAGAWRGKKPIQRNAIIALAHFGEEAAIPELKEVALNDPRPMIRGTAYWAIGQILGDDARTFIYEHFDNEIEEVQVEMRKGLEMRK

SEQ ID NO: 81259 - protein, 373 aa, Staphylococcus hominis
  REGION 1..373: note = tr|A0A533IW33|A0A533IW33_STAHO Epoxyqueuosine reductase OS=Staphylococcus hominis OX=1290 GN=queG PE=3; SV = 1
MNHQLKQEIIDYAYSIGIDSIGFTTADPFDELKQKLVDYHEKGYASGFEESDIALRTEPKLSLPTARSIIAIAVGYPNKLKGAPKSVKGDRRGMFARASWGQDYHSIMKKRLDKLSEFIQSKVPDVEIKSMVDTGVLSDRAVAERAGLGFVGRNGFVINPKLGTWTYLGEMLVSIPFEPDDPILDSCGDCTICVDRCPTGALVGNGQLNSQKCISFLTQTKGYLKDEYRYKIGNRLYGCDTCQQVCPKNRGINTTHEDIILEPEILKPRLVPLLQMSNKEFKNTYGHLAGAWRGKKPIQRNAIIALAHFGEEAAIPELKEVALNDPRPMIRGTAYWAIGQILGNDARTFIYEHYDNEIEEVQVEMRKGLEMRK

SEQ ID NO: 81260 - protein, 375 aa, Staphylococcus hyicus
  REGION 1..375: note = tr|A0A2T4RHQ2|A0A2T4RHQ2_STAHY tRNA epoxyqueuosine(34) reductase QueG OS=Staphylococcus hyicus; OX = 1284 GN=queG PE=4 SV=1
MDYVKLKQEIIDYAHHIGIDDIGFTTADPFDELKNKLIEYHEKGYASGFEESDISLRVDPKLSMSSAQSIIAIAVGYPNKLKGAPKSVRGERRGMFARASWGQDYHSIMRRRLNDLALFIQSKVPEAEMMSMVDTGVLSDRAVAERAGLGFTGRNGFVINPELGTWTYLGEMLINLPFPPDEQILDSCGTCTICVDRCPTGALVGDGQLNSQKCISFLTQTKGYLKDEYRYKIGNRLYGCDTCQQVCPKNRGINTEQEDIILEPEILKPKLVPLLQMSNKEFKQTYGHLAGAWRGKKPIQRNAIIALAHFNETSAIPELKEVAKNDPRPMIRGTAYWAIGQILGDAAQDFIMSQYDDELEEVQLEMKKGLEMRRL

SEQ ID NO: 81261 - protein, 375 aa, Staphylococcus hyicus
  REGION 1..375: note = tr|A0A3S4PSH3|A0A3S4PSH3_STAHY Epoxyqueuosine reductase OS=Staphylococcus hyicus OX=1284 GN=queG PE=3; SV = 1
MVDNKQLKKDIIEYAHQIGIDSIGFTTADPFDELKQKLVDYHAKGYASGFEESDIELRVNPKLSMPTARSIIAIAVGYPNKLKGAPKSVRGDRRGMFARASWGQDYHTIMRKRLDKLGEYIKSRVPDVEMLSMVDTGVLSDRAVAERAGLGFTGRNGFVINPDLGTWTYLGEMLVSIPFEPDDPLLDSCGDCTICVDRCPTGALVGNGQLNSQKCISFLTQTKGYLPDEYRYKIGNRLYGCDTCQQVCPKNRGINTEHDDIVLEPEILKPRLIPLLQMSNKEFKNTYGHLAGAWRGKKPIQRNAIIALAHFNETAALPELKEVALNDPRPMIRATAYWAIGQIAGEDERDFIEAHLADELDEVQEEMLKGLEKRN

SEQ ID NO: 81262 - protein, 376 aa, Staphylococcus intermedius
  REGION 1..376: note = tr|A0A380G7H4|A0A380G7H4_STAIN Iron-sulfur cluster-binding protein OS=Staphylococcus intermedius NCTC 11048 OX=1141106 GN=queG PE=4 SV=1
MDVRALKQEIIDYAHTIGINSIGFTTTDPFDELKQKLVDYHAKGYASGFEPSDIALRTEPKLSLPTARSIIAIAVGYPNKLKGAPKSVRGDRRGMFARASWGQDYHSIMRRRLDDLAAFIQSKVPDVELMSMVDTGVLSDRAVAERAGLGFVGRNGFVINPDLGTWSYLGEMLVSIPFPPDDPLLDSCGDCTICVDRCPTGALVGNGQLNSQKCISFLTQTKGYMPDQYRYKIGNRLYGCDTCQQVCPKSRGINTEQDDIHLEPEILKPRLVPLLKMNNKTFKNTFGHLAGVWRGKKPIQRNAILALAHFKEETAIPDLKDVAETDPRPMIRATAFWAIGQILGNKAKDYIMSHYDNELEEVQVEMIKGLEMRRDE

SEQ ID NO: 81263 - protein, 374 aa, Staphylococcus kloosii
  REGION 1..374: note = tr|A0A151A414|A0A151A414_9STAP Epoxyqueuosine reductase OS=Staphylococcus kloosii OX=29384; GN = A0131_04925 PE=4 SV=1
MDIKQLKQDVITYAHSIGIDSIGFTTADPFDELKQKLIDYHEKGYASGFEESDISLRTEPKLSLPTARSIIAIAVGYPNKLKGAPKSVKGDRRGMFARASWGQDYHTIMRNRLDKLAEYLKTKVPDVEVQSMVDTGVLSDRAVAERAGLGFAGRNGFVINPDLGTWTYLGEMLVSIPFEPDDPLMDSCGDCTICVDRCPTGALVGDGQLNSQKCISFLTQTKGYMKDEYRYKIGNRLYGCDTCQQVCPKNKGINTQHDDIVLEPEILKPRLVPLLKMSNKEFKNTYGHLAGAWRGKKPIQRNAILALAHFKETTAIPELKDVALNDPRPMIRGTAYWAIGQILGDEATEFINKHYASEIEEVQQEMIKGLEQES

SEQ ID NO: 81264 - protein, 371 aa, Staphylococcus kloosii
  REGION 1..371: note = tr|A0A512QGK4|A0A512QGK4_9STAP Epoxyqueuosine reductase OS=Staphylococcus kloosii OX=29384 GN=queG PE=4; SV = 1
MDIKQLKQDVITYAHSIGIDSIGFTTADPFDELKQKLIDYHEKGYASGFEESDISLRTEPKLSLPTARSIIAIAVGYPNKLKGAPKSVKGDRRGMFARASWGQDYHTIMRNRLDKLAEYLKTKVPDVEVQSMVDTGVLSDRAVAERAGLGFAGRNGFVINPDLGTWTYLGEMLVSIPFEPDDPLMDSCGDCTICVDRCPTGALVGDGQLNSQKCISFLTQTKGYMKDEYRYKIGNRLYGCDTCQQVCPKNKGINTQHDDIVLEPEILKPRLVPLLKMSNKEFKNTYGHLAGAWRGKKPIQRNAILALAHFKETTAIPELKDVALNDPRPMIRGTAYWAIGQILGDEATEFINKHYASEIEEVQQEMIKGLE

SEQ ID NO: 81265 - protein, 375 aa, Staphylococcus lentus
  REGION 1..375: note = tr|A0A178PAY6|A0A178PAY6_STALE Epoxyqueuosine reductase OS=Staphylococcus lentus OX=42858 GN=queG PE=4; SV = 1
MNLDQLKQEVIDYAHSIGIDSIGFTTADPFDELKKKLADYHNKGYASGFEESDIALRTEPKLSLPSARSIIAIAVGYPNKLKGAPKSVRGDRRGMFARASWGQDYHTIMRNRLDKLGEFLKEKVPDVEIQSMVDTGVLSDRAVAERAGLGFAGKNGFIINEDLGTWTYLGEMLVSIPFKPDDPVIDSCGDCNICVDRCPTGALVGNGQLNSQKCISFLTQTKGYLKDEYRYKIGNRLYGCDTCQQVCPRNRGINTQHDDIVLEPEILKPRLVPLLKMSNKEFKNTYGHLAGAWRGKKPIQRNAIVALAHFNEESAIPELKDVALTDPRPMIRATAYWAIGQIQGEEARTFIMSHYEHEIEEVQEEMIKGLEMRRQ

SEQ ID NO: 81266 - protein, 380 aa, Staphylococcus lugdunensis
  REGION 1..380: note = tr|A0A133Q761|A0A133Q761_STALU Epoxyqueuosine reductase OS=Staphylococcus lugdunensis OX=28035 GN=queG; PE = 3 SV=1
MGGLELNTAHLKTEIIQFAHSIGIDQIGFTTADPFDELKQKLEDYHAKGYASGFEESDIALRTEPKLSLPTARSIIAIAVGYPNKLKGAPKSVRGNRRGMFARASWGQDYHTIMRNRLDKLAEFIQSKVPDVEIQSMVDTGVLSDRAVAERAGLGFVGKNGFIINAELGTWSYLGEMLVSIPFEPDDPILDSCGDCTICVDRCPTGALVGNGQLNSQKCISFLTQTKGYLADEYRYKIGNRLYGCDTCQQVCPKNKGINTEHDDIILEPEILKPRLIPLLQMSNKEFKNTYGHLAGAWRGKKPIQRNAIIALAHFKAKEALPELKEVALNDKRPMIRATAYWAIGQIDGYNAQSFIDAHFAEEVEEVQQEMIKGLEMRRN

SEQ ID NO: 81267 - protein, 380 aa, Staphylococcus lugdunensis
  REGION 1..380: note = tr|A0A4Q9W9B1|A0A4Q9W9B1_STALU tRNA epoxyqueuosine(34) reductase QueG OS=Staphylococcus lugdunensis OX=28035 GN=queG PE=4 SV=1
MGGLELNTAHLKTEIIQFAHSIGIDQIGFTTADPFDELKQKLEDYHAKGYASGFEESDIALRTEPKLSLPTARSIIAIAVGYPNKLKGAPKSVRGDRRGMFARASWGQDYHTIMRNRLDKLAEFIQSKVPDVEIQSMVDTGVLSDRAVAERAGLGFVGKNGFIINAELGTWSYLGEMLVSIPCEPDDPILDSCGDCTICVDRCPTGALVGNGQLNSQKCISFLTQTKGYLADEYRYKIGNRLYGCDTCQQVCPKNKGINTEHDDIILEPEILKPRLIPLLQMSNKEFKNTYGHLAGAWRGKKPIQRNAIIALAHFKAKEALPELKEVALNDKRPMIRATAYWAIGQIDGYNAQSFIDAHFAEEVEEVQQEMIKGLEMRRN

SEQ ID NO: 81268 - protein, 376 aa, Staphylococcus lutrae
  REGION 1..376: note = tr|A0A1W6BJL8|A0A1W6BJL8_9STAP tRNA epoxyqueuosine(34) reductase QueG OS=Staphylococcus lutrae; OX = 155085 GN=queG PE=4 SV=1
MDVLELKQEIIDYAQTIGINSIGFTTADPFDELKQKLVDYHAKGYASGFEHDDIALRTEPKLSLPTARSIIAIAVGYPNKMKGAPKSVRGDRRGIFARASWGQDYHVMMRRRLNDLARFIQSKVPDVECLSMVDTGVLSDRAVAERAGLGFVGRNGFVINPDLGTWTYLGEMLVSIPFPPDDPLLDSCGDCTICVDRCPTSALVGDGQLNSQKCISFLTQTKGYLADEYRYKIGNRLYGCDTCQQVCPKNRGINTEQEDIHLEPDILKPRLVPLLTMNNKTFKNTFGHLAGAWRGKKPIQRNAIIALAHFKEESAIPTLKEVAETDARPMIRATAFWAIGQILGDAAKDYIMSHYENELEEVQIEMIKGLETRREE

SEQ ID NO: 81269 - protein, 375 aa, Staphylococcus massiliensis
  REGION 1..375: note = tr|K9AKI8|K9AKI8_9STAP (Fe-S)-binding protein; OS = Staphylococcus massiliensis S46 OX=1229783; GN = C273_09106 PE=4 SV=1
MDTRVLKDEIIAYAHEIGIDEIGFTTADPFDELKQRLKAYHEKGYASGFEATDDIELRTNPKFSLPTARSIIAIAVGYPNKLPNAPRSKRGDRRGMFARASWGMDYHSIMRIRLNKLADFIKARVPDVDIQSMVDTGVLSDRAVAERAGLGYAAKNGFILNQKLGTWTYLGEMLVSIPFEPDDPIMDSCGDCTICIDRCPTGALVGDGSLNSQKCISLLTQTKGYMPDEYRYKIGNRLYGCDTCQQVCPKNRGINTTQEDIVLEPETLKPRLVPLLQMSNREFKETYGHLAGAWRGKKPIQRNAILALAHFKEVDAVPTLKGVAENDARPMIRATAYWAIGQILGDDAKGYIDSQYDNEIEEVQTEMLKGLQKRS

SEQ ID NO: 81270 - protein, 375 aa, Staphylococcus microti
  REGION 1..375: note = tr|A0A0D6XRK0|A0A0D6XRK0_9STAP Iron-sulfur cluster-binding protein OS=Staphylococcus microti; OX = 569857 GN=queG PE=4 SV=1
MDVAQLKADIIAYAHTIGIDSIGFTTADPFDELKQKLMDYHAKGYASGFEPTDIAMRTEPKLSMSSARSIIAIAVGYPNRLPDAPKSKRGERRGIFARASWGQDYHSIMRKRLDALGDYIQSRVPDVEMMSMVDTGVLSDRAVAERAGLGYTGRNGFVINPELGTWTYLGEMLVSIPFPPDDPIIDSCGSCTICVDRCPTGALVGNGQLNSQKCVSFLTQTKGYMPDQYRYKIGNRLYGCDTCQQVCPRNRGINTQHDDIVLEPEILKPRLVPLLKMSNKEFKETYGHLAGAWRGKKPIQRNAILALAHFKEKEAIPELKDVAENDPRPMIRATAYWAIGQILEDDAESYIMSRYDSEIEEVQVEMKKGLETRRP

SEQ ID NO: 81271 - protein, 376 aa, Staphylococcus muscae
  REGION 1..376: note = tr|A0A240C723|A0A240C723_9STAP Iron-sulfur cluster-binding protein OS=Staphylococcus muscae OX=1294; GN = queG PE=4 SV=1
MDVSQLKADIIEYAHSIGIDSIGFTTADPFDELKQKLVEYHANGYASGFEPTDIKMRTEPKLSMSSARSIIAIAVGYPNRLPDAPKSKRGDRRGIFARASWGQDYHSIMRKRLDALSAYIKERVPDAETMSMVDTGVLSDRAVAERAGLGYTGRNGFVIHPELGTWTYLGEMLVSIAFPPDDPIMDSCGDCTICIDRCPTGALVGDGQLNSQKCVSFLTQTKGYMPDQYRYKIGNRLYGCDTCQQVCPRNRGINTQQDDIVLEPEILKPRLIPLLKMSNKAFKETYGHLAGAWRGKKPIQRNAILALAHFKEKEAIPELKDVAENDPRPMIRATAYWAIGQILEDEAEDYIMSRYDSEIEEVQVEMKKGLETRRTV

SEQ ID NO: 81272 - protein, 375 aa, Staphylococcus nepalensis; identical to SEQ ID NO: 75924
  REGION 1..375: note = tr|A0A291JJL7|A0A291JJL7_9STAP (Fe-S)-binding protein OS=Staphylococcus nepalensis OX=214473 GN=queG; PE = 4 SV=1

SEQ ID NO: 81273 - protein, 163 aa, Staphylococcus nepalensis
  REGION 1..163: note = tr|A0A2T4S590|A0A2T4S590_9STAP tRNA epoxyqueuosine(34) reductase QueG (Fragment); OS = Staphylococcus nepalensis OX=214473 GN=queG PE=4 SV=1
LGFTGCNGFVIHPDLGTWTYLGEMLVSIPFEPDDPLLDSCGDCTICVDRCPTGALVGNGQLNSQKCISFLTQTKGYLPDEYRYKIGNRLYGCDTCQQVCPKNRGINTEHDDIVLEPEILKPRLIPLLQMSNKEFKNTYGHLAGAWRGKKPIQRNAIIALAHFN

SEQ ID NO: 81274 - protein, 376 aa, Staphylococcus pasteuri
  REGION 1..376: note = tr|A0A269XMC5|A0A269XMC5_9STAP tRNA epoxyqueuosine(34) reductase QueG OS=Staphylococcus pasteuri OX=45972 GN=B8W95_00150 PE=4 SV=1
MDVKQLKKDIIEYAHTIGIDSIGFTTADPFDELKQKLEDYYSKGYASGFEESDIALRTEPKLSLPTARSIIAIAVGYPNKLKGAPKSVRGDRRGMFARASWGQDYHTIMRKRLDLLGTYIQSKVPDVEIKSMVDTGVLSDRAVAERAGLGFAGRNGFIINPDLGTWTYLGEMLVSIPFEPDDPILDSCGDCTICVDRCPTGALVGNGQLNSQKCISFLTQTKGYLADEYRYKIGNRLYGCDTCQQVCPKNKGINTEHDDIILEPEILKPRLVPLLQMSNKEFKNTYGHLAGAWRGKKPIQRNAILALVHFNETGAIPDLKEVALNDPRPMIRGTAYWAIGQIEGENAREFIHTHYENEIEEVQVEMLKGLEMRREK

SEQ ID NO: 81275 - protein, 376 aa, Staphylococcus pasteuri
  REGION 1..376: note = tr|A0A0M2NXD9|A0A0M2NXD9_9STAP Epoxyqueuosine (OQ) reductase QueG OS=Staphylococcus pasteuri OX=45972 GN=queG; PE = 4 SV=1
MDVKQLKQDIIDYAHTIGIDSIGFTTADPFDELKQKLEDYHAKGYASGFEESDIALRTEPKLSLPTARSIIAIAVGYPNKLKGAPKSVRGDRRGMFARASWGQDYHTIMRKRLDQLSEYIRSVVPDVEIQSMVDTGVLSDRAVAERAGLGFVGRNGFVINPDLGTWTYLGEMLVSIPFEPDDPLIDSCGDCTICVDRCPTGALVGNGQLNSQKCISFLTQTKGYLDDQYRYKIGNRLYGCDTCQQVCPKNKGINTQHDDIVLEPEILKPRLIPLLQMSNKEFKATYGHLAGAWRGKKPIQRNAILALAHFNEESAIPELKEVALNDPRPMIRGTAFWAIGQIDGENAREFIQTHYHDELEEVQVEMKKGLEMRREK

SEQ ID NO: 81276 - protein, 375 aa, unidentified
  source 1..375: note = Staphylococcus petrasii
  REGION 1..375: note = tr|A0A2K4C9P3|A0A2K4C9P3_9STAP Epoxyqueuosine reductase OS=Staphylococcus petrasii subsp. croceilyticus; OX = 319942 GN=queG PE=3 SV=1
MDYKQLKRDIIDYAYTIGIDSIGFTTADPFDELKQKLEDYHSKGYASGFEESDIALRTEPKLSLPTARSIIAIAVGYPNKLKGAPKSVRGDRRGMFARASWGQDYHTIMRKRLDKLAEFITSKVPDVEIKSMVDTGVLSDRAVAERAGLGFAGRNGFIINPDLGTWTYLGEMLVSIPFEPDDPVLDSCGDCTICVDRCPTGALVGNGQLNAQKCISFLTQTKGYLQDEYRYKIGNRLYGCDTCQQVCPKNRGINTTHDDIVLEPEILKPRLVPLLQMSNKEFKNTYGHLAGAWRGKKPIQRNAIIALAHFGEETAIPELKEVAMNDPRPMIRGTAYWAIGQILGEAAREFIQEHYDDELEEVQVEMLKGLEMRKQ

SEQ ID NO: 81277 - protein, 375 aa, unidentified
  source 1..375: note = Staphylococcus petrasii
  REGION 1..375: note = tr|A0A4Z1BNL5|A0A4Z1BNL5_9STAP Epoxyqueuosine reductase OS=Staphylococcus petrasii subsp. pragensis; OX = 1611836 GN=queG PE=3 SV=1
MDYKQLKKEIIDYAYTIGIDSIGFTTADPFDELKQKLEDYHAKGYASGFEESDIALRTEPKLSLPTARSIIAIAVGYPNKLKGAPKSVRGDRRGMFARASWGQDYHTIMKKRLDKLAEFIISKVPDVEIKSMVDTGVLSDRAVAERAGLGFAGRNGFIINPDLGTWTYLGEMLVSIPFEPDDPVLDSCGDCTICVDRCPTGALVGNGQLNAQKCISFLTQTKGYLQDEYRYKIGNRLYGCDTCQQVCPKNRGINTTHDDIVLEPEILKPRLVPLLQMSNKEFKNTYGHLAGAWRGKKPIQRNAIIALAHFNEETAIPELKEVAMNDPRPMIRGTAYWAIGQILGEAAREFIQEHYDDELEEVQVEMLKGLEMRKQ

SEQ ID NO: 81278 - protein, 375 aa, Staphylococcus pettenkoferi
  REGION 1..375: note = tr|A0A2N6QBQ7|A0A2N6QBQ7_9STAP Epoxyqueuosine reductase OS=Staphylococcus pettenkoferi OX=170573 GN=queG; PE = 3 SV=1
MDLKQLKEDVIAYAHTIGIDSIGFTTADPFDELKQKLVDYHAKGYASGFEEDDIQLRTEPKLSLPTARSIIAIAVGYPNKLKGAPRSKRGERRGMFARASWGQDYHTIMRKRLDKLAEYIESRVPDVEMKSMVDTGVLSDRAVAERAGLGYTGRNGFVINPDLGTWTYLGEMLVSIPFPPDDPLIDSCGDCTMCVDRCPTGVLVGNGQLNAQKCISFLTQTKGYLQDEYRYKIGNRLYGCDTCQQVCPRNRGINTEHDDIVLEPEILKPRLVPLLQISNREFKETYGHLAGAWRGKKPIQRNAIIALAHFKETSAIPELEEVAVNDPRPMIRATAYWAIGQIQGDEARPFIDAHYDAELEEVQEEMIKGLEMGRT

SEQ ID NO: 81279 - protein, 375 aa, Staphylococcus piscifermentans
  REGION 1..375: note = tr|A0A239TWE0|A0A239TWE0_9STAP Epoxyqueuosine reductase OS=Staphylococcus piscifermentans OX=70258; GN = queG PE=3 SV=1
MLDYKQLKKDIIEYAYQIGIDSIGFTTADPFDELKQKLVEYHAKGYASGFEESDIDLRVDPKLSMPTARSIIAIAVGYPNKLKGAPRSTRGDRRGMFARASWGQDYHTIMRKRLDKLSEYIQERVPDVEMMSMVDTGVLSDRAVAERAGLGYTGRNGFVINPDLGTWTYLGEMLVSIPFEPDDPLLDSCGDCTICVDRCPTGALVGDGQLNSQKCISFLTQTKGYLPDEYRSKIGNRLYGCDTCQQVCPRNRGINTEHDDIVLEPEILKPRLIPLLQMSNKEFKNTYGHLAGAWRGKKPIQRNAIIALAHFKEEAAVPELKEVALNDARPMIRGTAYWAIGQIAGEAEREFIEAQLETEIEEVRAEMLKGLEKRN

SEQ ID NO: 81280 - protein, 376 aa, Staphylococcus piscifermentans
  REGION 1..376: note = tr|A0A431YW40|A0A431YW40_9STAP tRNA epoxyqueuosine(34) reductase QueG OS=Staphylococcus piscifermentans OX=70258 GN=queG PE=4 SV=1
MDLNQLKQDVIDYAHSIGIDSIGFTTADPFDEMKQKLVDYHAKGYASGFEESDIELRTEPKLNLPTARSIIAIGVGYPNKLKGAPKSVRGDRRGMFARASWGQDYHTIMRKRLDKLGEYLQSRVEDVEIKSMVDTGALSDRAVAERAGLGFVGRNGFVINPDLGTWTYLGEMLVSIPFAPDDPLIDSCGDCTICVDRCPTGALVGDGQLNSQKCISFLTQTKGYLEDEYRYKIGNRLYGCDTCQQVCPKNKGINTQHDDIVLEPEILKPRLVPLLKMSNKEFKNTYGHLAGAWRGKKPIQRNAIIALAHFKEETAIPELQDVALDDPRPMIRATAYWAIGQIQGEAARPFVEQHYENELEEVQIEMLKGLETRSEK

SEQ ID NO: 81281 - protein, 43 aa, Staphylococcus pseudintermedius
  REGION 1..43: note = tr|A0A3D8Z8E1|A0A3D8Z8E1_STAPS tRNA epoxyqueuosine(34) reductase QueG (Fragment); OS = Staphylococcus pseudintermedius OX=283734; GN = DV946_13790 PE=4 SV=1
MCGILTGFFFIVWSVMSEPLDLNQLAQKIKQWGLELGFQQVGI

SEQ ID NO: 81282 - protein, 376 aa, Staphylococcus pseudintermedius
  REGION 1..376: note = tr|A0A2P5PIY7|A0A2P5PIY7_STAPS tRNA epoxyqueuosine(34) reductase QueG OS=Staphylococcus pseudintermedius OX=283734 GN=queG PE=4 SV=1
MDVRGLKEEIIAYAHTIGINSIGFTTADPFDELKQKLVDYHAKGYASGFEPSDIALRTEPKLSLPTARSIIAIAVGYPNKLKGAPKSVRGDRRGVFARASWGQDYHSIMRRRLDDLAAFIQRKVPDVELMSMVDTGVLSDRAVAERAGLGFVGRNGFVINPDLGTWSYLGEMLVSIPFPPDDPLLDSCGDCTICVDRCPTGALVGNGQLNSQKCISFLTQTKGYLPDEYRYKIGNRLYGCDTCQQVCPKNRGINTEQDDIHLEPEILKPRLVPLLKMNNKTFKNQFGHLAGAWRGKKPIQRNAILALAHFKEETAIPDLKDVAETDPRPMIRATAFWAIGQILGEAAKDYVMSHYDNELEEVQVEMIKGLEMRRDE

SEQ ID NO: 81283 - protein, 377 aa, Staphylococcus rostri
  REGION 1..377: note = tr|A0A2K3YGP9|A0A2K3YGP9_9STAP tRNA epoxyqueuosine(34) reductase QueG OS=Staphylococcus rostri; OX = 522262 GN=queG PE=4 SV=1
MDVAQLKADIIDYAHTIGIDSIGFTTADPFDELKQKLIEYHAKGYASGFEPDDIEMRVDPKLSMSSARSIIAIAVGYPNRLPNAPKSKRGERRGIFARASWGQDYHSIMRKRLDALGAYIKERVPDVEMMSMVDTGVLSDRAVAERAGLGYTGRNGFVINPDLGTWTYLGEMLVSIPFPPDDPIMDSCGSCTICVDRCPTGALVGDGQLNSQKCVSFLTQTKGYMPDQYRYKIGNRLYGCDTCQQVCPRNRGINTQHDDIVLEPEILKPRLVPLLKMSNKEFKATYGHLAGAWRGKKPIQRNAILALAHFKETEAIPELKDVAENDPRPMMRATAYWAIGQILEDEAESYIMSRYDSEIEEVQVEMKKGLETRRTTL

SEQ ID NO: 81284 - protein, 153 aa, Staphylococcus saccharolyticus
  REGION 1..153: note = tr|A0A380H4G8|A0A380H4G8_9STAP (Fe-S)-binding protein OS=Staphylococcus saccharolyticus OX=33028; GN = queG_1 PE=4 SV=1
MNNKQLKKEIKDFAHSIDINSIGFTTADPFDELKQKLENYHANGYASGFEESDIALGTEPKLSLPTARSIIAIAVGYPNKLKGAPKSVRGNRRGMFARASWGQDYHSIMRRRLDQLGEFIRNRVPEVEIQSMVDTGVLSDRAVAERAGLGFCW

SEQ ID NO: 81285 - protein, 376 aa, Staphylococcus saccharolyticus; identical to SEQ ID NO: 81275
  REGION 1..376: note = tr|A0A3S0JVR9|A0A3S0JVR9_9STAP tRNA epoxyqueuosine(34) reductase QueG OS=Staphylococcus saccharolyticus OX=33028 GN=queG PE=4 SV=1

SEQ ID NO: 81286 - protein, 375 aa, Staphylococcus saprophyticus; identical to SEQ ID NO: 74978
  REGION 1..375: note = tr|A0A380HDK4|A0A380HDK4_STASA (Fe-S)-binding protein OS=Staphylococcus saprophyticus OX=29385 GN=queG; PE = 4 SV=1

SEQ ID NO: 81287 - protein, 375 aa, Staphylococcus saprophyticus
  REGION 1..375: note = tr|Q49YQ3|Q49YQ3_STAS1 Putative iron-sulphur protein; OS = Staphylococcus saprophyticus subsp. saprophyticus (strain ATCC 15305 / DSM 20229 / NCIMB 8711 / NCTC 7292 / S -41) OX=342451 GN=SSP0939 PE=4 SV=1
MDLNQLKQDVIDYAHTIGIDSIGFTTADPFDELKQKLADYHAKGYASGFEESDIELRTEPKLSLPTARSIIAIAVGYPNKLKGAPKSVRGDRRGMFARASWGQDYHSIMRKRLDKLGAYLEEKVPGVEIQSMVDTGVLSDRAVAERAGLGYVGRNGFVINPELGTWTYLGEMLVSIPFPPDDPLIDSCGDCTICVDRCPTGALVGDGQLNSQKCISFLTQTKGYLADEYRYKIGNRLYGCDTCQQVCPRNKGINTQHDDIVLEPEILKPRLVPLLQMSNKEFKNTYGHLAGAWRGKKPIQRNAIVALAHFKDETAISELQEVALNDPRPMIRGTAYWAIGQIQGEAARPFIEQHYNDEIEEVQVEMIKGLEMRSE

SEQ ID NO: 81288 - protein, 376 aa, Staphylococcus schleiferi
  REGION 1..376: note = tr|A0A0M4ULH2|A0A0M4ULH2_9STAP Epoxyqueuosine reductase OS=Staphylococcus schleiferi OX=1295 GN=queG; PE = 3 SV=1
MDVLQLKEEIIEYAYSIGINRIGFTTADPFDELKQKLVDYHAKGYASGFEESDIALRTEPKLSLPTAKSIIAISVGYPNKLKNAPKSIRGDRRGMFARASWGQDYHTIMRKRLDKLAKFIQAKVPDAEMMSMVDTGVLSDRAVAERAGLGFVGRNGFVIHPDLGTWTYLGEMLVNIPFPPDDPIMESCGDCTICVDRCPTGALVGDGQLNSQKCISFLTQTKGYLPDEYRYKIGNRLYGCDTCQQVCPKNRGINIEQDDIILEPEILKPRLVPLLKMNNKTFKNTFGHLAGAWRGKKPIQRNAIIALAHFKEEDAIPDLKEVAENDPRPLIRATAFWAIGQIQGDLAKSYIMAHYENEDEEVQVEMLKGLEMRRDG

SEQ ID NO: 81289 - protein, 375 aa, Staphylococcus schleiferi
  REGION 1..375: note = tr|A0A431YHG7|A0A431YHG7_9STAP tRNA epoxyqueuosine(34) reductase QueG OS=Staphylococcus schleiferi subsp. schleiferi OX=74707 GN=queG PE=4 SV=1
MNLDQLKQEVIDYAHSIGIDSIGFTTADPFDELKKKLEDYHSKGYASGFEESDIELRTVPKLSLPSARSIIAIAVGYPNKLKGAPKSVRGDRRGMFARASWGQDYHTIMRNRLDKLSLFLKEKVPDVEIKSMVDTGVLSDRSVAERAGLGFAGKNGFIINEELGTWSYLGEMLVSIPFKPDDPVIDSCGDCNICVDRCPTGALVGNGQLNSQKCISFLTQTKGYLKDEYRYKIGNRLYGCDTCQQVCPRNRGINTEHDDIILEPEVLKPRLVPLLKMSNKEFKNTYGHLAGAWRGKKPIQRNAIVALAHFNEESAIPELKDVALTDPRPMIRGTAFWAIGQIQGEEARPFIMSHYEREIEEVQEEMIKGLEIRRK

SEQ ID NO: 81290 - protein, 376 aa, unidentified
  source 1..376: note = Staphylococcus schweitzeri
  REGION 1..376: note = tr|A0A448CXG4|A0A448CXG4_9STAP Epoxyqueuosine reductase OS=Staphylococcus schweitzeri OX=1654388 GN=queG; PE = 3 SV=1
MDTKQLKQDIIDYAYTIGIDSIGFTTADPFDELKQKLEVYHANGYASGFEESDIALRTEPKLSLSTARSIIAIAVGYPNKLKGAPKSVRGDRRGLFARASWGQDYHTIMRKRLDMLATFIESKVPDVEIKSMVDTGVLSDRAVAERAGLGFVGRNGFVINPKLGTWTYLGEMLVSIPFEPDDPLLDSCGDCTICVDRCPTSALVGNGQLNSQKCISFLTQTKGYMPDQYRYKIGNRLYGCDTCQQVCPKNRGINTEQDDIILEPEILKPRLVPLLRMSNKEFKQTYGHLAGAWRGKKPIQRNAILALAHFNEVDAIPELKKVATTDERPMIRATAYWAIGQILGDDAKEFIHANYEKEDAEVQQEMIKGIETRREK

SEQ ID NO: 81291 - protein, 381 aa, unidentified
  source 1..381: note = Staphylococcus schweitzeri
  REGION 1..381: note = tr|A0A2K4AF67|A0A2K4AF67_9STAP Epoxyqueuosine reductase OS=Staphylococcus schweitzeri OX=1654388 GN=queG; PE = 3 SV=1
MGGKRLDTKQLKQDIIDYAYTIGIDSIGFTTADPFDELKQKLEVYHANGYASGFEESDIALRTEPKLSLSTARSIIAIAVGYPNKLKGAPKSVRGDRRGLFARASWGQDYHTIMRKRLDMLATFIESKVPDVEIKSMVDTGVLSDRAVAERAGLGFVGRNGFVINPKLGTWTYLGEMLVSIPFEPDDPLLDSCGDCTICVDRCPTSALVGNGQLNSQKCISFLTQTKGYMPDQYRYKIGNRLYGCDTCQQVCPKNRGINTEQDDIILEPEILKPRLVPLLRMSNKEFKQTYGHLAGAWRGKKPIQRNAILALAHFNEVDAIPELKKVATTDERPMIRATAYWAIGQILGDDAKEFIHANYEKEDAEVQQEMIKGIETRREK

SEQ ID NO: 81292 - protein, 375 aa, Staphylococcus sciuri
  REGION 1..375: note = tr|A0A2T4RQX9|A0A2T4RQX9_STASC tRNA epoxyqueuosine(34) reductase QueG OS=Staphylococcus sciuri; OX = 1296 GN=queG PE=4 SV=1
MNLDQLKQEVIDYAHSIGIDSIGFTTADPFDELKKKLEDYHSKGYASGFEESDIELRTVPKLSLPSARSIIAIAVGYPNKLKGAPKSVRGDRRGMFARASWGQDYHTIMRNRLDKLSLFLKEKVPDVEIKSMVDTGVLSDRSVAERAGLGFAGKNGFIINEELGTWSYLGEMLVSIPFKPDDPVIDSCGDCNICVDRCPTGALVGNGQLNSQKCISFLTQTKGYLKDEYRYKIGNRLYGCDTCQQVCPRNRGINTEHDDIILEPEVLKPRLVPLLKMSNKEFKNTYGHLAGAWRGKKPIQRNAIVALAHFNEESAIPDLKDVALTDPRPMIRGTAFWAIGQIQGEEARPFIMSHYEREIEEVQEEMIKGLEIRRK

SEQ ID NO: 81293 - protein, 375 aa, Staphylococcus sciuri
  REGION 1..375: note = tr|A0A3S0SPI6|A0A3S0SPI6_STASR tRNA epoxyqueuosine(34) reductase QueG OS=Staphylococcus sciuri subsp. rodentium OX=147469 GN=queG PE=4 SV=1
MDYVKLKQEIIDYAHQIGIDDIGFTTADPFDELKNKLIEYHEKGYASGFEESDISLRVDPKLSMSSAQSIIAIAVGYPNKLKGAPKSVRGERRGMFARASWGQDYHSIMRRRLNDLALFIQSKVPEAEMMSMVDTGVLSDRAVAERAGLGFTGRNGFVINPELGTWTYLGEMLINLPFPPDEQILDSCGTCTICVDRCPTGALVGDGQLNSQKCISFLTQTKGYLKDEYRYKIGNRLYGCDTCQQVCPKNRGINTEQEDIILEPEILKPKLVPLLQMSNKEFKQTYGHLAGAWRGKKPIQRNAIIALAHFNETSAIPELKEVAKNDPRPMIRGTAYWAIGQILGDAAKDFIMSQYDNELEEVQLEMKKGLEMRRL

SEQ ID NO: 81294 - protein, 376 aa, Staphylococcus simiae
  REGION 1..376: note = tr|G5JFE4|G5JFE4_9STAP Iron-sulfur cluster binding protein, putative OS=Staphylococcus simiae CCM 7213 = CCUG 51256 OX=911238 GN=SS7213T_00728 PE=4 SV=1
MDYKQLKQDIIDYAHSIGIDSIGFTTADPFDELKQKLEDYHSKGYASGFEESDIALRTEPKLSLPTARSIIAIAVGYPNKLKGAPRSVRGDRRGLFARASWGQDYHTIMRTRLDKLSEFIKAKVENVEILSMVDTGVLSDRAVAERAGLGFAGRNGFIINKDLGTWTYLGEMLVSIPFEPDDPILDSCGDCTICVDRCPTGALVGNGQLNSQKCISFLTQTKGYMPDQYRYKIGNRLYGCDTCQQVCPKNRGINTQHDDIVLEPEILKPRLIPLLQMSNKEFKANYGHLAGAWRGKKPIQRNAILALAHFNEEAAVPELKEVAMNDARPMIRATAYWAIGQILGEDARPFINEHYNSEDEEVQTEMLKGLETRSNT

SEQ ID NO: 81295 - protein, 383 aa, Staphylococcus simulans
  REGION 1..383: note = tr|A0A133QDM7|A0A133QDM7_STASI Epoxyqueuosine reductase OS=Staphylococcus simulans OX=1286 GN=queG PE=3; SV = 1
MDHGYGGIMVDNKQLKKDIIEYAHQIGIDSIGFTTADPFDELKQKLVDYHAKGYASGFEESDIELRVNPKLSMPTARSIIAIAVGYPNKLKGAPKSVRGDRRGMFARASWGQDYHTIMRKRLDKLGEYIKSRVPDVEMLSMVDTGVLSDRAVAERAGLGFTGRNGFVINPDLGTWTYLGEMLVSIPFEPDDPLLDSCGDCTICVDRCPTGALVGNGQLNSQKCISFLTQTKGYLPDEYRYKIGNRLYGCDTCQQVCPKNRGINTEHDDIVLEPEILKPRLIPLLQMSNKEFKNTYGHLAGAWRGKKPIQRNAIIALAHFNETAALPELKEVALNDPRPMIRATAYWAIGQIAGEDERDFIEAHLADELDEVQEEMLKGLEKRN

SEQ ID NO: 81296 - protein, 375 aa, Staphylococcus simulans; identical to SEQ ID NO: 81261
  REGION 1..375: note = tr|A0A2X3SDA5|A0A2X3SDA5_STASI Epoxyqueuosine reductase OS=Staphylococcus simulans OX=1286 GN=queG PE=3; SV = 1

SEQ ID NO: 81297 - protein, 380 aa, Staphylococcus sp.
  REGION 1..380: note = tr|A0A5B2WL09|A0A5B2WL09_9STAP Epoxyqueuosine reductase OS=Staphylococcus sp. 29213 OX=2608397 GN=queG; PE = 3 SV=1
MGGIRLDTKQLKQDIIDYAYTIGIDSIGFTTADPFDELKQKLEAYHANGYASGFEESDIALRTEPKLSLPTARSIIAIAVGYPNKLKGAPKSVRGDRRGLFARASWGQDYHTIMRKRLDMLAAFIESKVPDVEIKSMVDTGVLSDRAVAERAGLGFVGRNGFVINPKLGTWTYLGEMLVSIPFEPDDPLLDSCGDCTICVDRCPTSALVGNGQLNSQKCISFLTQTKGYMPDQYRYKIGNRLYGCDTCQQVCPKNRGINTEQDDIILEPEILKPRLVPLLRMSNKEFKQTYGHLAGAWRGKKPIQRNAILALAHFNEVDAIPELKKVATTDERPMIRATAYWAIGQILGEEARDFINANYDQEDAEVQNEMIKGLDTRRE

SEQ ID NO: 81298 - protein, 377 aa, Staphylococcus sp.
  REGION 1..377: note = tr|A0A2J6P7C1|A0A2J6P7C1_9STAP tRNA epoxyqueuosine(34) reductase QueG OS=Staphylococcus sp. UMB0328 OX=2029110 GN=queG PE=4 SV=1
MDVKQLKKDIIDYAHTIGIDSIGFTTADPFDELKQKLEDYHSKGYASGFEESDIALRTEPKLSLPTARSIIAIAVGYPNKLKGAPKSVRGDRRGMFARASWGQDYHTIMRKRLDQLGTYIQSKVPDVEIKSMVDTGVLSDRAVAERAGLGFAGRNGFIINPDLGTWTYLGEMLVSIPFEPDDPILDSCGDCTICVDRCPTGALVGNGQLNSQKCISFLTQTKGYLDDEYRYKIGNRLYGCDTCQQVCPKNKGINTEHDDIILEPEILKPRLVPLLQMSNKEFKNTYGHLAGAWRGKKPIQRNAILALAHFNETSAIPDLKDVALNDPRPMIRGTAYWAIGQIEGENARDFIHTHYENEIEEVQVEMLKGLEMRRESK

SEQ ID NO: 81299 - protein, 288 aa, unidentified
  source 1..288: note = Staphylococcus stepanovicii
  REGION 1..288: note = tr|A0A239YUP5|A0A239YUP5_9STAP (Fe-S)-binding protein OS=Staphylococcus stepanovicii OX=643214 GN=queG; PE = 4 SV=1
MKGDRRGMFARASWGQDYHTIMRNRLDKLSKFLQEKVPDVEIKSMVDTGVLSDRAVAERSGLGFAGKNGFIINEDLGTWTYLGEMLVSIPFKPDDPVIDSCGDCNICVDRCPTGALVGDGQLNSQKCISFLTQTKGYLKDEYRYKIGNRLYGCDTCQQVCPRNRGINTEHDDIILEPETLKPRLVPLLKMSNKQFKENYGHLAGAWRGKKPIQRNAIIALAHFNEESAIPELKDVALTDPRPMIRGTAHWAIGQILGEEARPFVMSHYEHEIEEVQQEMIKGLETRRP

SEQ ID NO: 81300 - protein, 375 aa, Staphylococcus succinus
  REGION 1..375: note = tr|A0A2T4Q7L0|A0A2T4Q7L0_9STAP tRNA epoxyqueuosine(34) reductase QueG OS=Staphylococcus succinus OX=61015 GN=queG PE=4 SV=1
MDLKQLKQDVIDYAHSIGIDSIGFTTADPFDELKQKLVDYHEKGYASGFEESDIGLRTEPKLTLPTARSIIAIAVGYPNRLKGAPKSVRGDRRGMFARASWGQDYHSIMRKRLDKLAEYLQSRVEGVEIQSMVDTGVLSDRAVAERAGIGFIGRNGFVINPDFGTWTYLGEMLVSIPFAPDDPLMDSCGECTICVDRCPTGALVGDGQLNSQKCISFLTQTKGYLKDEYRYKIGNRLYGCDTCQQVCPKNKGINTQHDDIILEPDILKPRLVPLLKMSNKEFKNTYGHLAGAWRGKKPIQRNAIIALAHFKEEAAIPELQDVALNDPRPMIRGTAYWAIGQIQGDVARPFIEQHYENELEEVQEEMLKGLETRRE

SEQ ID NO: 81301 - protein, 375 aa, Staphylococcus vitulinus
  REGION 1..375: note = tr|A0A2T4PSG7|A0A2T4PSG7_9STAP tRNA epoxyqueuosine(34) reductase QueG OS=Staphylococcus vitulinus OX=71237 GN=queG PE=4 SV=1
MNLDQLKQEVIEYAHSIGIDSIGFTTADPFDELKQKLEDYHSKGYASGFEESDIELRTVPKLSLPSARSIIAIAVGYPNKLKGAPKSVKGDRRGMFARASWGQDYHTIMRNRLDKLSLFLQEKVPDVEVKSMVDTGVLSDRSVAERAGLGFEGKNGFIINEELGTWSYLGEMLVSIPFKPDDPVIDSCGDCNICVDRCPTGALVGNGQLNSQKCISFLTQTKGYLKDEYRYKIGNRLYGCDTCQQVCPRNRGINTEHDDIILEPEVLKPRLVPLLKMSNKEFKNTYGHLAGAWRGKKPIQRNAIISLAHFNEESAIPDLKDVALTDPRPMIRGTAFWAIGQIQGEEARPFIMSHYEREIEEVQEEMIKGLEIRRK

SEQ ID NO: 81302 - protein, 377 aa, Staphylococcus warneri; identical to SEQ ID NO: 81298
  REGION 1..377: note = tr|A0A2V3ZCF3|A0A2V3ZCF3_STAWA tRNA epoxyqueuosine(34) reductase QueG OS=Staphylococcus warneri OX=1292 GN=queG PE=4 SV=1

SEQ ID NO: 81303 - protein, 376 aa, Staphylococcus warneri
  REGION 1..376: note = tr|A0A364UN97|A0A364UN97_STAWA tRNA epoxyqueuosine(34) reductase QueG OS=Staphylococcus warneri OX=1292 GN=queG PE=4 SV=1
MDVKQLKKDIIEYAHTIGIDSIGFTTADPFDELKQKLEDYHSKGYASGFEESDIALRTEPKLSLPTARSIIAIAVGYPNKLKGAPKSVRGDRRGMFARASWGQDYHTIMRKRLDLLGTYIQSKVPDVEIKSMVDTGVLSDRAVAERAGLGFAGRNGFIINPDLGTWTYLGEMLVSIPFEPDDPILDSCGDCTICVDRCPTGALVGNGQLNSQKCISFLTQTKGYLADEYRYKIGNRLYGCDTCQQVCPKNKGINTEHDDIILEPEILKPRLVPLLQMSNKEFKNTYGHLAGAWRGKKPIQRNAILALVHFNETGAIPDLKEVALNDPRPMIRGTAYWAIGQIEGENAREFIHTHYENEIEEVQVEMLKGLEMRREK

SEQ ID NO: 81304 - protein, 376 aa, Staphylococcus xylosus
  REGION 1..376: note = tr|A0A418IDZ6|A0A418IDZ6_STAXY tRNA epoxyqueuosine(34) reductase QueG OS=Staphylococcus xylosus OX=1288 GN=queG PE=4 SV=1
MDLKQLKQDVIDYAHTIGIDSIGFTTADPFDEMKQKLVDYHAKGYASGFEESDIALRTEPTLTLPTARSIIAIAVGYPNKLKGAPKSTRGDRRGMFARASWGQDYHSIMRKRLDKLADYLRDRVDGVEIQSMVDTGALSDRAVAERAGLGYVGRNGFVINPELGTWTYLGEMLVSVPFPPDDPLLDSCGDCTICVDRCPTGALVGDGQLNSQKCISFLTQTKGYLADEYRYKIGNRLYGCDTCQQVCPRNKGINTQHDDIVLEPEILKPRLVPLLKMSNKEFKNTYGHLAGAWRGKKPIQRNAIVALAHFKEESAIPELQDVALNDPRPMIRGTAYWAIGQIQGEDARNFIEQQYHNELEEVQQEMLKGLEMRREQ

SEQ ID NO: 81305 - protein, 376 aa, Staphylococcus xylosus
  REGION 1..376: note = tr|A0A5F0VG93|A0A5F0VG93_STAXY tRNA epoxyqueuosine(34) reductase QueG OS=Staphylococcus xylosus OX=1288 GN=queG PE=4 SV=1
MDLNQLKQDVIDYAHTIGIDSIGFTTADPFDEMKQKLVDYHAKGYASGFEESDIELRTEPTLTLPTARSIIAIAVGYPNKLKGAPKSTRGDRRGMFARASWGQDYHSIMRKRLDKLADYLRYRVEGVEIQSMVDTGALSDRAVAERAGLGYVGRNGFVINPELGTWTYLGEMLVSVPFAPDDPLLDSCGDCTICVDRCPTGALVGDGQLNSQKCISFLTQTKGYLADEYRYKIGNRLYGCDTCQQVCPRNKGINTQHDDIVLEPEILKPRLVPLLKMSNKEFKNTYGHLAGAWRGKKPIQRNAIVALAHFKEESAIPDLQDVALNDPRPMIRGTAYWAIGQIQGENARSFIEQQYQNELEEVQQEMLKGLEMRREQ

SEQ ID NO: 81306 - protein, 370 aa, Stappia indica
  REGION 1..370: note = tr|A0A285THG7|A0A285THG7_9RHOB Epoxyqueuosine reductase OS=Stappia indica OX=538381; GN = SAMN05421512_110153 PE=4 SV=1
MRIAAAGAPPQTTENLARFIAAGHHGSMEWMAETAERRAAPQALWPDARRVISLALSYAPDDDPLATLAAREQATISVYARNRDYHDIIKGRLKELAQHLLAQARRMGLGEGEVKVFVDTAPVMEKPLAQQAGLGWQGKHTNLVSRRLGSWFFLAEIFTDLELPVDEAEIDHCGSCRACLDVCPTDAFPAPYRLDARRCISYLTIENKGPIPRAFRPAMGNRIYGCDDCLAACPWNKFAVEAREVRLVARDDLRAPALADLLQLDDTAFRALFSGSPIKRIGRDRFLRNVLVAAGNSGSPALGARVEPLLADDSPLVRGAAVWAASRLLSPARFAALAAAGLAGEQDEEVREEWQAALAAATEEGSAGSE

SEQ ID NO: 81307 - protein, 386 aa, Stappia sp.
  REGION 1..386: note = tr|A0A2E6Y0P0|A0A2E6Y0P0_9RHOB Epoxyqueuosine reductase OS=Stappia sp. OX=1870903 GN=queG PE=3 SV=1
MTPRIGERLVASLRTKAERLGFSDCRIADARGIPEAPARLERFLADGHHATMDWMEETAERRGAPRALWPDARRIVTLAFSYGPDEDPLAVLSRPDRAAISVYARHRDYHDVVKGKLKELAQHLLADARRAGHAGEVKVFVDTAPVMEKPLAEVAGLGWQGKHTNLVSRRLGSWFFLAEIFTDLPLPADEPERDHCGSCRACLDACPTDAFPAPYRLDARRCISYLTIEHKGPVPERFRVAMGNRIYGCDDCLAACPWNKFAQAAREAKLVARDDLRAPDLASLLDLDDTGFRTLFSGSPIKRIGRDRFLRNVLIAAGNSADQALREKVASLLQDESALVRGAAVWALSRLERPERFQALHAEFAPAERDPDALAEWASALNALKR

SEQ ID NO: 81308 - protein, 383 aa, Stappia sp.
  REGION 1..383: note = tr|A0A1H2IUJ7|A0A1H2IUJ7_9RHOB Epoxyqueuosine reductase OS=Stappia sp. ES.058 OX=1881061 GN=queG PE=3; SV = 1
MSEKAAARVKTSLCKKAEELGFDACAIAEADAIPEAPGRLRRFLADGHHATMDWMAETEERRGLPRALWPQASRIITLAMTYAGEGDPLAALDEPTAASISVYARNRDYHDLVKGRLKELAQHLLAQARRQGVEGMVKVFVDTAPVMEKPLAQASGLGWQGKHTNLVSRDLGSWFFLAEIFTDLPLPVDAPETDHCGSCRACLDVCPTQAFPTAYRLDARRCISYLTIEHKGPIPHEFRAAMGNRIYGCDDCLAACPWNKFAQTAREAKLRAREDLVAPRLAELLTLDDAGFRTLFSGSPIKRIGRDRFLRNVLIAAGNSGDPALTEHIVALLGDGNALVRGAAVWALRHLVPAATFKRLADHHEQRETDGDVRAEWVAAQRQ

SEQ ID NO: 81309 - protein, 388 aa, Starkeya novella
  REGION 1..388: note = tr|D7A0I0|D7A0I0_STAND Epoxyqueuosine reductase; OS = Starkeya novella (strain ATCC 8093 / DSM 506 / CCM 1077 / IAM 12100 / NBRC 12443 / NCIB 9113) OX=639283 GN=queG PE =3 SV=1
MLRGPRFLTPEAAKAHLFALAREEGFDAMGIASADAIPHAAPRLNQWIADGAHGDMDWMPETAARRSSPGNMWPEVRSVLMLGLNYGPDEDPRAALADATRGAISVYARGDDYHELIKGKLKRIASRFVPRVGGPDAVQVKVFVDTAPLMEKPLAEAAGLGWQGRHTNLVSREKGSWLLLGAVATDLALPPDAPERDNCGSCRACLDACPTNAFPAAYRIDARRCISYLTIEHKGPIPVELRPLMGNRIYGCDDCLAACPWNKFAQVGREARLAARDENRAPALAELARLDDAAFRARFSKSPIKRTGRVRFLRNVLIAIGNSGDPALVPEAERLLTDDHPLLRGAAVWALARLLDPADFARLRDAHAGESDPEVRAEWRLARASEAA

SEQ ID NO: 81310 - protein, 376 aa, Starkeya novella
  REGION 1..376: note = tr|A0A2W5MLF9|A0A2W5MLF9_STANO Epoxyqueuosine reductase OS=Starkeya novella OX=921 GN=queG PE=3 SV=1
MGPAALKAEIARRAKALGFDVVAVTRPDAIPQAAGRLAQALGDGHHGAMNWLAERAEWRGDPTALWPEARSVVMLAMNYGPDEDPRALLDRPDCGAISVYARGDDYHDVIKGRLKQVAGALAAAGAPAKVFVDTAPVMEKPLAAAAGLGWQGKHTNLVSRDFGSWLFLGAIFTSAELPADEPASDACGSCRACLDACPTDAFPAPYRLDARRCVSYLTIELDGPIPVEFRKAIGNRIYGCDDCLAACPWNKFAVAGREMRLSARDDLKAPDLVSLSRLDDATFRKLFSKSPVKRIGRDRFVRNVAIALGNAGTPEAAAAARDLLDDASALVRGAAVWAVSRLAPATLGPLAAERLAAETDEDARREWERALSLEAA

SEQ ID NO: 81311 - protein, 391 aa, Starkeya sp.
  REGION 1..391: note = tr|A0A556PJ39|A0A556PJ39_9RHIZ Epoxyqueuosine reductase OS=Starkeya sp. 3C OX=2597768 GN=queG PE=3 SV=1
MLRGSRFLTPRSPSPEAAKALLFALARDEGFDAMGIARADAIPHAGPRLRQWIADGAHGDMDWMPETAERRAAPDGLWPEVASILMLGLNYGPDEDPRAVLAQRTRGAISVYARGDDYHELIKGKLKRIASRFVPRAGGPERVQVKVFVDTAPLMEKPLAAAAGLGWQGKHTNLVSREKGAWLFLGAIATDLALPPDAPESDHCGSCRACLDACPTDAFPAPYRIDARRCVSYLTIEHRGPIPHELRPLIGNRIYGCDDCLAACPWNKFAALGHEARLAARDENRAPALADLARLDDAAFRARFTKSPIKRTGRPRFLRNVLIAIGNSGDAALAPEAERLLADAHPLVRGAAVWALSRLLAPAAFARLRAAHDGETDPDVREEWLHAIPVS

SEQ ID NO: 81312 - protein, 363 aa, Stenotrophomonas acidaminiphila
  REGION 1..363: note = tr|A0A2W5LRU9|A0A2W5LRU9_9GAMM Epoxyqueuosine reductase OS=Stenotrophomonas acidaminiphila OX=128780; GN = queG PE=3 SV=1
MPSVGSATTPPDPAALAHRVRTLAREFGFQRCGIAGIELGDDERHLRDWLAEGLYGSMEWMAQHGDKRSRPQELIPGTLRVISVGLDYGRNDSDDAWDTLHDGERAYVARYALGRDYHKLMRNRLQKLAERLQQEVGAFGHRVFVDSAPVLERALARNAGLGWIGKHTCLIDKDGGSWFFLGEIYVDLPLPIDAPASAHCGTCTRCIDVCPTQAITAPYRLDARRCISYLTIEHDGAIPEELRPAIGNRIFGCDDCQLVCPWNKFAKRTDEPDFRARNELDVAALPQLFAWDEAEFLRRTEGSAIRRSGHERWLRNIAVALGNAPTTPDVLAALASRREDPSPLVREHVAWALARHRLTVGAT

SEQ ID NO: 81313 - protein, 360 aa, Stenotrophomonas acidaminiphila
  REGION 1..360: note = tr|A0A2L0SL07|A0A2L0SL07_9GAMM Epoxyqueuosine reductase OS=Stenotrophomonas acidaminiphila OX=128780; GN = queG PE=3 SV=1
MPGAVATADMAQLSLRIRQLAREAGFQRCGISGVDLGEDAAHLADWLGKGLYGTMEWMARHGAMRARPQELLPGTVRVISVGLDYGHKDDAAAWATLDDAERAYVARYALGRDYHKLMRNRLQKLAGRIATEIGPFGYRVFVDSAPVLERALARNAGLGWIGKHTCLIDKDGGSWFFLGEIYIDLPLPVDAPASAHCGSCTRCIDICPTAAIIAPHRLDARRCISYLTIEHEGAIPLEMRPLMGNRIYGCDDCQLVCPWNKFARRTDEPDFRARNDLDTATLPELFAWDEDEFLRRTEGSPIRRSGHERWLRNIAVALGNAAPSPAARQALLSRLDHPSELVREHVAWALRRHDPRQDPG

SEQ ID NO: 81314 - protein, 360 aa, Stenotrophomonas chelatiphaga
  REGION 1..360: note = tr|A0A0R0CXW6|A0A0R0CXW6_9GAMM Epoxyqueuosine reductase OS=Stenotrophomonas chelatiphaga OX=517011; GN = queG PE=3 SV=1
MHPDSPTLPAGLDPALAVQRIRALARAHGFQRCGIAGVDLAGDEAHLADWLGQGLYGTMDWMARHGTLRARPAELLPGTVRVISLGMDYSHKDDTEAWATLADPGRAYVARYALGRDYHKLMRNRLQKLAAQISGEVAPLGFRVFVDSAPVLERALGRDAGLGWIGKHTCLIDRHGGSWFFLGEIYIDLPLPIDQPASAHCGTCTRCIDVCPTQAIIAPQRLDARRCISYLTIEHDGAIPEPMRALIGNRIYGCDDCQLVCPWNKFAKRTDEADFRARNNLDRARLDELFSWDEAEFLHRTEGSPIRRSGHERWLRNIAVALGNAPTSAQVVEALTTRCTHDSALVREHVQWALEQHGAG

SEQ ID NO: 81315 - protein, 360 aa, Stenotrophomonas daejeonensis
  REGION 1..360: note = tr|A0A0R0DM32|A0A0R0DM32_9GAMM 4Fe-4S ferredoxin-type domain-containing protein (Fragment); OS = Stenotrophomonas daejeonensis OX=659018 GN=ABB34_13595; PE = 3 SV=1
MPEAVSAADMAQLSLRIRQLAREAGFQRCGISDIELREDEAHLADWLGKGLYGTMEWMARHGAMRARPHELLPGTVRVISVGLDYGPKEDAEAWATLNNAERAYVARYALGRDYHKLMRNRLQKLAERVAAEVGPFGHRVFVDSAPVLERALARNAGLGWIGKHTCLIDKDGGSWFFLGEIYVDLPLPVDAPATAHCGTCTRCIEVCPTAAIIAPYRLDARRCISYLTIEHDGAIPTEMRPLMGNRIYGCDDCQLVCPWNKFARRTDEPDFRARNNLDTATLPELFAWEEDEFLRRTEGSPIRRSGHERWLRNIAVALGNAAPSPAARQALESRRGHPSELVREHVAWGLERYGGERGTG

SEQ ID NO: 81316 - protein, 361 aa, Stenotrophomonas ginsengisoli
  REGION 1..361: note = tr|A0A0R0D941|A0A0R0D941_9GAMM Epoxyqueuosine reductase OS=Stenotrophomonas ginsengisoli OX=336566; GN = queG PE=3 SV=1
MHTSAPPTLDPQQLQQARQRLLALAAQAGFARCGISVPDLSTDAAHLADWLGQGLYGTMDWMARNTQLRADPVALLPGTVRVVSVGMDYGQDPQAAWDTLGDGQQAYVARYALGRDYHKLMRNRLQKLASTLAAEFGPLGFRVFVDSAPVLERALGRDAGLGWIGKHTCLIDKRGGSWFFLGEIYIDLPLPVDAPASAHCGSCTRCIDICPTAAIIAPHRLDARRCISYLTIEHEGSIEEQLRPLIGNRIYGCDDCQLVCPWNKFAKRTDEPDFRARNQLDTASLADLFAWEEEEFLRRTEGSAIRRSGHERWLRNIAVAMGNTPSPLHQQSLQRRLDHPSVVVREHVRWALDRHQASDWP

SEQ ID NO: 81317 - protein, 362 aa, Stenotrophomonas humi
  REGION 1..362: note = tr|A0A0R0C6V0|A0A0R0C6V0_9GAMM Epoxyqueuosine reductase OS=Stenotrophomonas humi OX=405444 GN=queG PE=3; SV = 1
MSEAVSIANPAQLSLRIRQLAREAGFQRCGISGIELADDEAHLADWLGKGLYGTMEWMARHGSLRARPQELLPGTVRVLSVGMDYGHKDETEAWATLNDAERAYVARYALGRDYHKLMRNRLQKLAERIAGEIGPFGYRVFVDSAPVLERALARNAGLGWIGKHTCLIDRNGGSWFFLGEIYLDLPLPVDTPATAHCGTCTRCIDVCPTAAIIAPYRLDARRCISYLTIEHEGAIPLEMRPLMGNRIYGCDDCQLVCPWNKFAHRTDEPDFRVRNNLDTATLPELFAWKEDEFLRRTEGSPIRRSGHERWLRNIAVALGNAAPSASAHDALVQRLEHPSEVVREHVQWALQQHADVPAPGKQ

SEQ ID NO: 81318 - protein, 359 aa, Stenotrophomonas koreensis
  REGION 1..359: note = tr|A0A0R0BXL7|A0A0R0BXL7_9GAMM Epoxyqueuosine reductase OS=Stenotrophomonas koreensis OX=266128 GN=queG; PE = 3 SV=1
MSPLSPPPPPLSALQRARERVLALATAAGFSRCGISTPDLGQDAAHLADWLGKGLYGTMDWMARNTALRTDPAALLPGTVRVISVGLDYGQDPDAAWATLEDGQRAYVARYALGRDYHKLMRNRLQKLAAQLGQEFGPLGFRVFVDSAPVLERALGRDAGLGWIGKHTCLIDKRGGSWFFLGEIYIDLPLPTDTPASAHCGSCQRCIDICPTQAIIAPYRLDARRCISYLTIEHEGSIDPALRPLIGNRIYGCDDCQLVCPWNKFARRTDEPDFRTRNQLDSASLCALFAWDEEEFLRRTEGSAIRRSGHERWLRNIAVAMGNAPSPAHRAALLGRAGHPSPIVREHVAWALERHTDVS

SEQ ID NO: 81319 - protein, 356 aa, unidentified
  source 1..356: note = Stenotrophomonas lactitubi
  REGION 1..356: note = tr|A0A2M9QY09|A0A2M9QY09_9GAMM Epoxyqueuosine reductase OS=Stenotrophomonas lactitubi OX=2045214 GN=queG; PE = 3 SV=1
MSPVPAPLDPALAVQRIRDLARAHGFQRCGIAGIELGEDEAHLADWLGQGLYGTMDWMARHGTLRARPAELLPGTVRVISVGMDYSHKDDTEAWATLADPGRAYVARYALGRDYHKLMRNRLQKLATQINDEVAPLGYRVFVDSAPVLERALARNAGLGWIGKHTCLIDRHGGSWFFIGEIYIDIPLPIDTPASAHCGTCTRCIDVCPTQAITGPQRLDARRCISYLTIEHDGAIPVEMRPLIGNRIYGCDDCQLVCPWNKFAKRTDEADFRARNNLDTARLDQLFAWDEAEFLRRTEGSPIRRSGHERWLRNIAVALGNASTTAETLSALQTRAEDASPVVREHVQWAMGQHGLR

SEQ ID NO: 81320 - protein, 356 aa, Stenotrophomonas maltophilia
  REGION 1..356: note = tr|A0A4S1MK97|A0A4S1MK97_STEMA Epoxyqueuosine reductase OS=Stenotrophomonas maltophilia OX=40324 GN=queG; PE = 3 SV=1
MSPAPTPVDPAQAVQRIRELARAHGFQRCGIAGIELGEDEAHLADWLGQGLYGTMDWMARHGTLRARPAELLPGTVRVISVGMDYSHKDDTEAWATLADPGRAYVARYALGRDYHKLMRNRLQKLATQINDEVAPLGYRVFVDSAPVLERALARNAGLGWIGKHTCLIDRHGGSWFFIGEIYIDIPLPIDTPATAHCGTCTRCIDVCPTQAIIGPQRLDARRCISYLTIEHDGAIPEEMRPLMGNRIYGCDDCQLVCPWNKFAKRTDEADFRARNNLDAARLDQLFAWDEAEFLRRTEGSPIRRSGHERWLRNIAVALGNAPSSAEALAALRTRVDDPSPLVREHVQWALGQHTAR

SEQ ID NO: 81321 - protein, 384 aa, Stenotrophomonas maltophilia
  REGION 1..384: note = tr|M5D1M6|M5D1M6_STEMA Epoxyqueuosine reductase; OS = Stenotrophomonas maltophilia SKK35 OX=1118156 GN=yjeS; PE = 3 SV=1
MRAHRARAPLWYRTEGKDRACRDFILVHMSPVPAPVDPAQAVQRIRELARAHGFQRCGIAGIELGEDEAHLADWLGQGLYGTMDWMARHGTLRARPAELLPGTVRVISVGMDYSHKDDTEAWATLADPGRAYVARYALGRDYHKLMRNRLQKLATQINDEVAPLGYRVFVDSAPVLERALARNAGLGWIGKHTCLIDRHGGSWFFIGEIYIDIPLPIDAPATAHCGTCTRCIDVCPTQAIIGPQRLDARRCISYLTIEHDGAIPEDMRPLIGNRIYGCDDCQLVCPWNKFARRTDEADFRARNQLDTARLDQLFAWDEAEFLRRTEGSPIRRSGHERWLRNIAVALGNAPASAEALAALHTRIDDRSPLVREHVQWALGQHAAR

SEQ ID NO: 81322 - protein, 359 aa, unidentified
  source 1..359: note = Stenotrophomonas panacihumi
  REGION 1..359: note = tr|A0A0R0A9D6|A0A0R0A9D6_9GAMM Epoxyqueuosine reductase OS=Stenotrophomonas panacihumi OX=676599 GN=queG; PE = 3 SV=1
MSAVPAPALAPAALAALATRVRVLAREAGFQRCGISGIDLGEDEAHLRDWLAEGLYGTMHWMAQHGSKRARPAELVPGTLRVLSVGMDYGRRDDEAAWATLDDGERAYVARYALGRDYHKLMRHRLQKLAERLQAEVGPFGFRVFVDSAPVLERALARNAGLGWIGKHTCLIDKQGGSWFFLGEIYLDLPLPVDTPATAHCGSCVRCIDICPTGAIVAPHRLDARRCISYLTIEHDGAIPEEFRKPMGNRIYGCDDCQLVCPWNKFAQRTDEADFRARNDLDTATLPQLFAWEEDEFLRRTEGSPIRRSGHERWLRNIAVALGNAPTTPDVLAALASRREHASALVREHVAWALAQHAQ

SEQ ID NO: 81323 - protein, 356 aa, Stenotrophomonas pavanii; identical to SEQ ID NO: 74961
  REGION 1..356: note = tr|A0A246L3P2|A0A246L3P2_9GAMM Epoxyqueuosine reductase OS=Stenotrophomonas pavanii OX=487698 GN=queG; PE = 3 SV=1

SEQ ID NO: 81324 - protein, 362 aa, unidentified
  source 1..362: note = Stenotrophomonas pictorum
  REGION 1..362: note = tr|A0A0R0AD61|A0A0R0AD61_9GAMM Epoxyqueuosine reductase OS=Stenotrophomonas pictorum JCM 9942 OX=1236960; GN = queG PE=3 SV=1
MSEAAFTVNPAQLSLRIHQLAREAGFQRCGISGIALGEDEAHLADWLGKGLYGTMEWMARHGTMRARPQELLPGTVRVISVGLDYGHKDDAAAWATLDDAERAYVARYALGRDYHKLMRNRLQKLAERIAGEIGPFGYRVFVDSAPVLERALARNAGLGWIGKHTCLIDRNGGSWFFLGEIYVDLPLPVDAPASAHCGTCTRCIDVCPTAAIIAPHRLDARRCISYLTIEHEGAIPLEMRPLMGNRIYGCDDCQLVCPWNKFARRTDEPDFRARNNLDTATLPELFAWEEDEFLRRTEGSPIRRSGHERWLRNIAVALGNATPSPAAKQALEQRREHASALVREHVQWALQRHTESAGMGPP

SEQ ID NO: 81325 - protein, 362 aa, Stenotrophomonas rhizophila
  REGION 1..362: note = tr|A0A1B2N5S7|A0A1B2N5S7_9GAMM Epoxyqueuosine reductase OS=Stenotrophomonas rhizophila OX=216778 GN=queG; PE = 3 SV=1
MSAVPLPAPLDLARAAERVRALARQHGFQRCGVSGIDLADDETHLADWLGQGLYGTMDWMARHGTLRARPAELLPGTVRVISVGMDYGHKDDTEAWNTLHDGNRAYVARYALGRDYHKLMRNRLQKFADALAAEIGTFGYRVFVDSAPVLERALARNAGLGWIGKHTCLIDRQGGSWFFLGEIYIDLPLPVDAPASAHCGTCTRCIDVCPTQAIIGPQRLDARRCISYLTIEHDGAIPEDMRPLMGNRIYGCDDCQLVCPWNKFARRTDEPDFRARNALDTATLAELFAWEEDEFLRRTEGSPIRRSGHERWLRNIAVALGNAPGHPDTLAALHARAGHDSALVREHVQWALQQHARLDNGG

SEQ ID NO: 81326 - protein, 362 aa, Stenotrophomonas rhizophila
  REGION 1..362: note = tr|A0A023Y1Q8|A0A023Y1Q8_9GAMM Epoxyqueuosine reductase OS=Stenotrophomonas rhizophila OX=216778 GN=queG; PE = 3 SV=1
MSAVPLPAPVNLARATERVREIARAHGFQRCGVSGIELGEDEAHLADWLGKGLYGTMDWMARHGTMRARPAELLPGTVRVISVGMDYGHKDDAQAWDTLHDGDRAYVARYALGRDYHKLMRNRLQKFADAIAAEIGAFGYRVFVDSAPVLERALARNAGLGWIGKHTCLIDKQGGSWFFLGEIYIDLPLPVDTPATAHCGTCTRCIDVCPTQAIIGPQRLDARRCISYLTIEHAGAIPEDMRPLMGNRIYGCDDCQLVCPWNKFARRTDEPDFRARNDLDTASLAQLFAWEEDEFLRRTEGSPIRRSGHERWLRNIAVALGNAPTSAQTLAALDARRAHASPIVREHVAWALQQHAARNPGA

SEQ ID NO: 81327 - protein, 362 aa, Stenotrophomonas sp.
  REGION 1..362: note = tr|A0A357NM23|A0A357NM23_9GAMM Epoxyqueuosine reductase OS=Stenotrophomonas sp. OX=69392 GN=queG PE=3; SV = 1
MSAVPAPVPLDPALAAHRLRALARAHGFQRCGVAGIELGEDEAHLADWLGKGLYGTMQWMARHGTLRARPAELLPGTVRVISVGMDYGHKDDAQAWDTLHDGDRAYVARYALGRDYHKLMRNRLQKFADALAAEIGPFGYRVFVDSAPVLERALARNAGLGWIGKHTCLIDRQGGSWFFLGEIYVDLPLPVDTPATAHCGTCTRCIDVCPTQAIIAPQRLDARRCISYLTIEHEGAIPEPMRPLMGNRIYGCDDCQLVCPWNKFARRTDEPDFRARNDLDTASLAQLFAWEEDEFLRRTEGSPIRRSGHERWLRNIAVALGNAPTHADTLAALHARRAHPSAIVREHVEWALQQHAGRDAAG

SEQ ID NO: 81328 - protein, 358 aa, Stenotrophomonas sp.
  REGION 1..358: note = tr|A0A3S7JUG6|A0A3S7JUG6_9GAMM Epoxyqueuosine reductase OS=Stenotrophomonas sp. ZAC14D2_NAIMI4_6; OX = 2072406 GN=queG PE=3 SV=1
MSPAPAPAPLDPALAVQRIRDLARAHGFQRCGIAGIELGEDEAHLADWLGQGLYGTMDWMARHGTLRARPAELLPGTVRVISVGMDYSHKDDTEAWATLADPGRAYVARYALGRDYHKLMRNRLQKLATQINDEVAPLGYRVFVDSAPVLERALARNAGLGWIGKHTCLIDRHGGSWFFIGEIYIDIPLPIDAAATAHCGTCTRCIDVCPTQAITAPHRLDARRCISYLTIEHDGAIPEDMRPLIGNRIYGCDDCQLVCPWNKFAKRTDEADFRARNNLDTARLDQLFAWDEAEFLRRTEGSPIRRSGHERWLRNIAVALGNAPASAEALAALHTRANDPSPVVREHVQWALAQHGAA

SEQ ID NO: 81329 - protein, 360 aa, Stenotrophomonas terrae
  REGION 1..360: note = tr|A0A0R0C816|A0A0R0C816_9GAMM Epoxyqueuosine reductase OS=Stenotrophomonas terrae OX=405446 GN=queG; PE = 3 SV=1
MSEAVTAANPAQLSLRIRQLAREAGFQRCGVSGIELGEDEAHLADWLGKGLYGTMEWMARHGTLRARPQELLPGTLRVISVGLDYGHKDDAEAWANLNDSERAYVARYALGRDYHKLMRNRLQKLAERIGSEIGPFGYRVFVDSAPVLERALARNAGLGWIGKHTCLIDRNGGSWFFLGEIYVDLPLPVDVPATAHCGTCTRCIDVCPTAAIIAPHRLDARRCISYLTIEHEGAIPLDMRPLMGNRIYGCDDCQLVCPWNKFAQRTDEPDFRARNNLDTATLPELFAWEEDEFLRRTEGSPIRRSGHERWLRNIAVALGNAAPSPVVQQALQTRQAHPSEVVREHVQWALQRHAGDTPKQ

SEQ ID NO: 81330 - protein, 348 aa, Steroidobacter denitrificans
  REGION 1..348: note = tr|A0A127F7H0|A0A127F7H0_STEDE Epoxyqueuosine reductase OS=Steroidobacter denitrificans OX=465721; GN = queG PE=3 SV=1
MTELKQAIRNWGHELGFQQIGIAGIDIREDEERLMQWLQQQRHGAMGYMQRHGRMRARPQELLPGTLRVISARMDYLPPGTRAAYDILAQPALGYVSRYALGRDYHKLMRRRLARLTERIQSHSLALEQRAFVDSAPVLEKAFARNAGLGWIGKHTTLINRHAGSWFFLGEILTDLPLPADTPASAHCGSCHACIDICPTQAIVAPYELDARRCISYLTIELREAIPEEFRKAMGNRIYGCDDCQLVCPWNKFAQLSIEPDFMPRHGLDAAALTQLFAWSEAEFLTRTEGSAIRRIGHECWLRNIAVALGNAPTSPEVLAALHSRARHPSALVREHVQWAIAQHRDTP

SEQ ID NO: 81331 - protein, 339 aa, Stigmatella aurantiaca
  REGION 1..339: note = tr|A0A1H7SY89|A0A1H7SY89_STIAU Epoxyqueuosine reductase OS=Stigmatella aurantiaca OX=41; GN = SAMN05444354_108182 PE=4 SV=1
MSSLPAIGLRQLAEAVGFDLVGFARAEPIPAEVLCSWVEAGYAADMDWMGERAAERLDVRLLLPGAKTVVAFANNYYRDDPEAVDSPIARYARGRDYHSTLKDRMKAFRKALQETYPGIGTYGGVDSGPIMEKVWAARAGLGYVGKNGCFITERYGSWVLLATVILDREVDAYGEGPAADRCGSCRKCLMSCPSGALVGNGRVDARACLSYQTIENRAHEVPESFRVMMDNLVFGCDICQDVCPLNRKPVFAGHARFAPRAVAGLGVMELAGLTPEQYAQFIPGTALARARYDGLRRNAIYALGAARQEEARALLEKLSEEPSEPVRSAAQWALRQLAQ

SEQ ID NO: 81332 - protein, 339 aa, Stigmatella aurantiaca
  REGION 1..339: note = tr|E3FN75|E3FN75_STIAD Iron-sulfur cluster binding protein OS=Stigmatella aurantiaca (strain DW4/3-1); OX = 378806 GN=STAUR_6606 PE=4 SV=1
MSSLPTAWLRQLAEAVGFDLVGFSRAEPIPPEALCSWVEAGYAADMDWMGERAAERLDVRLLLPGAKTVVTFANNYYRDDPEAADSPIARYARGRDYHSTLRDRMKAFRKALQESYPGIGTYGGVDSGPMMEKVWAARSGMGYVGKNGCFITERYGSWVLLATLILDAEVDAYGEGPATDRCGACRRCLLSCPTGALVGNGRVDARACLSYQTIENRSQEVPEAFRFAMDSLVFGCDICQDVCPLNRKPVFAEHPRFAPRAVAGLGVMELAGLTPEQYAQFIPGTALARARYDGLRRNAIYALGAARQEQARALLEKLCEEPSEPVRSAAQWALRQLAQ

SEQ ID NO: 81333 - protein, 339 aa, Stigmatella erecta
  REGION 1..339: note = tr|A0A1I0DT59|A0A1I0DT59_9DELT Epoxyqueuosine reductase OS=Stigmatella erecta OX=83460; GN = SAMN05443639_102670 PE=4 SV=1
MSSLPTTWLRQLAEAVGFDLVGFSRAEPIPAEVLCSWVEAGYAADMDWMGERAAERLDVRLLLPGAKTVVSFANNYYRDDPEAVDSPIARYARGRDYHSTLKDRMKAFRKALQEGYPGIGTYGGVDSGPLMEKVWAARAGLGYVGKNGCFITERYGSWVLLATVILDREVDAYGEGPAADRCGSCRKCIMSCPSGALVGNGRVDARACLSYQTIENRAHEVPESFRVMMDNLVFGCDICQDVCPLNRKPVFAEHARFAPRAVAGLGVMELAGLTPEQYAQFIPGTALARARYDGLRRNAIYALGASRQEQARVLLEKLSEEPSEAVRSAAQWALRQLAQ

SEQ ID NO: 81334 - protein, 372 aa, Streptococcus acidominimus
  REGION 1..372: note = tr|A0A239XA63|A0A239XA63_STRAI Iron-sulfur protein; OS = Streptococcus acidominimus OX=1326 GN=queG PE=4 SV=1
MELKAEIKKIANEIGISKIGFTTADDFSYLEKSLRLGVEEGRTTGFEHKVIEERIKPKLSLESAKTIISIAVAYPHKLPIQPQKTQYKRGKITPNSWGTDYHHVLQEKLSQLAEAIESLTQDFEYKGMVDTGALVDTAVARRAGIGFIGKNGLVISKEFGSYMYLGELITNLEIEPDQPVDYDCGDCRRCLDACPTSCLIGDGTMNARRCLSFQTQDKGMMAMEFRKKIKTVIYGCDICQICCPYNRGIDNPLASEIDPELAQPELIPFLELSNKDFKAKFGQIAASWRGKNILQRNAIIALANGHDRTAIIKLMEIIDKNNNPIHTATAIWALGAIVKKPDEAMLDFMRSLSLKEEDSLKELELVRQKWQF

SEQ ID NO: 81335 - protein, 375 aa, Streptococcus acidominimus
  REGION 1..375: note = tr|A0A1Q8EFI0|A0A1Q8EFI0_STRAI 4Fe-4S ferredoxin; OS = Streptococcus acidominimus OX=1326 GN=queG PE=4 SV=1
MNLKEQIIALSQEIGISKIGFTTADDFAYLEKSLRMAVEEGRTSGFEHKNIEERIKPKLSLASAKTIISIAIAYPRRLPQKPRKTQYKRGKITPNSWGLDYHYILQDKLARLARGIEELTADFEYKGMVDTGALVDTAVARRAGIGFIGKSGLVISKEFGSYMFLGELITNLEIEPDQPVDYDCGECNRCVTTCPTSCLIGDGTMNARRCLSFQTQDKGMMDLEFRKKIKTVIYGCDICQICCPYNKGIDSPPVVDIDPELAEPELIPFLELSNGQFKEKFGMIAGSWRGKNILQRNAIIALANANDRSSIPKLLEIIDKNQNPIHVATAIWALSQLVKQPNEELIDFIEQIRHDHPDVVAEREAFLSFAKKPQM

SEQ ID NO: 81336 - protein, 374 aa, Streptococcus agalactiae
  REGION 1..374: note = tr|A0A4U3JHP5|A0A4U3JHP5_STRAG tRNA epoxyqueuosine(34) reductase QueG OS=Streptococcus agalactiae OX=1311 GN=queG PE=4 SV=1
MDIKAEIQKLAKEIGISKIGFTTADNFDYLEKSLRASVEEGRNSGFEHKVIEDRIYPERLSESAKTIISIGVAYPHKLPQQPQKTSYKRGKITPNSWGLDYHYVVGEKLDRLSKGIEELCRDFPLQQKAMVDTGALVDTAVAQRAGIGFIGKNGLVISKEYGSYMFLGELITNLEIEPDKPVDYDCGDCRRCLDACPTSCLIGDGSMNAKRCLSFQTQDKGMMDIEFRKKIKTVIYGCDICQICCPYNKGINNPLATEIDPELAQPELIPFLSLSNGQFKEKFGMIAGSWRGKNILQRNAIIALANAHDKTAVVKLIEIIDKNNNPIHTATAIWALGEIVKKPNDEILEFMSNLTLKDEDSRKELELIRHKWQF

SEQ ID NO: 81337 - protein, 374 aa, Streptococcus agalactiae
  REGION 1..374: note = tr|Q8E145|Q8E145_STRA5 Iron-sulfur cluster-binding protein, putative OS=Streptococcus agalactiae serotype V (strain ATCC BAA-611 / 2603 V/R) OX=208435 GN=SAG0517 PE= 4 SV=1
MDIKAEIQKLAKEIGISKIGFTTADNFDYLEKSLRASVEEGRNSGFEHKVIEDRIYPERLLESAKTIISIGVAYPHKLPQQPQKTSYKRGKITPNSWGLDYHYVVGEKLDRLSKGIEELCRDFPLQQKAMVDTGALVDTAVAQRAGIGFIGKNGLVISKEYGSYMFLGELITNLEIEPDKPVDYDCGDCRRCLDACPTSCLIGDGSMNAKRCLSFQTQDKGMMDIEFRKKIKTVIYGCDICQICCPYNKGINNPLATEIDPELAQPELIPFLSLSNGQFKEKFGMIAGSWRGKNILQRNAIIALANAHDKTAVVKLIEIIDKNNNPIHTATAIWALGEIVKKPNDEILEFMSNLTLKDEDSRKELELIRHKWQF

SEQ ID NO: 81338 - protein, 377 aa, Streptococcus australis
  REGION 1..377: note = tr|A0A4Q1ZHD5|A0A4Q1ZHD5_9STRE tRNA epoxyqueuosine(34) reductase QueG OS=Streptococcus australis OX=113107 GN=queG PE=4 SV=1
MNLKESIIELAHSIGISKIGFTTADDFSYLEKSLRLAVEEGRNSGFEHKNIEERIQPRLSLASAKTIISIAVAYPHKLKQQPQKTAYKRGKFTPNSWGLDYHYVLQDKLDRLARGIEELTADFEYKGMVDTGALVDTAVAQRAGIGFIGKNGLVISKEYGSYMFLGELITNLEIEPDQAVDYGCGDCNRCVEACPTSCLIGDGSMNARRCLSFQTQDKGMMDLEFRKKIKTVIYGCDICQICCPYNRGLDNPLVTDIDPELAHPELIPFIELSNGQFKEKFGMVAGSWRGKNILQRNAIIALANANDRSAIPKLLEIIETSQNQIHIATAIWSLGELIREVTPDLVDLLTSLKNPSPAIIEERERFFQKFQHQISHN

SEQ ID NO: 81339 - protein, 377 aa, Streptococcus australis
  REGION 1..377: note = tr|E7S9Q1|E7S9Q1_9STRE Putative iron-sulfur cluster-binding protein OS=Streptococcus australis ATCC 700641 OX=888833 GN=HMPREF9421_0787 PE=4 SV=1
MNLKESIIELAHSIGISKIGFTTADDFSYLEKSLRLAVEEGRNSGFEHKNIEERIQPRLSLASAKTIISIAVAYPHKLKQQPQKTAYKRGKFTPNSWGLDYHYVLQDKLDRLARGIEELTADFEYKGMVDTGALVDTAVAQRAGIGFIGKNGLVISKEYGSYMFLGELITNLEIEPDQAVNYGCGDCNRCVEACPTSCLIGDGTMNARRCLSFQTQDKGMMDMEFRKKIKTVIYGCDICQICCPYNRGLDNPLATDIDPELAHPELIPFIELSNGQFKEKFGMVAGSWRGKNILQRNAIIALANANDRSAIPKLLEIIETSQNQIHIATAIWSLGELIREVTPDLVDLLTSLKNPSPAIIEERERFFQKFQHQISHN

SEQ ID NO: 81340 - protein, 371 aa, unidentified
  source 1..371: note = Streptococcus azizii
  REGION 1..371: note = tr|A0A1V2SQI1|A0A1V2SQI1_9STRE tRNA epoxyqueuosine(34) reductase QueG OS=Streptococcus azizii; OX = 1579424 GN=BVE84_02750 PE=4 SV=1
MNLKEQIIALSKEMGISKIGFTTADDFTYLEKSLRAAAEEGRTSGFEHKDIEERIKPRLSLASAKTIISIAVAYPRRLPEKPQKTQYKRGKITPNSWGLDYHYILQDKLERLARGIEELTVDFEYKGMVDTGALVDTAVAKRAGIGFIGKNGLVISKEFGSYMFLGELITNLEIEPDQPVDYDCGDCNRCITACPTSCLLGDGTMNARRCLSFQTQDKGMMDLEFRRKIKTVIYGCDICQICCPYNKGIDSPPVVAIDPDLAEPELIPFLELSNGQFKEKFGMIAGSWRGKNILQRNAIIALANAHDRSSIPKLLEIIDKRQNPIHMATAIWALSQLVRHPNEELIAFIENVRSDHPEVMEERAAFLSFAK

SEQ ID NO: 81341 - protein, 372 aa, unidentified
  source 1..372: note = Streptococcus bovimastitidis
  REGION 1..372: note = tr|A0A1L8MPN3|A0A1L8MPN3_9STRE tRNA epoxyqueuosine(34) reductase QueG OS=Streptococcus bovimastitidis OX=1856638 GN=A9Q68_04035 PE=4 SV=1
MELKAEIKKIANEIGISKIGFTTADDFSYLEKSLRLGVEEGRTTGFEHKVIEERIKPKLSLESAKTIISIAVAYPHKLPIQPQKTQYKRGKITPNSWGTDYHHVLQEKLSQLAEAIESLTQDFEYKGMVDTGALVDTAVARRAGIGFIGKNGLVISKEFGSYMYLGELITNLEIEPDQPVDYDCGDCRRCLDACPTSCLIGDGTMNAKRCLSFQTQDKGMMDLEFRKKIKTVIYGCDICQIACPYNKGISNPLASEIDPELAQPELIPFLELSNKDFKAKFGQIAASWRGKNILQRNAIIALANGHDRTAIIKLMEIIDKNNNPIHTATAIWALGELIKKPDAAILDYMRGLSPKEEESQKELEMLRAKWQF

SEQ ID NO: 81342 - protein, 390 aa, Streptococcus canis
  REGION 1..390: note = tr|A0A2D4DR06|A0A2D4DR06_STRCB Iron-sulfur cluster-binding protein OS=Streptococcus canis OX=1329; GN = TANIYAMA4_1843 PE=4 SV=1
MSSIRLEVLTYFDYDSSMNIKADIQALAKEIGISKIGFTTADDFSYLEKSLRLGVEEGRTTGFEHKVIEERIKPKLSLASAKTIISIAVAYPHKLPVPPPKTSYKRGKMTPNSWGLDYHHVLQDKLQRLAEGIEALTADFEYKGMVDTGALVDTAVARRAGIGFIGKNGLVISKEFGSYMYLGELITNLDIEPDQPVDYDCGDCRRCLDACPTSCLIGDGTMNARRCLSFQTQDKGMMALEFRKKIKTVIYGCDICQICCPYNKGINNPLASPIDPELAMPELVPFLELSNKSFKESFGMIAGSWRGKNILQRNAIIALANAHDRSAIPKLLEIIDQNNNPSHTATAMWALGELIKKPDQAMLDFMLGLSMAEEETKEELERLLTKWQRA

SEQ ID NO: 81343 - protein, 390 aa, Streptococcus canis; identical to SEQ ID NO: 81342
  REGION 1..390: note = tr|I7WI17|I7WI17_STRCB Iron-sulfur protein; OS = Streptococcus canis FSL Z3-227 OX=482234 GN=SCAZ3_04030; PE = 4 SV=1

SEQ ID NO: 81344 - protein, 374 aa, Streptococcus criceti
  REGION 1..374: note = tr|G5JT95|G5JT95_STRCG 4Fe-4S ferredoxin-type domain-containing protein OS=Streptococcus criceti HS-6; OX = 873449 GN=STRCR_1063 PE=4 SV=1
MDIKANIQTLAKELGISKIGFTTADDFAYLEKSLRASVDEGRNSGFEHKNIEERIDPKLSLASAKTIISIAVAYPRQLPVQPPKTQYKRGKITPNSWGLDYHHVLNDKLTRLAKGIEELCADFPLEHKAMVDTGALVDTAVAQRAGIGFIGKNGLVISKEYGSYMFLGELITNLEIEPDSPVDYGCGDCRRCLDACPTSCLLGNGSMDAKRCLSFQTQDKGMMAMEFRKKIKTVIYGCDICQICCPYNKGIQNPLATPIDPELAWPELLPFLDLSNSDFKKKFGEIAGSWRGKNILQRNAIIALANAHDRNALVKLMEIIDKNNNPIHTATAIWALGEIVKKPDQAIKDYMKALNPRDQAAKEEWRLVCIKWQI

SEQ ID NO: 81345 - protein, 374 aa, Streptococcus cristatus
  REGION 1..374: note = tr|A0A0F2CM16|A0A0F2CM16_STRCR (Fe-S)-binding protein OS=Streptococcus cristatus OX=45634 GN=TW70_00862; PE = 4 SV=1
MNIKEEIIKLSKDIGISKIGFTTADDFDYLEKSLRLAVEEGRNSGFEHKNIEERIKPKLSLASAKTIISIAVAYPHKLKQQPQKTAYKRGKFTPNSWGLDYHYVLQDKLDRLAKGIEELTADFEYKGMVDTGALVDTAVARRAGIGFIGKNGLVISKEFGSYMFLGELITNLDIEPDQPVDYDCGDCNRCVTACPTSCLIGDGTMNAKRCLSFQTQDKGIMDLEFRKKIKTVIYGCDICQICCPYNKGLDNPLATEIDPDLAHPELLPFLELSNGQFKEKFGHIAGSWRGKNILQRNAIIALANANDRSAIPKLLEIIDKGQNPIHIATAIWALSQLVREANPEMIEMILAVKNPTEAIKEEQEQFLKKFHLTN

SEQ ID NO: 81346 - protein, 374 aa, Streptococcus cristatus
  REGION 1..374: note = tr|E8JV84|E8JV84_STRCR Putative iron-sulfur cluster-binding protein OS=Streptococcus cristatus ATCC 51100 OX=889201 GN=HMPREF9422_1114 PE=4 SV=1
MNIKEEIIKLSKEIGISKIGFTTADDFDYLEKSLRLAVEEGRNSGFEHKNIEERIKPKLSLASAKTIISIAVAYPHKLKQQPQKTAYKRGKFTPNSWGLDYHYVLQDKLDRLAKGIEELTADFEYKGMVDTGALVDTAVARRAGIGFIGKNGLVISKEFGSYMFLGELITNLDIEPDQPVDYDCGDCNRCVTACPTSCLIGDGTMNAKRCLSFQTQDKGIMDLEFRKKIKTVIYGCDICQICCPYNKGLDNPLATEIDPELAHPELLPFLELSNGQFKEKFGHIAGSWRGKNILQRNAIIALANANDRSAIPKLLELIDKGQNPIHIATAIWALSQLVREANPEMIEMILAVKNPTEAIKEEQEQFLKKFHLTN

SEQ ID NO: 81347 - protein, 375 aa, unidentified
  source 1..375: note = Streptococcus cuniculi
  REGION 1..375: note = tr|A0A4Y9JD88|A0A4Y9JD88_9STRE tRNA epoxyqueuosine(34) reductase QueG OS=Streptococcus cuniculi OX=1432788 GN=queG PE=4 SV=1
MNLKEQIIALSKDIGISKIGFTTADDFSYLEKSLRAAVEEGRASGFEHKNIEERIEPKLSLASAKTIISIAVAYPRRLPQKPQKTQYKRGKMTPNSWGLDYHYILQDKLERLAHGIGELTADFEYKGMVDTGAMVDTAVARRAGIGFIGKNGLVISKEFGSYMFLGELMTNLEIDPDQPVDYDCGDCNRCVTACPTSCLLGDGTMNARCCLSFQTQDKGMMDLEFRKKIKTVIYGCDICQICCPYNKGIDNPPVVDIDPDLAEPELVPFLELSNGQFKEKFGMIAGSWRGKNILQRNAIITLANANDRSSIPKLLEMIDKKQNPIHVATAIWALSQLVKQPNEEMVAFIENVQSEHPDVVTEREAFLSFAKELQI

SEQ ID NO: 81348 - protein, 375 aa, unidentified
  source 1..375: note = Streptococcus cuniculi
  REGION 1..375: note = tr|A0A1Q8E868|A0A1Q8E868_9STRE tRNA epoxyqueuosine(34) reductase QueG OS=Streptococcus cuniculi OX=1432788 GN=BU202_05885 PE=4 SV=1
MNLKEQIIALSKDIGISKIGFTTADDFAYLEKSLRAAVEEGRTSGFEHKNIEERIKPRLSLASAKTIISIAVAYPRRLPQKPQKTQYKRGKITPNSWGLDYHYILQDKLERLARGIEELTADFEYKGMVDTGALVDTAVARRAGIGFIGKNGLVISKEFGSYMFLGELITNLEIEPDQPVDYDCGDCNRCVTACPTSCLLGDGTMNARRCLSFQTQDKGMMDLEFRKKIKTVIYGCDICQICCPYNKGIDSPPVVDIDPDLAEPELIPFLELSNGQFKEKFGMIAGSWRGKNILQRNAIIALANANDRSSIPKLLEIIDKKQNPIHMATAIWALSQLVKQPNEEMVAFIENVQSEHPDVVAEREAFLSFAKELQI

SEQ ID NO: 81349 - protein, 405 aa, Streptococcus downei
  REGION 1..405: note = tr|A0A380JDK6|A0A380JDK6_STRDO Iron-sulfur cluster-binding protein OS=Streptococcus downei MFe28; OX = 764290 GN=queG PE=4 SV=1
MEFRSFYFLTFPTYLLNLSLESWPFLHYDRPMDIKADIQKLAKEIGISKIGFTTADDFAYLEKSLRASVEEGRNSGFEHKNIEERIDPKLSLASAKTIISIAVAYPRQLPTQPPKTQYKRGKITPNSWGLDYHHVLNDKLNRLAKGIEELCADFPLEHKGMVDTGALVDTAVAQRAGIGFIGKNGLVISREYGSYMFLGELITNLEIEPDSPVDYGCGDCRRCLDACPTSCLLGNGSMDAKRCLSFQTQDKGMMAMEFRKKIKTVIYGCDICQICCPYNKGIQNPLATPIDPDLAWPELLPFLDLSNSDFKKKFGQIAGSWRGKNILQRNAIIALANAHDRNAVVKLMEIIDKNNNPIHTATAIWALGEIVKKPDQAIKDYMRDLAPQEEAAKQEWQLVCDKWQI

SEQ ID NO: 81350 - protein, 390 aa, Streptococcus dysgalactiae
  REGION 1..390: note = tr|A0A2Z6G5H3|A0A2Z6G5H3_STRDY Epoxyqueuosine reductase OS=Streptococcus dysgalactiae OX=1334 GN=queG; PE = 4 SV=1
MSSFRLEVLTYFDYDSSMNIKADIQALAKEIGISKIGFTTADDFSYLEKSLRLGVEEGRTTGFEHKVIEERIKPKLSLASAKTIISIAVAYPHKLPVQPPKTSYKRGKITPNSWGLDYHHVLQDKLQRLAEGIEALTADFEYKGMVDTGALVDTAVARRAGIGFIGKNGLVISKEFGSYMYLGELITNLDIEPDQPVDYDCGDCRRCLDACPTSCLIGDGTMNARRCLSFQTQDKGMMALEFRKKIKTVIYGCDICQICCPYNKGIDNPLASPIDPELAMPELVPFLELSNKSFKKTFGMIAGSWRGKNILQRNAIIALANAHDRSAIPKLLEIIDQNNNPIHTATAIWALGELIKKPNPDMLAFMQDLSLEHEESKEELERLLTKWQKA

SEQ ID NO: 81351 - protein, 390 aa, Streptococcus dysgalactiae
  REGION 1..390: note = tr|M4YW55|M4YW55_STREQ Iron-sulfur cluster-binding protein OS=Streptococcus dysgalactiae subsp. equisimilis RE378 OX=617121 GN=GGS_0638 PE=4 SV=1
MSSFRLEVLTYFDYDSSMNIKADIQALAKEIGISKIGFTTADDFSYLEKSLRLGVEEGRTTGFEHKVIEERIKPKLSLTSAKTIISIAVAYPHKLPVQPPKTSYKRGKITPNSWGLDYHHVLQDKLQRLAEGIEALTADFEYKGMVDTGALVDTAVARRAGIGFIGKNGLVISKEFGSYMYLGELITNLDIEPDQPVDYDCGDCRRCLDACPTSCLIGDGTMNARRCLSFQTQDKGMMALEFRKKIKTVIYGCDICQICCPYNKGIDNPLASPIDPELAMPELVPFLELSNQSFKKTFGMIAGSWRGKNILQRNAIIALANAHDRSAIPKLLEIIDQNNNPIHTATAIWALGELIKKPNPDMLAFMKDLALEHEESKEELERLLTKWQKA

SEQ ID NO: 81352 - protein, 372 aa, Streptococcus equinus
  REGION 1..372: note = tr|A0A1V0GKA8|A0A1V0GKA8_STREI tRNA epoxyqueuosine(34) reductase QueG OS=Streptococcus equinus; OX = 1335 GN=queG PE=4 SV=1
MDIKLEIQKMAKEIGISKIGFTTADDFAYLEKSLRLGVEEGRTTGFEHKNIEERIYPKLTLESAKTIISIAVAYPHKLPQQPQKTEYKRGKITPNSWGLDYHYVLQDKLKRLAEGIEKLTENFEYKGMVDTGALVDTAVAKRAGIGFIGKNGLVISKEYGSYMYLGELITNLEIEPDQEVDYGCGDCRRCLDACPTSCLIGDGTMNARRCLSFQTQDKGMMDMEFRKKIKTVIYGCDICQISCPYNRGIDNPLASDIDPELAMPELLPFLELTNKSFKEKFGLIAGSWRGKNILQRNAIIALANLHDRNAIVKLMEIIDKNNNPIHTATAIWALGEIVKKPDEAMLDYMRNLSPKDEDAQAEWELVCAKWQI

SEQ ID NO: 81353 - protein, 374 aa, Streptococcus ferus
  REGION 1..374: note = tr|A0A2X3VH59|A0A2X3VH59_9STRE 4Fe-4S ferredoxin; OS = Streptococcus ferus OX=1345 GN=queG PE=4 SV=1
MDIKGDIKKLAAEIGISKIGFTTADDFAYLEKTLRASLEEGRSSGFEHQVIEERLKPKLSLASAKTIISIAVAYPHKLPVKPPKTAYRRGKITPNSWGLDYHHVLQDKLKQLAEGIEKLCQDFPLEHKAMVDTGALVDTAVARRAGIGFIGKNGLVISKEFGSYMYLGELITNLEIEPDRPVDYDCGDCRRCLDACPTSCLMGDGSMNARRCLSFQTQDKGMMDLEFRKKIKTVIYGCDICQICCPYNKGLNNPLASQIDPELAEPELLPFLDLSNRQFKEKFGLIAASWRGKNILQRNAIIALANANDRTAVAKLLEIIDKGQNPIHAATALWSLGELVKQPTEDLVRFIEGIDSQDDNVLTEKRNLLNKWQF

SEQ ID NO: 81354 - protein, 372 aa, Streptococcus henryi
  REGION 1..372: note = tr|A0A1G6BML0|A0A1G6BML0_9STRE Epoxyqueuosine reductase OS=Streptococcus henryi OX=439219; GN = SAMN02910293_01100 PE=4 SV=1
MDIKAEIQQLAKEIGISKIGFTTADDFSYLEKSLRLGVEEGRTTGFEHKVIEERIHPKLSLESAKTIISIAVAYPHKLPVKAPKTNYKRGKITPNSWGLDYHHVLQDKLNRLAQGIEKLTENFEYKGMVDTGALVDTAVARRAGIGFIGKNGLVISKEFGSYMFLGELITNLDIEPDQPVDYDCGDCRRCLDACPTSCLIGDGTMNARRCLSFQTQDKGMMDMEFRKKIKTVIYGCDICQISCPYNKGINNPLATDIDPELAEPELIPFLELSNKSFKEQFGMIAGSWRGKNILQRNAIIALANSHDRSAVVKLMEIIDKNNNPIHTATAIWALGEIVKKPEETMLDFMRSLNPKEEESQKELALVRAKWQI

SEQ ID NO: 81355 - protein, 313 aa, Streptococcus ictaluri
  REGION 1..313: note = tr|G5K0B5|G5K0B5_9STRE Putative iron-sulfur cluster-binding protein OS=Streptococcus ictaluri 707-05; OX = 764299 GN=STRIC_0035 PE=4 SV=1
MDIKEEIKALAREIGISKIGFTTADDFSYLEKSLRLGVEEGRTTGFEHQNIEERVKPKLSLSSAKTIISIAVAYPHQLPVQPQKTSFKRGKITPNSWGLDYHYVLKDKLDRLAQCIEQLTENFEYKGMVDTGALVDTAVAKRAGIGFIGKNGLVISKEFGSYMYLGELITNLEIEADKPVDYDCGDCRRCLDACPTSCLFGDGTMNARRCLSFQTQDKGMMDLEFRKKIKTVIYGCDICQICCPYNKGINNPLASEIDPDLAMPELIPFLELTNKSFKEKFGMIAGSWRGKIFCNAMPSLPWLMVMPELPWLN

SEQ ID NO: 81356 - protein, 372 aa, Streptococcus iniae
  REGION 1..372: note = tr|A0A1J0MZL8|A0A1J0MZL8_STRIN tRNA epoxyqueuosine(34) reductase QueG OS=Streptococcus iniae; OX = 1346 GN=queG PE=4 SV=1
MEIKAEIIKLAKEIGISKIGFTTADDFSYLEKSLRLGVEEGRTSGFEHKNIEERVKPKLSLASAKTIISIAVAYPHKLPVPPPKTAYKRGKITPNSWGTDYHHVLQDKLSQLAQGIEALTKDFEYKGMVDTGALVDTAVARRAGIGFIGKNGLVISKEFGSYMYLGELITNLDITPDQPVTYDCGDCRRCLDACPTSCLIGDGTMNAKECLSFQTQDKGMMDLKFRKKIKTVIYGCDICQICCPYNKGLSNPLASDIDPELAMPELIPFLELSNKDFKEKFGYIAASWRGKNILQRNAIIALANGHDKSAIIKLMQIIDKNNNPIHTATAIWALGQVIKTPEEPMIAFIRSIKPSDKDSQKELELLLAKWQL

SEQ ID NO: 81357 - protein, 374 aa, Streptococcus macacae
  REGION 1..374: note = tr|G5JYQ9|G5JYQ9_9STRE Putative iron-sulfur cluster-binding protein OS=Streptococcus macacae NCTC 11558 OX=764298 GN=STRMA_0323 PE=4 SV=1
MDIKREIKALAKSIGISKIGFTTADDFAYLEKSLRASVEEGRSSGFEHKNIEERIKPKLSLKSAKTIISIAVAYPHKLPSKPPKTQYRRGKITPNSWGLDYHYVLKDKLQRLAQGIEELCQDFSLEHKAMVDTGALVDTAVAQRAGLGFIGKNGLLISKEFGSYMYLGELITNLEIEPDQPVDYDCGDCNRCLEACPTSCLIGDGTMNARRCLSFQTQDKGMMELEFRKKIKTVIYGCDICQICCPYNKGIHNPLASEIDPELAEPELIPFLDLSNSQFKKRFGKIAGSWRGKNILQRNAIIALANAHDRTAIVKLLEIIEKEQNAIHAATAIWALGEIVKKPTEGLYDFILSINSDNKDIMKERDDLLNRWQF

SEQ ID NO: 81358 - protein, 373 aa, Streptococcus merionis
  REGION 1..373: note = tr|A0A239SSY8|A0A239SSY8_9STRE (Fe-S)-binding protein OS=Streptococcus merionis OX=400065 GN=queG PE=4; SV = 1
MELKEKIIELSREIGISKIGFTTADDFAYLEKSLQASVEEGRNSGFEHKNIEERIKPRLSLASAKTIISIAVAYPHKLPIKPPKSHYKRGKFTPNSWGLDYHHVLQEKLDKLARGIETLTADFEFKGMVDTGALVDTAVARRAGIGFIGKNGLVISKEFGSYMFLGELVTNLEIEPDSPVDYDCGDCTRCLQACPTSCLIGDSTMNAKRCLSFQTQDKGMMDLEFRKKIKTVIYGCDICQICCPYNKGIDNPLATEIDPELAHPELLPFLKLSNGQFKEKFGHVAGSWRGKNILQRNAIIALANANDRSDIPKILEIIDRGQNDIHVATAIWALGELAKNPNPAMIEMVASIKSEHEGILKEQRAFLAKYDQV

SEQ ID NO: 81359 - protein, 373 aa, Streptococcus minor
  REGION 1..373: note = tr|A0A3P1VCK4|A0A3P1VCK4_9STRE tRNA epoxyqueuosine(34) reductase QueG OS=Streptococcus minor; OX = 229549 GN=queG PE=4 SV=1
MNLKEKIIQLSQEIGISKIGFTTADDFAYLEKSLRAGVEEGRTTGFEHKNIEERINPKLSLASARTIISIAVAYPRRLPQQPQKTGFRRGKITPNSWGLDYHYILQDKLERLARGIEDLTADFEYKGMVDTGALVDTAVARRAGIGFIGKNGLVISKEYGSYMFLGELITNLELEPDSPVDYDCGDCNRCVEACPTSCLLGDSTMDARRCLSFQTQDKGMMELEFRKKIKTVIYGCDICQICCPYNKGIDSPPVVDIDPDLAQPELIPFLELSNGQFKEKFGQIAGSWRGKNILQRNAIIALANAHDRSAIPKLLEIIDKGQNPIHAATAIWALGELVKEPTEEMISFIEGIQTDHPDVIVEQAAFVKLAKGL

SEQ ID NO: 81360 - protein, 373 aa, Streptococcus mutans
  REGION 1..373: note = tr|A0A2J9QGU1|A0A2J9QGU1_STRMG tRNA epoxyqueuosine(34) reductase QueG OS=Streptococcus mutans; OX = 1309 GN=queG PE=4 SV=1
MIKEAIKQLAQDIGISKIGFTTADDFDYLEKSLRASVEEGRSSGFEHKNIEERIKPRLSLASAKTIISIAIAYPHKLPVKPPKTQYKRGKITPNSWGLDYHYVLEEKLQRLAQGIESLCQDFPLEHKIMVDTGALVDTAVAQRSGIGFIGKNGLVISKEFGSYMYLGELITNLEIEPDSPVDYDCGDCHRCLDACPTSCLLGDGSMNAKRCLSFQTQDKGMMNLEFRKKIKTVIYGCDICQICCPYNKGIHNPLASEIDPELAEPELLPFLELSNSQFKKKFGMIAGSWRGKNILQRNAIIALANGHDKSALVKLMEIIDKNNNPIHTATAIWALGEIVKKPTQELYDFILSIHSDNDAIIKERTALLNRWQF

SEQ ID NO: 81361 - protein, 373 aa, Streptococcus mutans; identical to SEQ ID NO: 81360
  REGION 1..373: note = tr|A0A0E2ENX7|A0A0E2ENX7_STRMG Iron-sulfur cluster-binding protein OS=Streptococcus mutans SM6; OX = 857119 GN=SMU82_05507 PE=4 SV=1

SEQ ID NO: 81362 - protein, 173 aa, Streptococcus oralis
  REGION 1..173: note = tr|A0A139PHI5|A0A139PHI5_STROR Iron-sulfur cluster-binding protein OS=Streptococcus oralis OX=1303; GN = SORDD21_01899 PE=4 SV=1
MNARRCLSFQTQDKGMMDLEFRKKIKTVIYGCDICQICCPYNRGLDNPLATDIDPELAHPELIPFIELSNGQFKEKFGMVAGSWRGKNILQRNAIIALANANDRSAIPKLLEIIETSQNQIHIATAIWSLGELIREVTPDLVDLLTSLKNPTPAIIEERERFFQKFQYQNSHN

SEQ ID NO: 81363 - protein, 374 aa, unidentified
  source 1..374: note = Streptococcus pantholopis
  REGION 1..374: note = tr|A0A172Q6B3|A0A172Q6B3_9STRE Epoxyqueuosine reductase OS=Streptococcus pantholopis OX=1811193; GN = A0O21_02845 PE=4 SV=1
MDIKGEIKKLAADIGISKIGFAKADNFAYLEKSLRLAVEEKRNSGFEHKVIEDRLDPKRSLASAKTIIAIAVAYPHKLPSKPPKTQYRRGKISPNSWGTDYHHVLQEKLNQLAAGIEALCADFPLEHKAMVDTGALVDTAVARRAGIGFIGKNGLVISKEFGSYMYLGELITNLDLEPDQPVDYGCGDCRRCLDACPTSCLLGDGTMNARRCLSFQTQDKGMMDLEFRKKIKTVIYGCDICQICCPYNKGIMNPPASAIDPDLAMPELQPFLDLSNKSFKEKFGQLAAAWRGKNILQRNAIIALANIHDKSALVKLMEIIDKNNNPIHTATAIWAIGEIVREPDAALLDFLHQLNLKEADSQKELALVFAKWQK

SEQ ID NO: 81364 - protein, 379 aa, Streptococcus parasanguinis
  REGION 1..379: note = tr|A0A414K490|A0A414K490_STRPA tRNA epoxyqueuosine(34) reductase QueG OS=Streptococcus parasanguinis OX=1318 GN=queG PE=4 SV=1
MTLKENIIQLAHSIGISKIGFTTADDFDYLEKSLRLAVEEGRNSGFEHKNIEERIHPKLSLSSAKTIISIAVAYPHKLKQQPQKTAYKRGKFTPNSWGLDYHYVLQDKLNRLAAGIEEMTQDFEYKGMVDTGALVDTAVAQRAGIGFIGKNGLVISKEYGSYMFLGELITNLEIEPDQPVDYGCGDCRRCLDACPTSCLIGDGSMNARRCLSFQTQDKGMMDLEFRKKIKTVIYGCDICQISCPYNKGLDNPLATEIDPDLAHPELIPFIELSNGQFKEKFGHIAGSWRGKNILQRNAIIALANANDRSAIPKLLNIIETSQNQIHIATAIWSLGQLLREVTPDLVELLRNIKHPTDAIIEERTAFFEKFGIQADSQLH

SEQ ID NO: 81365 - protein, 382 aa, Streptococcus parasanguinis
  REGION 1..382: note = tr|F9M421|F9M421_STRPA Putative iron-sulfur cluster-binding protein OS=Streptococcus parasanguinis SK236 OX=1035185 GN=HMPREF9962_0926 PE=4 SV=1
MKGMTLKENIIQLAHSIGISKIGFTTADDFDYLEKSLRLAVEEGRNSGFEHKNIEERIHPKLSLSSAKTIISIAVAYPHKLKQQPQKTAYKRGKFTPNSWGLDYHYVLQDKLNRLAAGIEEMTQDFEYKGMVDTGALVDTAVAQRAGIGFIGKNGLVISKEYGSYMFLGELITNLEIEPDQPVDYGCGDCRRCLDACPTSCLIGDGSMNARRCLSFQTQDKGMMDLEFRKKIKTVIYGCDICQISCPYNKGLDNPLATEIDPDLAHPELIPFIELSNGQFKEKFGHIAGSWRGKNILQRNAIIALANANDRSAIPKLLNIIETSQNQIHIATAIWSLGQLLREVTPDLVELLRNIKHPTDAIIEERTAFFEKFGIQADSQLH

SEQ ID NO: 81366 - protein, 375 aa, unidentified
  source 1..375: note = Streptococcus parasuis
  REGION 1..375: note = tr|A0A4Q8L069|A0A4Q8L069_9STRE tRNA epoxyqueuosine(34) reductase QueG OS=Streptococcus parasuis OX=1501662 GN=queG PE=4 SV=1
MNIKEEIIKLSQEIGISKIGFTTADDFDYLEKSLRSSQEEGRSSGFEHKNIEERIRPKLSLESAKTIISIAVAYPRHLPVKPQKTQYKRGKITPNSWGLDYHYILQDKMERLARGIEKLTDGLEYKAMVDTGALVDTAVARRAGIGFIGKNGLVISKEFGSYMFLGELVTNLDIEPDQPVDYDCGDCNRCVVACPTSCLLGDTTMNARRCLSFQTQDKGMMDLEFRKKIKTVIYGCDICQICCPYNKGISSPPVVEIDPDLAEPELIPFLDLSNGQFKEKFGMIAGSWRGKNILQRNAIIALANSNDRSAIPKLLEIIDKKQNPIHMATAIWALGQLVKQPNEEMIAFIAGISSDNDDVLAEQAAFLNMVKDLQM

SEQ ID NO: 81367 - protein, 372 aa, Streptococcus parauberis
  REGION 1..372: note = tr|A0A1S1ZPI7|A0A1S1ZPI7_9STRE tRNA epoxyqueuosine(34) reductase QueG OS=Streptococcus parauberis OX=1348 GN=BI362_07245 PE=4 SV=1
MEIKVAIQQLAQEIGISKIGFTSADDFAYLEKSLRLSVQEGRNSGFEHKNIEERIRPKLSLESAKTIISIAVAYPHKLPIAPQKTEYKRGKITPNSWGIDYHHVLADKLEKLAQGIEALTADFEYKGMVDTGALVDTAVAKRAGIGFIGKNGLVISKEFGSYMYLGELITNLEIEPDQEVDYGCGDCTRCLDACPTSCLIGDGTMDAKRCLSFQTQDKGMMDLEFRKKIKTVIYGCDICQISCPYNKGISNPLASDIDPDLALPELIPFLELSNKGFKEKFGQIAASWRGKNILQRNAIIALANGHDRTAIVKLMEIIDKNNNPIHTATAIWALGEIVKKPDSAMIDFMATIAITDEQVKKEFELVRAKWQF

SEQ ID NO: 81368 - protein, 372 aa, Streptococcus parauberis
  REGION 1..372: note = tr|F1YXW9|F1YXW9_9STRE Putative iron-sulfur cluster-binding protein OS=Streptococcus parauberis NCFD 2020 OX=873447 GN=SPB_0166 PE=4 SV=1
MEIKVAIQQLAQEIGISKIGFTSADDFAYLEKSLRLSIEEGRNSGFEHKNIEERIRPKLSLESAKTIISIAVAYPHKLPIAPQKTEYKRGKITPNSWGIDYHHVLADKLEKLAQGIEALTADFEYKGMVDTGALVDTAVAKRAGIGFIGKNGLVISKEFGSYMYLGELITNLEIEPDQEVDYGCGDCTRCLDACPTSCLIGDGTMDAKRCLSFQTQDKGMMDLEFRKKIKTVIYGCDICQISCPYNKGISNPLASDIDPDLALPELIPFLELSNKGFKEKFGQIAASWRGKNILQRNAIIALANGHDRTAIVKLMEIIDKNNNPIHTATAIWALGEIVKKPDSVMIDFMATIAITDEQVKKEFELVRAKWQF

SEQ ID NO: 81369 - protein, 372 aa, unidentified
  source 1..372: note = Streptococcus penaeicida
  REGION 1..372: note = tr|A0A2N8LDM4|A0A2N8LDM4_9STRE Epoxyqueuosine reductase OS=Streptococcus penaeicida OX=1765960; GN = AT575_02050 PE=4 SV=1
MELKAEIKKLAKEIGISKIGFTTADDFSYLEKSLRLGLEEGRTTGFEHKVIEERIKPKLSLASAKTIISIAVAYPHKLPIQPQKTQYKRGKITPNSWGTDYHHVLQEKLSQLAEAIEKLTEDFEYKGMVDTGALVDTAVARRAGIGFIGKNGLVISKEFGSYMYLGELITNLDIEPDQPVDYGCGDCRRCLDACPTSCLIGDGTMNAKRCLSFQTQDKGMMDLEFRKKIKTVIYGCDICQIACPYNKGISNPLASEINPDLAQPELIPFLELSNKDFKSKFGQIAASWRGKNILQRNAIIALANGHDRTAIIKLMEIIDKNNNPIHTATAIWALGELIKKPDDIMLDYMRGLSPKEEESQKELEMLRAKWQF

SEQ ID NO: 81370 - protein, 376 aa, unidentified
  source 1..376: note = Streptococcus pharyngis
  REGION 1..376: note = tr|A0A5C5SGL7|A0A5C5SGL7_9STRE tRNA epoxyqueuosine(34) reductase QueG OS=Streptococcus pharyngis OX=1562651 GN=queG PE=4 SV=1
MSIKEDIQQLAKEIGISKIGFTTADDFAYLEKSLRLAYENGTNSGFEHKNIEERIDPKLSLASAKTIISIAVAYPNKLPIPPQKSDYKRGKFTPNSWGIDYHHVLQDKLNRLARGIEELCADFPLEHKAMVDTGALVDTAVARRAGIGFIGKNGLVISKEYGSYMYLGELITNLEIEPDQPVDYDCGDCRRCLDACPTSCLNGDGTMNAKRCLSFQTQDKGMMDLEFRKKIKTVIYGCDICQICCPYNKGINNPLASEIDPELAHPELLPFLELSNKTFKEKFGMIAGAWRGKNILQRNAIIALANAHDRSAIIKLLEIIEKKQNPIHVATAIWALGEIVRQPSEDLIELIRDLSSDHEDILTEKERLLKKWQVLA

SEQ ID NO: 81371 - protein, 372 aa, Streptococcus pluranimalium
  REGION 1..372: note = tr|A0A345VL56|A0A345VL56_9STRE Epoxyqueuosine reductase OS=Streptococcus pluranimalium OX=82348 GN=queG; PE = 4 SV=1
MDIKVEIQKLAKEIGISKIGFTTADDFGYLEKTLRAGVEEGRTTGFEHKVIEERIKPKLSLESAKTIISIAVAYPNKLPVKPPKTQYKRGKITPNSWGLDYHYVLQDKLNRLAKGIEELTEDFEYKGMVDTGALVDTAVAKRAGIGFIGKNGLVISKEFGSYMYLGELITNLEIEPDQEVDYGCGDCTRCLEACPTSCLIGDGTMNARRCLSFQTQDKGMMDMEFRKKIKTVIYGCDICQICCPYNRGIDNPLASEIDPELAHPELIPFLELTNKSFKEQFGMIAGSWRGKNILQRNAIIALANAHDRSAVVKLVEIIDKNNNPIHTATAIWALGEIIKKPDEAMLDFMRSLSLKEEDSLKELELVRQKWQF

SEQ ID NO: 81372 - protein, 372 aa, Streptococcus pluranimalium
  REGION 1..372: note = tr|A0A2L0D4W8|A0A2L0D4W8_9STRE tRNA epoxyqueuosine(34) reductase QueG OS=Streptococcus pluranimalium OX=82348 GN=queG PE=4 SV=1
MDIKVEIQKLAKEIGISKIGFTTADDFGYLEKTLRAGVEEGRTTGFEHKVIEERIKPKLSLESAKTIISIAVAYPNKLPVKPPKTQYKRGKITPNSWGLDYHYVLQDKLNRLAKGIEELTENFEYKGMVDTGALVDTAVAKRAGIGFIGKNGLVISKEFGSYMYLGELITNLEIEPDQEVDYGCGDCTRCLEACPTSCLIGDGTMNARRCLSFQTQDKGMMDMEFRKKIKTVIYGCDICQICCPYNRGIDNPLASEIDPELAHPELIPFLELTNKSFKEQFGMIAGSWRGKNILQRNAIIALANAHDRSAVVKLVEIIDKNNNPIHTATAIWALGEIIKKPDEAMLDFMRSLSLKEEDSLKELELVRQKWQF

SEQ ID NO: 81373 - protein, 379 aa, Streptococcus pneumoniae; identical to SEQ ID NO: 80927
  REGION 1..379: note = tr|A0A4U9M4C8|A0A4U9M4C8_STREE Epoxyqueuosine reductase OS=Streptococcus pneumoniae OX=1313 GN=queG PE=3; SV = 1

SEQ ID NO: 81374 - protein, 373 aa, Streptococcus pneumoniae; identical to SEQ ID NO: 81258
  REGION 1..373: note = tr|A0A111BU32|A0A111BU32_STREE Epoxyqueuosine reductase OS=Streptococcus pneumoniae OX=1313 GN=queG PE=3; SV = 1

SEQ ID NO: 81375 - protein, 372 aa, Streptococcus porcinus
  REGION 1..372: note = tr|A0A4U9XIU7|A0A4U9XIU7_STRPO Iron-sulfur protein; OS = Streptococcus porcinus OX=1340 GN=queG_1 PE=4 SV=1
MELKAEIIKLAKEIGISKIGFTTADDFSYLEKSLKLALEEDRTSGFEHKVIEERIKPKLSLASAKTIISIAVAYPHKLPVRAQKTQYKRGKITPNSWGLDYHYVLQDKLQRLAAGIEVLTQDFEYKGMVDTGALVDTAVARRAGIGFIGKNGLVISKEFGSYMYLGELITNLDIEPDQPVDYDCGDCRRCLDACPTSCLIGDGTMNAKRCLSFQTQDKGMMALEFRKKIKTVIYGCDICQICCPYNKGLNNPLASKIDPDLAEPELIPFLELSNKEFKAKFGHIAASWRGKNILQRNVIIALANGHDRSAIVKLMEIIDKQNNPIHVATAIWALGELIKKPNQEMIAYMQSLSPKDLDSQKELDSLRAKWQF

SEQ ID NO: 81376 - protein, 372 aa, Streptococcus porcinus
  REGION 1..372: note = tr|A0A4U9XXY7|A0A4U9XXY7_STRPO Iron-sulfur protein; OS = Streptococcus porcinus OX=1340 GN=queG PE=4 SV=1
MELKAEIIKLAKEIGISKIGFTTADDFSYLEKSLKLALEEDRTSGFEHKVIEKRIKPKLSLASARTIISIAVAYPHKLPVRAQKTQYKRGKITPNSWGLDYHYVLQDKLQRLAAGIEALTQDFEYKGMVDTGALVDTAVARRAGIGFIGKNGLVISKEFGSYMYLGELITNLDIEPDQPVDYDCGDCRRCLDACPTSCLIGDGTMNAKRCLSFQTQDKGMMALEFRKKIKTVIYGCDICQICCPYNKGLNNPLASKIDPDLAEPELIPFLELSNKEFKAKFGHIAASWRGKNILQRNVIIALANGHDRSAIVKLMEIIDKQNNPIHVATAIWTLGELIKKPNQEMIAYMQSLSPKDLDSQKELESLRTKWQF

SEQ ID NO: 81377 - protein, 268 aa, Streptococcus pseudoporcinus
  REGION 1..268: note = tr|G5K6J5|G5K6J5_9STRE 4Fe-4S ferredoxin-type domain-containing protein OS=Streptococcus pseudoporcinus LQ 940-04 OX=875093 GN=STRPS_0082 PE=4 SV=1
MQDKLQRLAAGIEALTQDFEYKGMVDTGALVDTAVARRAGIGFIGKNGLVISKEFGSYMYLGELITNLDIEPDQPVDYDCGDCRRCLDACPTSCLIGDGTMNAKRCLSFQTQDKGMMALEFRKKIKTVIYGCDICQICCPYNKGLNNPLASKIDPDLAEPELIPFLELSNKEFKAKFGHIAASWRGKNILQRNVIIALANGHDRSAIVKLMEIIDKQHNPIHVATAIWALGELIKKPNQEMIAYMQSLSPKDLDSQKELESLRTKWQF

SEQ ID NO: 81378 - protein, 374 aa, Streptococcus pyogenes
  REGION 1..374: note = tr|A0A4U9BWZ6|A0A4U9BWZ6_STRPY Iron-sulfur cluster-binding protein OS=Streptococcus pyogenes OX=1314; GN = queG PE=4 SV=1
MTIKAEIKALAKEIGISKIGFTTADNFDYLEKSLRASVEEGRNSGFEHKVIEDRISPERLLESAKTIISIGVAYPHKLPQQPQKTPYKRGKITPSSWGLDYHYVVGEKLDRLSKGIEELCRDFPLQQKAMVDTGALVDTAVAQRAGIGFIGKNGLVISKEYGSYMFLGELITNLEIEPDKPVDYDCGDCRRCLDACPTSCLIGDGSMNAKRCLSFQTQDKGMMDIEFRKKIKTVIYGCDICQICCPYNKGINNPPATEIDPELAQPELIPFLSLSNGKFKEKFGMIAGSWRGKNILQRNAIIALANAHDKTAVVKLIEIIDKNNNPIHTATAIWALGEIVKKPNDEILAFMSHLTLKDEDSRKELELIRHKWQF

SEQ ID NO: 81379 - protein, 374 aa, Streptococcus pyogenes
  REGION 1..374: note = tr|A0A0E1EPC5|A0A0E1EPC5_STRPY Epoxyqueuosine reductase OS=Streptococcus pyogenes STAB902 OX=1437007; GN = STAB902_07565 PE=4 SV=1
MTIKAEIKALAKEIGISKIGFTTADNFDYLEKSLRASVEEGRNSGFEHKVIEDRISPERLLESAKTIISIGVAYPHKLPQQPQKTPYKRGKITPSSWGLDYHYVVGEKLDRLSKGIEELCRDFPLQQKAMVDTGALVDTAVAQRAGIGFIGKNGLVISKEYGSYMFLGELITNLEIEPDKPVDYDCGDCRRCLDACPTSCLIGDGSMNAKRCLSFQTQDKGMMDIEFRKKIKTVIYGCDICQICCPYNKGINNSPATEIDPELAQPELIPFLSLSNGQFKEKFGMIAGSWRGKNILQRNAIIALANAHDKTAVVKLIEIIDKNNNPIHTATAIWALGEIVKKPNDEILAFMSHLTLKDEDSQKELELIRHKWQV

SEQ ID NO: 81380 - protein, 372 aa, Streptococcus ratti
  REGION 1..372: note = tr|A0A5J6NM96|A0A5J6NM96_STRRT tRNA epoxyqueuosine(34) reductase QueG OS=Streptococcus ratti; OX = 1341 GN=queG PE=4 SV=1
MNIKEEIQRLAREIGISKIGFTTADDFAYLEKSLRASVEEGRSSGFEHKNIEERIKPKLSLASAKTIISIAVAYPHKLPVKPPKTQYRRGRITPNSWGLDYHYVLQDKLKQLADGIERLTENFEYKGMVDTGALVDTAVARRAGIGFIGKNGLVISKEFGSYMYLGELITNLEIEPDSPVDYDCGDCRRCLDACPTSCLLGDGTMNAKRCLSFQTQDKGMMDLEFRKKIKTVIYGCDICQICCPYNKGLDNPLASAIDPELAEPELIPFLNLSNSQFKKTFGMIAGSWRGKNILQRNAIIALANAHDKNAVVKLLEIIDSSQNPIHAATAIWALGEIVKKPTEELRNFILSIDSDNDAIIKEREAVINRWQF

SEQ ID NO: 81381 - protein, 372 aa, Streptococcus ratti; identical to SEQ ID NO: 81380
  REGION 1..372: note = tr|J3JNY9|J3JNY9_STRRT (Fe-S)-binding protein; OS = Streptococcus ratti FA-1 = DSM 20564 OX=699248; GN = D822_00175 PE=4 SV=1

SEQ ID NO: 81382 - protein, 377 aa, unidentified
  source 1..377: note = Streptococcus rubneri
  REGION 1..377: note = tr|A0A4Z1DWS0|A0A4Z1DWS0_9STRE tRNA epoxyqueuosine(34) reductase QueG OS=Streptococcus rubneri; OX = 1234680 GN=queG PE=4 SV=1
MNLKESIIELAHSIGISKIGFTTADDFSYLEKSLRLAVEEGRNSGFEHKNIEERIQPRLSLASAKTIISIAVAYPHKLKQQPQKTAYKRGKFTPNSWGLDYHYVLQDKLDRLARGIEELTADFEYKGMVDTGALVDTAVAQRAGIGFIGKNGLVISKEYGSYMFLGELITNLEIEPDQAVDYGCGDCNRCVEACPTSCLIGDGTMNARRCLSFQTQDKGMMDLEFRKKIKTVIYGCDICQICCPYNRGLDNPLATDIDPELAHPELIPFIELSNGQFKEKFGMVAGSWRGKNILQRNAIIALANANDRSAIPKLLEIIETSQNQIHIATAIWSLGELIREVTPDLVDLLTSLKKPSPAIIEERERFFQKFQHQISHN

SEQ ID NO: 81383 - protein, 399 aa, Streptococcus salivarius
  REGION 1..399: note = tr|A0A2I1Z8I0|A0A2I1Z8I0_STRSL tRNA epoxyqueuosine(34) reductase QueG OS=Streptococcus salivarius OX=1304 GN=queG PE=4 SV=1
MIPFLNHSPSWHFSAIIKRMNIKEEIINLAKEIGISKIGFTTADDFDYLEKSLRLAVEEGRNSGFEHKNIEERIKPKLSLASAKTIISIAVAYPHKLKQQPQKTAYKRGKFTPNSWGLDYHYVLQDKLDRLAKGIEELTADFEYKGMVDTGALVDTAVAQRAGIGFIGKNGLVISKEFGSYMFLGELITNLDIEPDQPVDYGCGDCNRCVTACPTSCLIGDGSMNAKRCLSFQTQDKGVMDLEFRKKIKTVIYGCDICQICCPYNKGLDNPLATEIDPDLSHPELLPFLELSNGQFKEKFGHVAGSWRGKNILQRNAIIALANANDRSAIPKMLEIIDKEQNPIHVVTAIWALSQLVREVHPEMIELVMGIKNPTPQIQEEQGRFLEKFGLEEKLVLEN

SEQ ID NO: 81384 - protein, 372 aa, Streptococcus salivarius
  REGION 1..372: note = tr|C2LSB0|C2LSB0_STRSL Putative iron-sulfur cluster-binding protein OS=Streptococcus salivarius SK126; OX = 596322 GN=STRSA0001_1824 PE=4 SV=1
MDIKLEIQKMAKEIGISKIGFTTADDFAYLEKSLRLGVEEGRTTGFEHKNIEERIYPKLTLESAKTIISIAVAYPHKLPQQPPKTEFKRGKITPNSWGLDYHYVLQDKLKRLAEGIEKLTENFEYKGMVDTGALVDTAVAKRAGIGFIGKNGLVISKEYGSYMYLGELITNLEIEPDQEVDYGCGDCRRCLDACPTSCLIGDGTMNARRCLSFQTQDKGMMDMEFRKKIKTVIYGCDICQISCPYNRGIDNPLASEIDPELAMPELLPFLELTNKSFKEKFGMIAGSWRGKNILQRNAIIALANLHDRNAIVKLMEIIDKNNNPIHTATAIWALGEIVKKPDEAMLDYMRELSPKDEESQAEWELVCAKWQI

SEQ ID NO: 81385 - protein, 399 aa, Streptococcus sanguinis
  REGION 1..399: note = tr|A0A3P1S9R3|A0A3P1S9R3_STRSA tRNA epoxyqueuosine(34) reductase QueG OS=Streptococcus sanguinis OX=1305 GN=queG PE=4 SV=1
MIPFLNHSPSWHFSAIIIRMNIKEEIINLAKKIGISKIGFTTADDFDYLEKSLRLAVEEGRNSGFEHKNIEERIKPKLSLASAKTIISIAVAYPHKLKQQPQKTAYKRGKFTPNSWGLDYHYVLQDKLDRLAKGIEELTADFEYKGMVDTGALVDTAVAQRAGIGFIGKNGLVISKEFGSYMFLGELITNLDIEPDQPVDYGCGDCNRCVTACPTSCLIGDGSMNAKRCLSFQTQDKGVMDLEFRKKIKTVIYGCDICQICCPYNKGLGNPLATEIDPDLSHPELLPFLELSNGQFKEKFGHVAGSWRGKNILQRNAIIALANANDRSAIPKMLEIIDKGQNPIHVATAIWALSQLVREVHPEMIELVMNVKNPTPQIQEEQGRFLEKFGLEEKLVIEN

SEQ ID NO: 81386 - protein, 380 aa, Streptococcus sanguinis
  REGION 1..380: note = tr|E8KR99|E8KR99_STRSA Putative iron-sulfur cluster-binding protein OS=Streptococcus sanguinis VMC66; OX = 888825 GN=HMPREF9398_1906 PE=4 SV=1
MNIKEEIINLAKEIGISKIGFTTADDFDYLEKSLRLAVEEGRNSGFEHKNIEERIKPKLSLASAKTIISIAVAYPHKLKQQPQKTAYKRGKFTPNSWGLDYHYVLQDKLDRLAKGIEELTADFEYKGMVDTGALVDTAVAQRAGIGFIGKNGLVISKEFGSYMFLGELITNLDIEPDQPVDYGCGDCNRCVTACPTSCLIGDGSMNAKRCLSFQTQDKGVMDLEFRKKIKTVIYGCDICQICCPYNKGLDNPLATEIDPDLSHPELLPFLELSNGQFKEKFGHVAGSWRGKNILQRNAIMALANANDRSAIPKLLEIIDKGQNPIHVATAIWALCQLVREVHPEMIELVMNVKNPTPQIQEEQGRFLEKFGLKEKLMIEN

SEQ ID NO: 81387 - protein, 374 aa, Streptococcus sobrinus
  REGION 1..374: note = tr|U2KGL7|U2KGL7_9STRE Putative iron-sulfur cluster-binding protein OS=Streptococcus sobrinus W1703; OX = 1227275 GN=HMPREF1557_01961 PE=4 SV=1
MDIKAEIQKLAKNLGISKIGFTTAEDFAYLERSLRASVEEGRNSGFEHKNIEERIDPKLSLASAKTIISIAVAYPRQLPTQPPKTQYKRGKITPNSWGLDYHHVLNDKLNRLARGIEELCAEFPLEHKAMVDTGALVDTAVAKRAGIGFIGKNGLVISKEYGSYMFLGELITNLEIEPDSPVDYGCGDCRRCLDACPTSCLLGNGSMDAKRCLSFQTQDKGMMAMEFRKKIKTVIYGCDICQICCPYNKGIQNPLATPIDPDLAWPELLPFLELSNSDFKKKFGEIAGSWRGKNILQRNAIIALANAHDKNAIVKLMEIIDRNNNPIHTATAIWALGEIVKKPDQAIKDYMQDLDPQEDAARQEWQLVCDKWQI

SEQ ID NO: 81388 - protein, 41 aa, Streptococcus sp.
  REGION 1..41: note = tr|A0A496JU37|A0A496JU37_STRSP tRNA epoxyqueuosine(34) reductase QueG (Fragment); OS = Streptococcus sp. OX=1306 GN=D8H99_66725 PE=4 SV=1
MNIKEEIIKLSKDIGISKIGFTTADDFDYLEKSLRLAVEEG

SEQ ID NO: 81389 - protein, 374 aa, Streptococcus sp.
  REGION 1..374: note = tr|A0A346NDD6|A0A346NDD6_9STRE tRNA epoxyqueuosine(34) reductase QueG OS=Streptococcus sp. Z15; OX = 2173853 GN=queG PE=4 SV=1
MDIKEEIKELAADIGISKIGFTKADDFAYLEKSLRLAVAEKRNSGFEHKIIEDRLDPKRSLASAKTIIAIAVAYPHKLSIKPPKTQYRRGKITPNSWGVDYHQVLQDKLKRLAEGIEQLCADFSFEHKAMVDTGALVDTAVARRAGIGFIGKNGLVISKEFGSYMYLGELITNLDIEPDQPVDYDCGDCRRCLDACPTSCLIGDGSMNARRCLSFQTQDKGMMALEFRKKIKTVIYGCDICQICCPYNKGIDNPPASAIDPELAMPELLPFLELTNKSFKEQFGLLAAAWRGKNILQRNAIIALANIHDKSALVKLMEIIDKNNNPVHTATAIWAIGEIVRKPDAALLDFLHHLNLKEEDSQKELAAVLAKWQN

SEQ ID NO: 81390 - protein, 378 aa, Streptococcus suis
  REGION 1..378: note = tr|A0A0Z8H4X1|A0A0Z8H4X1_STRSU 4Fe-4S ferredoxin; OS = Streptococcus suis OX=1307 GN=queG PE=4 SV=1
MNVMNIKEEIIKLSQEIGISKIGFTTADDFAYLEKSLRASQEEGRSSGFEHKNIEERIRPKLSLESAKTIISIAVAYPRHLPVKPQKTQYKRGKITPSSWGLDYHYILQDKMERLARGIEKLTDGLEYKAMVDTGALVDTAVARRAGIGFIGKNGLVISKEFGSYMFLGELVTNLDIEPDQPVDYDCGDCNRCVAACPTSCLLGDTTMNARRCLSFQTQDKGMMDLEFRKKIKTVIYGCDICQICCPYNKGISSPPVVEIDPELAEPELIPFLDLSNGQFKEKFGLIAGSWRGKNILQRNAIIALANSNDRSAIPKLLEIIDKKQNPVHMATAIWALGQLVKQPNDEMVSFIAGISSDNDDVIAEQTAFLNMVKDLQM

SEQ ID NO: 81391 - protein, 375 aa, Streptococcus suis
  REGION 1..375: note = tr|U5UE40|U5UE40_STRSU 4Fe-4S ferredoxin-type domain-containing protein OS=Streptococcus suis T15; OX = 1340847 GN=T15_0537 PE=4 SV=1
MNIKEEIIKLSQEIGISKIGFTTADDFAYLEKSLRASQEEGRSSGFEHKNIEERIRPKLSLESAKTIISIAVAYPRHLPVKPQKTQYKRGKITPSSWGLDYHYILQDKMERLARGIEKLTDGLEYKAMVDTGALVDTAVARRAGIGFIGKNGLVISKEFGSYMFLGELVTNLEIEPDQPVDYDCGDCNRCVAACPTSCLLGDTTMNARRCLSFQTQDKGMMDLEFRKKIKTVIYGCDICQICCPYNKGISSPPVVEIDPELAEPELIPFLDLSNGQFKEKFGLIAGSWRGKNILQRNAIIALANSNDRSAIPKLLEIIDKKQNPVHMATAIWALGQLVKQPNDEMVDFIASIKSDNADVLAEQTAFLNMVNSLQM

SEQ ID NO: 81392 - protein, 372 aa, Streptococcus thermophilus
  REGION 1..372: note = tr|A0A0R4I997|A0A0R4I997_STRTR Epoxyqueuosine reductase OS=Streptococcus thermophilus OX=1308; GN = MNA02_1104 PE=1 SV=1
MNIKLEIQKMAKEIGISKIGFTTADDFDYLEKSLRLGVEEGRTTGFEHKNIEERIYPKLSLESAKTIISIAVAYPHKLPQQPQKTEFKRGKITPNSWGLDYHYVLQDKLKRLAKGIEKLTENFEYKGMVDTGALVDTAVAKRAGIGFIGKNGLVISKEYGSYMYLGELITNLEIEPDQEVDYGCGDCRRCLDACPTSCLIGDGTMNARRCLSFQTQDKGMMDMEFRKKIKTVIYGCDICQISCPYNRGIDNPLASDIDPDLAMPELLPFLELTNKSFKETFGMIAGSWRGKNILQRNAIIALANLHDRNAIVKLMEIIDKNNNPIHTATAIWALGEIVKKPDEGMLDYMRGLSPKDEHSQAEWELVCAKWQI

SEQ ID NO: 81393 - protein, 372 aa, Streptococcus thermophilus
  REGION 1..372: note = tr|A0A0E2RH03|A0A0E2RH03_STRTR Iron-sulfur cluster-binding protein OS=Streptococcus thermophilus TH1477 OX=1436725 GN=Y022_05720 PE=4 SV=1
MNIKLEIQKMAKEIGISKIGFTTADDFDYLEKSLRLGVEEGRTTGFEHKNIEERIYPKLSLESAKTIISIAVAYPHKLPQQPQKTEFKRGKITPNSWGLDYHYVLQDKLKRLAKGIEKLTENFEYKGMVDTGALVDTAVAKRAGIGFIGKNGLVISKEYGSYMYLGELITNLEIEPDQEVDYGCGDCRRCLDACPTSCLIGDGTMNARRCLSFQTQDKGMMDMEFRKKIKTVIYGCDICQISCPYNRGIDNPLASDIDPELAMPELLPFLELTNKSFKETFGMIAGSWRGKNILQRNAIIALANLHDRNAIVKLMEIIDKNNNPIHTATAIWALGEIVKKPDEAMLDYMRGLSPKDEHSQAEWELVCAKWQI

SEQ ID NO: 81394 - protein, 374 aa, unidentified
  source 1..374: note = Streptococcus troglodytae
  REGION 1..374: note = tr|A0A1L7LIH6|A0A1L7LIH6_9STRE 4Fe-4S ferredoxin; OS = Streptococcus troglodytae OX=1111760 GN=SRT_07360 PE=4; SV = 1
MMIKEAIKQLAQDIGISKIGFTTADDFDYLEKSLRASVEEGRSSGFEHKNIEERIKPRLSLASAKTIISIAVAYPHKLPVKPPKTQYKRGKITPNSWGLDYHYVLEEKLQRLAQGIESLCQDFPLEHKIMVDTGALVDTAVAQRSGIGFIGKNGLVISKEFGSYMYLGELITNLEIEPDSPVDYDCGDCHRCLDACPTSCLLGDGSMNAKRCLSFQTQDKGMMDLEFRKKIKTVIYGCDICQICCPYNKGIHNPLASEIDPELAEPELLPFLELSNSQFKKKFGMIAGSWRGKNILQRNAIIALANGHDKSALVKLMEIIDKNNNPIHTATAIWALGEIVKKPTQELYDFILSIHSDNDAIIKERTALLNRWQF

SEQ ID NO: 81395 - protein, 372 aa, Streptococcus uberis
  REGION 1..372: note = tr|A0A380MFE1|A0A380MFE1_STRUB Iron-sulfur protein; OS = Streptococcus uberis OX=1349 GN=queG PE=4 SV=1
MDIKAEIITLAHEIGISKIGFTTADDFSYLEKSLRLAVEEGRNSGFEHKVIEERIQPKLSLSSAKTIISIAVAYPHKLPISPQKTAFKRGKITPNSWGNDYHNVLQEKMQQLAEGIETLTQDFEYKGMVDTGALVDTAVARRAGIGFIGKNGLVISKEFGSYMYLGELITNLEIEPDQPVDYDCGDCRRCLDACPTSCLIGDGTMNAKRCLSFQTQDKGMMDLEFRKKIKTVIYGCDICQICCPYNKGISNPLASAIDPDLAMPELIPFLELSNKSFKEKFGHIAAAWRGKNILQRNAIIALANGHDRTAIVKLMEIIDKNNNPIHTATAIWALGEIVKKPDQAMLDFVLSIKPKEDESQKELELLLAKWQL

SEQ ID NO: 81396 - protein, 372 aa, Streptococcus uberis
  REGION 1..372: note = tr|B9DRN5|B9DRN5_STRU0 Putative iron-sulphur protein; OS = Streptococcus uberis (strain ATCC BAA-854 / 0140J); OX = 218495 GN=SUB0620 PE=4 SV=1
MDIKAEIIRLAHEIGISKIGFTTADDFSYLEKSLRLAVEEGRNSGFEHKVIEERIQPKLSLSSAKTIISIAVAYPHKLPISPQKTAFKRGKITPNSWGNDYHHVLQEKMQQLAEGIEILTQDFEYKGMVDTGALVDTAVARRAGIGFIGKNGLVISKEFGSYMYLGELITNLEIEPDQPVDYDCGDCRRCLDACPTSCLIGDGTMNAKRCLSFQTQDKGMMDLEFRKKIKTVIYGCDICQICCPYNKGISNPLASAIDPDLAMPELIPFLELSNKSFKEKFGHIAAAWRGKNILQRNAIIALANGHDRTAIVKLMEIIDKNNNPIHTATAIWALGEIVKKPDQAMLDFVLSIKPKEDESQKELELLLAKWQL

SEQ ID NO: 81397 - protein, 372 aa, Streptococcus urinalis
  REGION 1..372: note = tr|G5KHF9|G5KHF9_9STRE Putative iron-sulfur cluster-binding protein OS=Streptococcus urinalis 2285-97; OX = 764291 GN=STRUR_1473 PE=4 SV=1
MDIKAEIQELAKSIGISKIGFTTADDFDYLEKSLRLGVEEGRNSGFEHKIIEERIKPKLSLDSAKTIISIAVAYPHKLPVQPPETQFKRGKITPNSWGLDYHYVLQEKLDKLAKGIEKLTENFEYKGMVDTGALVDTAVARRAGIGFIGKNGLVISKEFGSYMFLGELITNLEIEPDQPVDYDCGDCRRCLDACPTSCLIGDGTMNAKRCLSFQTQDKGMMDLEFRKKIKTVIYGCDICQICCPYNKGISNPLATEIDPELAQPELIPFLQLSNKGFKEKFGKIAGSWRGKNILQRNAIIALANAHDKNAVVYLLEIIDKNNNPIHTATAIWAIGEIVKKPEQDLIDFMTNLSFENNNCQNELNELVTKWQF

SEQ ID NO: 81398 - protein, 373 aa, unidentified
  source 1..373: note = Streptococcus varani
  REGION 1..373: note = tr|A0A0E4CSQ4|A0A0E4CSQ4_9STRE (Fe-S)-binding protein OS=Streptococcus varani OX=1608583 GN=BN1356_01247; PE = 4 SV=1
MNLKEKIIQVSQEIGISKIGFTTADDFAYLEKSLRAGVEEGRTTGFEHKNIEERIDPKFSLASAKTIISIAIAYPRRLPQKPQKTQYRRGKITPNSWGLDYHYIVQDKLERLARAIEELTADFEYKGMVDTGALVDTAVARRAGIGFIGKNGLVISKEFGSYMFLGELVTNLVIEADSPVDYDCGDCNRCVTACPTSCLLGDSTMDARRCLSFQTQDKGMMDLEFRKKMKTVIYGCDVCQICCPYNKGIDSPPVVAIDPDLAQPELLPFLELSNGQFKEKFGMIAGSWRGKNILQRNAIIALANAHDRSAIPKLLEIIDKMQNPIHAATAIWALGQLIKEPDEGMVSFVQEIKSDHPEVLAEQAAFLKIAKGL

SEQ ID NO: 81399 - protein, 372 aa, Streptococcus vestibularis
  REGION 1..372: note = tr|A0A3E4X990|A0A3E4X990_STRVE tRNA epoxyqueuosine(34) reductase QueG OS=Streptococcus vestibularis OX=1343 GN=queG PE=4 SV=1
MDIKLEIQKMAKEIGISKIGFTTADDFAYLEKSLRLGVEEGRTTGFEHKNIEERIYPKLTLESAKTIISIAVAYPHKLPQQPQKTEFKRGKITPNSWGLDYHYVLQDKLKRLAEGIEKLTENFEYKGMVDTGALVDTAVAQRAGIGFIGKNGLVISKEYGSYMYLGELITNLEIEPDQEVDYGCGDCRRCLDACPTSCLIGDGTMNARRCLSFQTQDKGMMDMEFRKKIKTVIYGCDICQISCPYNRGIDNPLASDIDPELAMPELLPFLELTNKSFKEKFGMIAGSWRGKNILQRNAIIALANLHDRNAIVKLMEIIDKNNNPIHTATAIWALGEIVKKPDEAMLDYMRELSPKDEESQAEWELVCAKWQI

SEQ ID NO: 81400 - protein, 372 aa, Streptococcus vestibularis
  REGION 1..372: note = tr|E3CP28|E3CP28_STRVE Putative iron-sulfur cluster-binding protein OS=Streptococcus vestibularis F0396 OX=904306 GN=HMPREF9192_1643 PE=4 SV=1
MDIKLEIQKMAKEIGISKIGFTTADDFAYLEKSLRLGVEEGRTTGFEHKNIEERIYPKLTLESAKTIISIAVAYPHKLPQQPPKTEYKRGKITPNSWGLDYHYVLQDKLKRLAEGIEKLTENFEYKGMVDTGALVDTAVAKRAGIGFIGKNGLVISKEYGSYMYLGELITNLEIEPDQEVDYGCGDCRRCLDACPTSCLIGDGTMNARRCLSFQTQDKGMMDMEFRKKIKTVIYGCDICQISCPYNRGIDNPLASDIDPELAMPELLPFLELTNKSFKEKFGMIAGSWRGKNILQRNAIIALANLHDRNAIVKLMEIIDKNNNPIHTATAIWALGEIVKKPDEAMLDYMSNLSLKDEDAQAEWELVCAKWQI

SEQ ID NO: 81401 - protein, 377 aa, unidentified
  source 1..377: note = Streptococcus viridans
  REGION 1..377: note = tr|A0A3S4LB53|A0A3S4LB53_9STRE Iron-sulfur cluster-binding protein OS=Streptococcus viridans OX=78535; GN = queG PE=4 SV=1
MNLKESIIELAHSIGISKIGFTTADDFSYLEKSLRLAVEEGRNSGFEHKNIEERIQPRLSLASAKTIISIAVAYPHKLKQQPQKTAYKRGKFTPNSWGLDYHYVLQDKLDRLARGIEELTADFEYKGMVDTGALVDTAVAQRAGIGFIGKNGLVISKEYGSYMFLGELITNLEIEPDQAVDYGCGDCNRCVEACPTSCLIGDGTMNARRCLSFQTQDKGMMDMEFRKKIKTVIYGCDICQICCPYNRGLDNPLATDIDPELAHPELIPFIELSNGQFKEKFGMVAGSWRGKNILQRNAIIALANANDRSAIPKLLEIIETSQNQIHIATAIWSLGELIREVTPDLVDLLTSLKNPSPAIIEERERFFQKFQHQISHN

SEQ ID NO: 81402 - protein, 380 aa, Streptohalobacillus salinus
  REGION 1..380: note = tr|A0A2V3WK32|A0A2V3WK32_9BACI Epoxyqueuosine reductase OS=Streptohalobacillus salinus OX=621096; GN = DES38_101109 PE=4 SV=1
MANEQLKEKIIDYAHQIGIDKIGFTAADPFSEMKARLKMQQADNYQSGFEKGSNAERTEPKLHVSDAESIIAIAVAYPSRMKARPVNKKGERRGNFCRASWGMDYHTVLNDKLNQLNRFIENLVPGFRSRIMVDTGELSDRAVAERAGIGFSGKNCAIITPEFGSYVYLGEMITNVPFTSDVPVDDGCGDCTKCLDACPTGALVAPGRLNAKNCIAFLTQTKDFLPDEYRDKLGNQLYGFDTCQLVCPKNKGVDFHLHDAFEPEPDKVKPELLPLLSISNREFKETFGHMAGSWRGKKPLQRNAILALAHYREERAVEELDRLMRTDPRPVIRGTAAFAIGKIGRRDSYRLIQQARLSETDEAVIAEMEKGLAFELVYQN

SEQ ID NO: 81403 - protein, 364 aa, Streptomyces acidiscabies
  REGION 1..364: note = tr|A0A100J1N1|A0A100J1N1_9ACTN Epoxyqueuosine reductase OS=Streptomyces acidiscabies OX=42234 GN=queG_1; PE = 4 SV=1
MAAVPRTEPTEPRLPAKLASHPSVQALLARREAGDVATPPKVIDAAWLKELCLASGADDAAAVSLDHPDLAGEREHVLGALPGTRTLIAMVFRMNRDNCRSPARSVANQEFHQTDEQANHAARAVTRALQDAGHRALNPSAAFPQEMDRFPGRIWVVAHKTVAVAAGLGVMGLHRNVIHPKFGNFVLLATVLVDAEVGEYGQELDYNPCIDCKLCVAACPVGAIDKGGAFDALACATHNYREFMSGFTDWVQTVADSEDAADYRSRVTDSESASMWQSLSSPPGYKSGYCLAVCPGGEDVLGPYLDDRKNFMDTVLRPLQDKTETLYVLPGSHAQDYARRRFPHKPVKEVTGGWQPPGKRPASP

SEQ ID NO: 81404 - protein, 449 aa, Streptomyces acidiscabies
  REGION 1..449: note = tr|A0A100J1K0|A0A100J1K0_9ACTN Epoxyqueuosine reductase OS=Streptomyces acidiscabies OX=42234 GN=queG_2; PE = 4 SV=1
MAGKNRLGDHPTVVKVRQRNDHGVTRPVGPLDAVRLRQLCLDAGADDVGFVEIDRPDIADQRADLEAALPGVRTLISFVTRMNRENIRTPARSVANLEFHHTGDHTNEVGRHVVGDLEAMGVRAINPAMGFPMEMDKFPRKTWVVGHKPVAVAAGLGKMGIHRNVIHPQFGNFILLGTILVDSEVSEYDRPIDYNPCLECKLCVTACPTGAIASDGHFNFSACYTHNYREFMGGFGDWAEQVAESRTADDYRSRVSDSESASMWQSLSFGANYKAAYCMSVCPAGEDVIGPWLENRKSHLTQVVRPLVDKEETVYVVPGSDAEQHVAKQFPNKRTKHVAMSLRANSIDGLVEGMPLIFQREQAKDMSTTYHFTFTGAESRQITVTIHDRELGITDGHHGDADLKVTADTAIWLRFLTKPTVLAWALVRRQIKLQGSPRLLREFGRCFPS

SEQ ID NO: 81405 - protein, 369 aa, Streptomyces griseorubiginosus
  REGION 1..369: note = tr|A0A385ZNK3|A0A385ZNK3_9ACTN Epoxyqueuosine reductase OS=Streptomyces griseorubiginosus OX=67304; GN = queG PE=4 SV=1
MTAARDAEGQPTTPAPRLPAKLAAHPSVKAVLARRRTGDEARPRAVIDAAWLRELCLAAGADDAAAVSLDHPDLAGEREHAQAALPGTRTLIAMAVRMNRDNCRSPARSVANQEFHQTDEQANHAARSVTQALQDAGYRALNPSVGFPQEMDRFPRERIWVVAHKTVAVAAGLGVMGLHRNVIHPKFGSFVLLVTVLVDAEVSEYGQPLDYNPCIDCKLCVAACPVGAIAKDGAFDALACTTHNYREFMSGFTDWAQTVADSEDAADYRSRVTDSESASMWQSLSSPPGYKSGYCLAVCPAGEDVLGPYLDDRKSFMDTVLRPLQDKKETLYVLPGSHAQEYARRRFPHKPVKEVTGGWHPPPKRPAAS

SEQ ID NO: 81406 - protein, 445 aa, unidentified
  source 1..445: note = Streptomyces shenzhenensis
  REGION 1..445: note = tr|A0A3M0I677|A0A3M0I677_9ACTN Uncharacterized protein OS=Streptomyces shenzhenensis OX=943815; GN = CTZ28_21880 PE=4 SV=1
MAPRFNRNALQLRLLRWGHEFGELLYPIAKKTLPYRPKMWWIPRLPIWAHRRRTPHTRPWTTPVPSPAEALRTGPGIELLPERQQAAFDEAPLHDFIRLHPEMRGQNSPTGHMWISLLSTSPRVQGAARKRAKSNREPGATAAAKPVTPEELTRAMKLEAARLGLSGVGVTAYDIKWNYAEYHGMGVGETIVVGIIEQNFDSTQMSPSLRAEKAALSAYSGLEDRMRLLAEWIRAQGYDARPEGFVGESMVIPYAVAAGLGQLGLNGQLLTPHAGSRCRIHVMSTNAPFVHDQPVDYGLEGVCNECQICVRRCPAGAIPANRKESRGVVKAKLNTKRCLPVMGKTAGCSVCMKVCPVQRFGLPAVLEEFDRSGRILGKDTDDLEGFDWPLDGKHYGPGDRPRLPLEVFETPGFDFDPNRKEPIGWVKPEGKPDETDGGRVEALGY

SEQ ID NO: 81407 - protein, 373 aa, Streptomyces sp.
  REGION 1..373: note = tr|A0A1H5NRL6|A0A1H5NRL6_9ACTN Epoxyqueuosine reductase QueG (Queuosine biosynthesis) OS=Streptomyces sp. 3213.3 OX=1855348 GN=SAMN05216489_09792 PE=4 SV=1
MTAGRDAEGQSVDLRLPAKLAAHPSVKAVLARRAAGEAASPPPVIDAAWLRELCLAAGADDAAAVSLDHPDLAGEREYAQSALPGTRTLIAMAVRMNRDNCRSPSRSVANQEFHQTDEQANHAARSVARALQDAGYRALNPSVGFPQEMDRFPRERIWVVAHKTVAVAAGLGVMGLHRNVIHPKFGSFVLLVTVLVDAEVSEYGQALDYNPCIDCKLCVAACPVGAIAKDGSFDGLACTTHNYREFMSGFTDWAQTVADSEDAADYRSRVTDSESASMWQSLSSPPGYKSGYCLAVCPAGEDVLGPYLDDRKSFMDTVLRPLQDKKETLYVLPGSHAQEYAQRRFPHKPVKEVTGGWQPPAKRSASPEREQRT

SEQ ID NO: 81408 - protein, 376 aa, Streptomyces sp.
  REGION 1..376: note = tr|A0A3N5APY0|A0A3N5APY0_9ACTN Epoxyqueuosine reductase QueG OS=Streptomyces sp. TLI_185 OX=2485151; GN = EDD92_5425 PE=4 SV=1
MTAARNAEGQRTTPPPRLPAKLAAHPSVQAVLARRRTGDAVSPPAVIDAAWLRELCLAAGADDASAVSLDHPDLAGEREHVQSALPGTRTLIAMAVRMNRDNCRSPARSVANQEFHRTDEQANHAARTVTRALQDAGYRALNPSVGFPQEMDRFPKERIWVVAHKTVAVAAGLGVMGLHRNVIHPRFGSFVLLVTVLVDAEVSEYGRELDYNPCIDCKLCVAACPVGAIAKDGAFDALACTTHNYREFMSGFTDWAQTVADSEDAADYRSRVSDSESASIWQSLSSPPGYKSGYCLAVCPAGEDVLGPYLDDRKTFMDTVLRPLQDKKENLYVLPGSHAQEYARRRFPHKPVKEVTGGWQPPAKRSAPSDRETRTS

SEQ ID NO: 81409 - protein, 248 aa, Subdoligranulum sp.
  REGION 1..248: note = tr|R7K888|R7K888_9FIRM Uncharacterized protein; OS = Subdoligranulum sp. CAG:314 OX=1262970 GN=BN603_00709; PE = 4 SV=1
MRLHGIKHYALLPIEGGALIMYFAPYSPYDYSEFPDCLKIDSYYITSNKVYFENLQLLQSLKAKGLDAKRYRRTDIKQLLDKYRLADYGMNGLCFVKEYGSFFFVATAFVEGAETEFFSSIPTVSHPLCTRCELCVAACPQDALVPDGFIKNKCLRQIQEEYADTPENNAALKRNGRLLGCNICQLVCPLNSHIKPVPPPQELVELCNKDSILETVENEQTLQRLIPLIGKNYARKSFLLPLARAFFK

SEQ ID NO: 81410 - protein, 308 aa, Subsaximicrobium wynnwilliamsii
  REGION 1..308: note = tr|A0A5C6ZFQ4|A0A5C6ZFQ4_9FLAO Epoxyqueuosine reductase OS=Subsaximicrobium wynnwilliamsii OX=291179; GN = queG PE=3 SV=1
MKDSKSKYSQFIKAEAKRLGFLSCGISKAEFLEEEAPRLERWLKNNAHGEMQYMENHFDKRLDPTKLVEGSKSVVSLLLNYFPEDTQTENTFKVSKYAYGTDYHFVIKDKLKTLLQSIQTEIGEVGGRAFVDSAPVLDKAWAAKSGLGWIGKHSNLLTQQVGSFYFIAELIIDLELEYDHAVTDHCGTCTKCIDACPTQAITEPYVVDGSKCISYFTIELKENIPTEFKGQFEDWMFGCDICQDVCPWNRFSKAHSEPLFNPHPDLLSMTKKDWEEITKDTFNKVFQKSAVKRTKFEGLKRNVEFLRK

SEQ ID NO: 81411 - protein, 347 aa, Sulfitobacter brevis
  REGION 1..347: note = tr|A0A1I1YH24|A0A1I1YH24_9RHOB Epoxyqueuosine reductase OS=Sulfitobacter brevis OX=74348 GN=queG PE=3; SV = 1
MTNKSTDLKDRLVQQALAEGFVACRLCRPWDVPEVPPRLSAFLEAGYHGQMAWMEERQAWRENPAALWPEARTVIMLAESYAPDHNPLDVLGSPEKAAMSVYAQGRDYHDVVKKRLKRLARWLIAQEACEVKVFVDTAPVPEKALAQAAGLGWQGKHTNLLSRDFGNWAFIGSVFTTLELETDPAGIDHCGSCTACQDICPTNAFPQPYQLDARRCISYLTIEHAGPVPLELRAKMGNRIYGCDDCLAICPWNKFAVAASDIRYRRPDPQAPDLADLAGLDDAGFRARFSGSAVKRIGRDRFVRNVLYAIGNSGTAGLLPVAAGLLEDADAAVADAARWAVAQLTNG

SEQ ID NO: 81412 - protein, 348 aa, Sulfitobacter delicatus
  REGION 1..348: note = tr|A0A1G7XG65|A0A1G7XG65_9RHOB Epoxyqueuosine reductase OS=Sulfitobacter delicatus OX=218672 GN=queG; PE = 3 SV=1
MTVDSEDLKARVVARALEEGFVACRICRPADVPEVPERLSRFVEAGFHGQMGWMEERMHWRGNPAVLWPEARSVIMLAESYTPEHDPRAVLEQPEKGAISVYAQGRDYHDIVKKRLKRLARWLMEEARAQEPEVKVFVDTAPVPEKALAQAAGLGWQGKHTNLLSRKFGNWAFLGSVFTTLDLATDAREVDHCGSCRACLDACPTDAFPAPYQLDARRCISYLTIEHKGPVDLELREKLGNRIYGCDDCLAACPWNKFAVAASDMRYHGPAVQPADLAELATLDDTAFRARFSGSPIKRIGRDRFVRNVLYAIGNSGLAELRPVAQSLAEDADATVADAARWAAERLG

SEQ ID NO: 81413 - protein, 377 aa, Sulfitobacter donghicola; identical to SEQ ID NO: 81298
  REGION 1..377: note = tr|A0A410XZS7|A0A410XZS7_9RHOB tRNA epoxyqueuosine(34) reductase QueG OS=Sulfitobacter donghicola OX=421000 GN=queG PE=4 SV=1

SEQ ID NO: 81414 - protein, 338 aa, Sulfitobacter donghicola
  REGION 1..338: note = tr|A0A073IK76|A0A073IK76_9RHOB 4Fe-4S ferredoxin; OS = Sulfitobacter donghicola DSW-25 = KCTC 12864 = JCM 14565 OX=1300350 GN=DSW25_02090 PE=4 SV=1
MKARLVAKALEEGFVACRICKPTAVPEVPARLDAFLAAGYHGQMGWMEERVTWRADPSALWPEARSVIMLAESYAPEHDPLEILERPDLGAVSVYAKGRDYHDIVKKRLKRLARWLIEQEECQVKVFVDTAPVPEKALAQAAGLGWQGKHTNIVSRDWGNWAFLGSVFTTLELEPDAPEVDRCGSCTACQEVCPTDAFPAPYQLDGRRCISYLTIEYKGPIDEEMRPALGNRIYGCDDCLAACPWNKFAVAASDMRYHGSAGGTLAELAVLDDPTFRTRFSGSPIKRIGRDRFTRNVLYAIGNSGDVSLRAVAQSLCEDEDATVADAARWAVAQLAHL

SEQ ID NO: 81415 - protein, 346 aa, Sulfitobacter dubius
  REGION 1..346: note = tr|A0A1I2W3V9|A0A1I2W3V9_9RHOB Epoxyqueuosine reductase OS=Sulfitobacter dubius OX=218673 GN=queG PE=3; SV = 1
MDSEDLKVRLVARAFEEGFVACRICRPADVPEVPERLARFVEAGYHGQMGWMEDRMHWRGNPAALWPEARSVIMLAESYTPEHDPRAVLEHPDKGAISVYAQGRDYHDIVKKRLKRLARWLMEEARAAEPEVKVFVDTAPVPEKALAQAAGLGWQGKHTNLLSRKFGNWAFLGSVFTTLDLAPDAQEVDHCGSCRACLDVCPTDAFPGPYQLDARRCISYLTIEHKGPVDLELREKLGNRIYGCDDCLAACPWNKFAVTASDMRYHGPAVQPADLAELAALDDTAFRARYSGSPIKRIGRDRFVRNVLYAIGNSGLAPLRSAAQSLTEDADPTVADAARWAVERLA

SEQ ID NO: 81416 - protein, 342 aa, unidentified
  source 1..342: note = Sulfitobacter geojensis
  REGION 1..342: note = tr|A0A196PZJ2|A0A196PZJ2_9RHOB tRNA epoxyqueuosine(34) reductase QueG OS=Sulfitobacter geojensis OX=1342299 GN=A8B74_09975 PE=4 SV=1
MDLKARLVEQALAEGFVACRICRPWDVPEVPARLEAFVQAGFHGQMAWMEDRMAWRGNPAALWPEAKSVIMLAESYAPEHDPLAVLEHPEKAAISVYAQGRDYHDIVKKRLKRLARWLIEQEPCEVKVFVDTAPVPEKALAQASGLGWQGKHTNVVSRDWGNWAFLGSVFTTLDLEADKAEVDHCGSCTACQDICPTDAFPAPYQLDGRRCISYLTIEHKGPVALELRGKLGNRIYGCDDCLAACPWNKFAVQASDMRYHGALRDAADLAELAGLDDAAFRARFSGSPVKRIGRDRFVRNVLYAIGNSGLARLAGTARGLVDDPDPAVADAARWAVGRLAEA

SEQ ID NO: 81417 - protein, 340 aa, Sulfitobacter guttiformis
  REGION 1..340: note = tr|A0A420DRR4|A0A420DRR4_9RHOB Epoxyqueuosine reductase OS=Sulfitobacter guttiformis OX=74349; GN = C8N30_1513 PE=4 SV=1
MGLKQRLITEALEAGFVACRVCRPDAVPQVPAQLDAFLEAGYHGQMGWMEERVAWRGNPSVLWPQAKSVIMLAESYAPEFDPLAVLERPELGAISVYAQGRDYHDVVKKRLKRIARWLIAQETCEVKVFVDTAPVPEKALAQAAGLGWQGKHTNVVSRDWGNWAFIGSVFTTLELEPDAAEIDHCGSCVACQDVCPTQAFPAPYQLDARRCISYLTIEHKGPVSDELRTKMGNRIYGCDDCLAVCPWNKFAVAASDIRYHGGAGGTLAELVVLDDADFRLRFSGSPIKRIGRDRFVRNVLYAIGNSGDVTLRGSAQALCDDADEAVADAARWAVARLASL

SEQ ID NO: 81418 - protein, 348 aa, unidentified
  source 1..348: note = Sulfitobacter indolifex
  REGION 1..348: note = tr|A9DZW0|A9DZW0_9RHOB Epoxyqueuosine reductase; OS = Sulfitobacter indolifex HEL-45 OX=391624 GN=queG PE=3; SV = 1
MTGDSDDLKARVVARALEEGFVACRICRPADVPEVPERLARFVEAGYHGQMGWMEDRMHWRGNPAALWPEARSVIMLAESYTPEHDPRAVLEHPEKGAISVYAQGRDYHDIVKKRLKRLARWLMEEARAAAPEVKVFVDTAPVPEKALAQAAGLGWQGKHTNLLSRKFGNWAFLGSVFTTLDLAPDAPEVDHCGSCRACLDVCPTDAFPGPYQLDARRCISYLTIEHKGPIDLELREKMGNRIYGCDDCLAACPWNKFAVTASDMRYHGPAVQPADLAELAALDDSAFRARYSGSPIKRIGRDRFVRNVLYAIGNSGLAPLRDVAQSLTEDADPTVAEAARWAAERLA

SEQ ID NO: 81419 - protein, 352 aa, Sulfitobacter litoralis
  REGION 1..352: note = tr|A0A1H0HUN8|A0A1H0HUN8_9RHOB Epoxyqueuosine reductase OS=Sulfitobacter litoralis OX=335975; GN = SAMN04488512_101348 PE=4 SV=1
MSVTPAVDTDALRGRLVAQALDEGFVSCRICRPDAVPEVPERLQAFVEAGYHGQMSWMADRMAWRGNPAALWPEARSVIMLAESYTPEYDPTEVLNHPDKAGVSVYAQGRDYHDIVKKRLKRVARWLVAQEPCEVKVFVDTAPVPEKALGQAAGLGWQGKHTNLLSRDWGNWAFLGAIFTTLDFTPDTAEVDHCGSCRSCLTACPTNAFPAPYQLDARRCISYLTIEHNGPVDLELRSKMGNRIYGCDDCLAACPWNKFAVAASDLRYHGGVGAPDLAELATLDDAAFRLRFSGSPIKRIGRNRFMRNVLYAIGNSGQARLVPVAQGLLDDPDATVVDAAQWAVARLGENHG

SEQ ID NO: 81420 - protein, 342 aa, Sulfitobacter marinus
  REGION 1..342: note = tr|A0A1I6V360|A0A1I6V360_9RHOB Epoxyqueuosine reductase OS=Sulfitobacter marinus OX=394264; GN = SAMN04488040_3058 PE=4 SV=1
MDDLKDRLVSQALAEGFVACKICRPWDVPEVPARLAAFVEAGYHGQMSWMADRMAWRGNPADLWPEARSVIMLAESYAPEHDPRAVLAHSDKAAISVYAHGRDYHDIVKKRLKRLARWLIEQETCEVKVFVDTAPVPEKALGQAAGLGWQGKHTNLLSRDWGNWAFLGAIFTTLELPVDGAEVDHCGSCRSCLDACPTDAFPAPYRLDARRCISYLTIEHKGPVDLELRSKMGSRIYGCDDCLAACPWNKFAVAASDMRYHGGVGAPDLAELAALDDTAFRARFSGSPIKRIGRNRFIRNVLYAIGNSGKPTLSDTAQSLVQDPDATVAEAARWAVARLAAK

SEQ ID NO: 81421 - protein, 342 aa, Sulfitobacter mediterraneus
  REGION 1..342: note = tr|A0A061SQ41|A0A061SQ41_9RHOB Epoxyqueuosine reductase OS=Sulfitobacter mediterraneus OX=83219; GN = PM02_05730 PE=4 SV=1
MDLKARLVDQALTEGFVSCRLCKPWDVPEVPDRLAAFVAAGYHGQMGWMEERMHWRGNPAALWPEAKTVIMLAESYAPEQDPLTVLEHPEKAAISVYAQGRDYHDVVKKRLKRLARWLIEQEPCEVKVFVDTAPVPEKALAQASGLGWQGKHTNVLSRGWGNWGFLGSVFTTLDLPADKPETDHCGSCRACQDVCPTDAFVAPYQLDPRRCISYLTIEHSGPVDLELREKMGNRIYGCDDCLAICPWNKFAAPVSDDRYHGAHVEAADLSELAALDDAAFRLRFSGSPIKRIGRDRFVRNVLYAIGNSGLPALRPAVAALCEDTDPTVAEAARWAMARLSDG

SEQ ID NO: 81422 - protein, 342 aa, Sulfitobacter mediterraneus
  REGION 1..342: note = tr|A0A2T6CJU9|A0A2T6CJU9_9RHOB Epoxyqueuosine reductase OS=Sulfitobacter mediterraneus OX=83219; GN = C8N31_101417 PE=4 SV=1
MDLKARLVDQALTEGFVSCRLCKPWDVPEVPDRLAAFVADGYHGQMGWMEERMHWRGNPAALWPEAKTVIMLAESYAPEQDPLTVLEHPEKAAISVYAQGRDYHDVVKKRLKRLARWLIEQEPCEVKVFVDTAPVPEKALAQASGLGWQGKHTNVLSRDWGNWGFLGSVFTTLDLPADKPEIDHCGSCRACQDICPTDAFVAPYQLDPRRCISYLTIEHSGPVDLELREKMGNRIYGCDDCLAICPWNKFAAPVSDDRYHGSHVEAADLAELVALDDAAFRLRFSGSPVKRIGRDRFVRNVLYAIGNSGLPALRPAAAPLCEDTDATVAEAARWAMARLSDG

SEQ ID NO: 81423 - protein, 352 aa, Sulfitobacter pontiacus
  REGION 1..352: note = tr|A0A1H2Z4H3|A0A1H2Z4H3_9RHOB Epoxyqueuosine reductase OS=Sulfitobacter pontiacus OX=60137; GN = SAMN04488041_104496 PE=4 SV=1
MSVTSAADTDALRGRLVAQALDEGFVSCRICRPDAVPDVPERLQAFVDAGYHGQMAWMADRMAWRGNPAALWPEARSVIMLAESYTPEYDPTEVLNHPEKAGVSVYAQGRDYHDIVKKRLKRVARWLVAQEPCEVKVFVDTAPVPEKALGQAAGLGWQGKHTNLLSRDWGNWAFLGAIFTTLDFTPDTAEVDHCGSCRSCLRACPTNAFPAPYQLDARRCISYLTIEHNGPVDLELRSKMGNRIYGCDDCLAACPWNKFAVAASDLRYHGGVGAPDLAELATLDDAAFRLRFSGSPIKRIGRNRFIRNVLYAIGNSGQARLTPVAQGLLDDPDATVADAAQWAVARLCENQD

SEQ ID NO: 81424 - protein, 342 aa, unidentified
  source 1..342: note = Sulfitobacter pseudonitzschiae
  REGION 1..342: note = tr|A0A221K4A4|A0A221K4A4_9RHOB Epoxyqueuosine reductase OS=Sulfitobacter pseudonitzschiae OX=1402135; GN = queG PE=4 SV=1
MDLKQQVIARALEEGFVMARVCRPDSVPEAAPRLEAFVAAGYHGQMGWMEDRMHWRGNPAALWPEARSVIMLAESYAPEYDPMSLLEARERGVISSYAQGRDYHDIVKKRLKRLGRWLIETSGGEIKVFVDTAPVPEKALGQAAGLGWQGKHTSLLSRDWGNWAFLGSVFTTLKLEPDTPEVGHCGSCTACLDVCPTDAFPGPYQMDARRCISYLTIEHKGPVDLELRAKMGNRIYGCDDCLAVCPWNKFAVAASDMRYHGGVGAPPLAELVALDDAAFRLRFSGSPVKRIGRDRFVRNVLYAIGNSGVADLLPAAQALCEDADATVADAARWAVARLKGTA

SEQ ID NO: 81425 - protein, 342 aa, unidentified
  source 1..342: note = Sulfitobacter pseudonitzschiae
  REGION 1..342: note = tr|A0A073J543|A0A073J543_9RHOB Epoxyqueuosine reductase OS=Sulfitobacter pseudonitzschiae OX=1402135; GN = SUH3_09085 PE=4 SV=1
MDLKQQVITRALEEGFVMARVCRPDAVPQAAARLEAFVQAGYHGQMGWMAERMHWRGNPAALWPEARSVIMLAESYAPEYDPLPLLRERERGVISAYAQGRDYHDIVKKRLKRLGRWLIETAGGEIKVFVDTAPVPEKALGQAAGLGWQGKHTNLLSREWGNWAFLGSVFTTLEFEPDAPEVGHCGSCTACLDICPTDAFPAPYQLDARRCISYLTIEHAGPVDEDLRALMGNRIYGCDDCLAVCPWNKFAVAASDLRYHGGVGAPPLAELAALDDAAFRARFSGSPIKRIGRDRFVRNVLYAIGNSGVAALVPVAQGFCEDADATVADAARWAVARLKGTA

SEQ ID NO: 81426 - protein, 348 aa, Sulfitobacter sp.
  REGION 1..348: note = tr|A0A2E6X1P6|A0A2E6X1P6_9RHOB tRNA epoxyqueuosine(34) reductase QueG OS=Sulfitobacter sp.; OX = 1903071 GN=queG PE=4 SV=1
  VARIANT 148: note = Xaa can be any naturally occurring amino acid
  VARIANT 154: note = Xaa can be any naturally occurring amino acid
  VARIANT 183: note = Xaa can be any naturally occurring amino acid
  VARIANT 193: note = Xaa can be any naturally occurring amino acid
  VARIANT 203: note = Xaa can be any naturally occurring amino acid
  VARIANT 220: note = Xaa can be any naturally occurring amino acid
  VARIANT 242: note = Xaa can be any naturally occurring amino acid
  VARIANT 257: note = Xaa can be any naturally occurring amino acid
  VARIANT 270: note = Xaa can be any naturally occurring amino acid
MTVDSEDLKVRLVARAFEEGFVACRICRPADVPEVPERLARFVEAGYHGQMGWMEDRMHWRGNPAALWPEARSVIMLAESYTPEHDPRAVLEHPDKGAISVYAQGRDYHDIVKKRLKRLARWLMEEARAAEPEVKVFVDTAPVPEKAXAQAAGXGWQGKHTNLLSRKFGNWAFLGSVFTTLDXAPDAQEVDHXGSCRACLDVXPTDAFPGPYQLDARRCXSYLTIEHKGPVDLELREKLGNXIYGCDDCLAACPWNXFAVTASDMRYHGXAVQPADLAELAALDDTAFRARYSGSPIKRIGRDRFVRNVLYAIGNSGLAPLRSAAQSLTEDADPTVADAARWAVERLA

SEQ ID NO: 81427 - protein, 344 aa, Sulfitobacter sp.
  REGION 1..344: note = tr|A0A525PQJ6|A0A525PQJ6_9RHOB tRNA epoxyqueuosine(34) reductase QueG OS=Sulfitobacter sp. SK025 OX=1389011 GN=queG PE=4 SV=1
MDTAGLKDRLVSQASIEGFVSCRVCRPWDVPDVPARLAAFVDAGYHGQMEWMADRMAWRGDPAVLWPEAKSVIMLAESYTPLYDPTSVLDETENAAVSVYAQGRDYHDIVKKRLKRLARWLIEQQPCEVKVFVDTAPVPEKALGQAAGLGWQGKHTNLVSRDWGNWAFLGAIFTTLDLDVDGAEKDHCGSCRSCLAACPTDAFPAPYRLDARRCISYLTIEHSGPVDPELRSKLGNRIYGCDDCLAACPWNKFAVQASDMHYHGGVGSPPLAELATLDDAAFRARFSGSPIKRIGRNRFIRNVLYAIGNSGQADLVPTAQGLVGDPDPTIVEAAQWAIEQLAGK

SEQ ID NO: 81428 - protein, 357 aa, unidentified
  source 1..357: note = Sulfuricaulis limicola
  REGION 1..357: note = tr|A0A1B4XGM5|A0A1B4XGM5_9GAMM Epoxyqueuosine reductase OS=Sulfuricaulis limicola OX=1620215 GN=queG; PE = 3 SV=1
MRTARNNNIDLARLATDIKAWGRELGFQQIGIADTDLGAAETRLLNWLKLERHGEMHYMESHGTRRSRPQELQPGTLRVISARLDYLPGQAADSEAVMRDPQRGFVSRYALGRDYHKVLRSRLQKLAERIEARVGPFQYRAFSDSAPVLEKALAEKAGLGWIGKHTNLIDKQAGSWFFLGELYTDLPLPVDTPAENHCGTCHACIDICPTRAIVAPYELDARRCISYLTIELRGSIPGELRPLIGNRIYGCDDCQLVCPWNRFARPGAEPDFAPRHGLDAPELVRLFSWTEDEFLKYTEGSAIRRIGYECWLRNIAVALGNASTSETVVNALKARQEHASELVKEHVSWALERHYEQ

SEQ ID NO: 81429 - protein, 362 aa, Sulfuricella denitrificans
  REGION 1..362: note = tr|S6B5A1|S6B5A1_SULDS Epoxyqueuosine reductase; OS = Sulfuricella denitrificans (strain DSM 22764 / NBRC 105220 / skB26) OX=1163617 GN=queG PE=3 SV=1
MHVDTLTDYSHLDLRQIAENIKAWGMELGFQAIGIAGNDLGQAEARLLEWLAQGCHGEMDYMANHGVKRSRPQELVPGTLRVITARMAYFPPQARDSIAVMDDSSKAFISRYALGRDYHKLIRARLQKLAEKIQSEIGPFQFRAFTDSAPVMEVELASKSGLGWRGKHSLLLSRSSGSWFFLGEIYTDLPLPIDEPEQNHCGTCTRCMTSCPTDAIVAPYQVDAQRCISYLTIELKGSIPEELRPLIGNRVYGCDDCQLACPWNKFGQLTREPDFAVRHGLDDAKLTALFRWSEEEFDARLAGSPIRRIGHERWLRNIAVGLGNALPSDDVIAALQSRLDHPSVLVREHVVWALERQISRRE

SEQ ID NO: 81430 - protein, 359 aa, Sulfuricella sp.
  REGION 1..359: note = tr|A0A0E9MH49|A0A0E9MH49_9PROT Epoxyqueuosine reductase OS=Sulfuricella sp. T08 OX=1632857 GN=queG PE=3; SV = 1
MHVDALTDYSQLDLRQLADNIKAWGMEFGFQAIGIAGNDLGQAETRLLEWLAQGCHGEMDYMANHGVKRSRPQELVPGTLRVITARMAYFPPQAHDSMAVMEDSSKAYISRYALGRDYHKLIRARLQKLAEKIQSEIGPFQFRAFTDSAPVMEVELASKSGLGWRGKHSLLLSRSAGSWFFLGEIYTDLPLPIDEPEQNHCGTCTSCMTSCPTDAIVAPYQVDARRCISYLTIELKGSIPEELRPLIGNRVYGCDDCQLACPWNKFGQLTREPDFAVRHGLDDTSLIELFLWNEKEFDSRLAGSPIRRIGHERWLRNLAVGLGNARPVVEITAALKQRLNHPSELVREHVSWALNRQAL

SEQ ID NO: 81431 - protein, 359 aa, unidentified
  source 1..359: note = Sulfuriferula multivorans
  REGION 1..359: note = tr|A0A401JAB4|A0A401JAB4_9PROT Epoxyqueuosine reductase OS=Sulfuriferula multivorans OX=1559896 GN=queG; PE = 3 SV=1
MDHGELDLAKLVRAIKAWGQELGFGAVGITDCALDNTEAELLAWLDKGYHGEMDYMAKHGVKRARPAELIPGTVRVISARMNYLPPQAAESWAVMDDGDLAFISRYALGRDYHKVLRTRLQQLTTRIGAAVGAFSYRVFTDSAPVMEVALAANAGLGWRGKHTLLLDRDAGSWFFLGEIYTDLPLPVDNPVSAHCGNCQACIDICPTQAIVAPYELDARRCISYLTIEHAGSIPVALRPLMGNRIYGCDDCQLVCPWNRFAQTSELADFAVRNGLDSAALAALFAWSEHDFDARLQGSAIRRIGHERWLRNIAVALGNAPTSDAAMQALHSRADHPSALVREHVQWALSQHRNVQIHAD

SEQ ID NO: 81432 - protein, 363 aa, unidentified
  source 1..363: note = Sulfuriferula plumbiphila
  REGION 1..363: note = tr|A0A512L7I9|A0A512L7I9_9PROT Epoxyqueuosine reductase OS=Sulfuriferula plumbiphila OX=171865 GN=queG; PE = 3 SV=1
MDHGELDLAGLVWDIKAWGRELGFGAVGITDCALDNTEAELLAWLDKGYHGEMDYMAKHGVKRARPAELVPGTLRIISARMNYLPPQAAESWTVMGDGDLAFISRYALGRDYHKVLRTRLQQLATRIEAAVGAFSYRVFTDSAPVMEVALAANAGLGWRGKHTLLLDRDAGSWFFLGEIYTDLPLPVDSPASAHCGSCQACLDICPTRAIVAPYELDARRCISYLTIEHPGSIPVVLRPLMGNRIYGCDDCQLVCPWNRFARTSELADFSVRNGLDGAALAALFAWSEHDFDTRLQGSAIRRIGYERWLRNIAVALGNAPTSDAAVDALHSRAGHPSALVREHVQWALSRHIEAAKLERHGQD

SEQ ID NO: 81433 - protein, 356 aa, unidentified
  source 1..356: note = Sulfuriferula sp.
  REGION 1..356: note = tr|A0A1Y0G9L1|A0A1Y0G9L1_9PROT Epoxyqueuosine reductase OS=Sulfuriferula sp. AH1 OX=1985873 GN=queG PE=3; SV = 1
MDHDQLDLVVLAQQIKVWGAELGFHGVGITDCDLGAAETELLAWLSQGYHGEMDYMAKHGTKRTRPAELIPGTVRVISVRMDYLPPNTRDSWEVMSEPQSAYISRYALGRDYHKVMRTQLQRLAERINQAVGAFNYRVFTDSAPVMEVALASKAGLGWRGKHTLLLNREAGSWFFLGEIYTDLPLPIDQPVSAHCGDCHACIDICPTQAILAPNELDARRCISYLTIEHSGAIPVELRPLMGNRIYGCDDCQLICPWNRFAKTSSSADFSVRNGLDGPQLVDLLAWSEDEFNQRLQGSAIRRIGHERWLRNIAVALGNAPASPEIVAALNRHADHPSVIVREHVQWALSQHQHSVD

SEQ ID NO: 81434 - protein, 362 aa, unidentified
  source 1..362: note = Sulfurifustis variabilis
  REGION 1..362: note = tr|A0A1B4V3N1|A0A1B4V3N1_9GAMM Epoxyqueuosine reductase OS=Sulfurifustis variabilis OX=1675686 GN=queG; PE = 3 SV=1
METANDAGTRRIGPDPGELARMIKGWGRELGFQHIGITDTDLTEAEAHLLDWLGRGWHGEMAWMGAHGTRRSRPDELVPGTLRVISARLDYLPAAAPARSVLEDPVAAFVSRYALGRDYHRVLRARLQKLAERIEARVGGFRYRVFTDSAPVLEKAIAEKAGLGWIGKHTNLINREAGSWFFLGEIYTDLPLPIDEPAANHCGTCRACLDVCPTRAIVAPYRLDARRCISYLTIELRGSIPEELRPLIGNRIFGCDDCQLVCPWNRFGRITGESDFAPRHGLDARRLVDLFAWTEDEFLKRTEGSAIRRTGYEGWLRNIAVALGNARATEDVVAALRSRSHHPSELVREHVQWALARLGQGA

SEQ ID NO: 81435 - protein, 350 aa, unidentified
  source 1..350: note = Sulfurirhabdus autotrophica
  REGION 1..350: note = tr|A0A4R3Y5D6|A0A4R3Y5D6_9PROT Epoxyqueuosine reductase OS=Sulfurirhabdus autotrophica OX=1706046; GN = queG PE=3 SV=1
MDFDQLAADIKSWGKALGFQTIGISDVNLDAAEKGLMNWLAKGFHGDMDYMAKHGTKRSRPAEILPGTSRIITARLNYRPPAARDSWETLHDGNAAFISRYALGRDYHKVMRKRLQQLTEKIQAETGAAHFRVFTDSAPVMEVALAQKSGIGWRGKHTLLLTRDHGSWFFLGEIFTDLPLPVDPPIVDHCGTCQSCIDICPTQAIVAPYQVDARRCISYLTIELHGSIPIELRPLIGNRVYGCDDCQLTCPWNKFAQTTGESDFHVRHGLDNITLIQAFGWTEQLFHKNMAGSAIHRIGYERWLRNIAVGLGNAPTSGAVIAALESRLAYPSQLVQEHVKWALTQHQVST

SEQ ID NO: 81436 - protein, 366 aa, unidentified
  source 1..366: note = Sulfurisoma sediminicola
  REGION 1..366: note = tr|A0A497XAL8|A0A497XAL8_9PROT Epoxyqueuosine reductase OS=Sulfurisoma sediminicola OX=1381557 GN=queG; PE = 3 SV=1
MHDWTRLARSIKDWGRELGFDAIGITGTDLGEAERELNDWLAADCHGEMDYMATHGTKRSRPAELVPGTRAVIAARMNYRPPVAPAASAEVAAISRYALGRDYHKLLRARLQKLADRIVAEVGEFGYRVFTDSAPVMEVALAAKAGLGWRGKHTLLLSRQAGSWFFLGEIYVDLPLPPDAPATDHCGTCRACLDACPTDAFLAPYRLDARRCISYLTIELKGAIPEPLRPLLGNRIYGCDDCQDVCPWNREAPMTREPDFLPRHALDTATLIELFAWDEAEFNEKLAGSAIRRIGHERWLRNIAIALGNAPSLPELIAALEARREDSSALVREHVAWALNQHPHPPAPLPEKGGDGCSRTASAPVR

SEQ ID NO: 81437 - protein, 360 aa, Sulfuritalea hydrogenivorans
  REGION 1..360: note = tr|W0SFX6|W0SFX6_9PROT Epoxyqueuosine reductase; OS = Sulfuritalea hydrogenivorans sk43H OX=1223802 GN=queG; PE = 3 SV=1
MVGMHGDEKNSTALKDGIRRWGRELGFDAIGFSGTRVDGAAEALDAWLVAGFHGEMDYMAAHVTPAGNKRALPTELVPGTRSIITARINYRPASADSQEALADGERAFVSRYALGRDYHKLLRARLQKLADRITDEIGEFAYRVFTDSAPVMEVGLAQNSGLGWRGKHTLLLDREAGSYFFLGEIFTDLPLAPDTPVTDHCGNCTACIDACPTQAIVAPYQVDARLCISYLTIELKGSIPEALRPLLGNRIYGCDDCQLACPWNRFAPLARETDFTPRHDLDRATLVELFAWDENDFNERLAGSPIRRIGFERWLRNIAVALGNAPPSEAVLGALRSRADHPLPLVREHVAWALARHATD

SEQ ID NO: 81438 - protein, 353 aa, unidentified
  source 1..353: note = Sulfuritortus calidifontis
  REGION 1..353: note = tr|A0A4V2UR38|A0A4V2UR38_9PROT Epoxyqueuosine reductase OS=Sulfuritortus calidifontis OX=1914471 GN=queG; PE = 3 SV=1
MSSHSSDSLKAAIRGWGRELGFGAVGFAGIEQPAAEARLLDWLAKGYHGDMDYMARHGTKRARPAELVPGTRSVISVRLDYLPASHAAETILARPERAYISRYALGRDYHKVLRNRLQKLAERIEAEVGPFGYRVFTDSAPVLEVELAAQASLGWRGKHTLLIDRRAGSWFFLGEIYCDLELAPDPPEANHCGSCQACLDICPTRAIVAPYEVDARRCISYLTIELAGSIPTELRPLMGNRIYGCDDCLLACPWNRFAQPTRESDFAPRNGLDTATLIELFAWSGTEFEARLAGSPIRRIGFDRWLRNLAVALGNAPASPAAQAALAARRDHASALVREHVEWALARQAAGAK

SEQ ID NO: 81439 - protein, 384 aa, Sulfurivirga caldicuralii
  REGION 1..384: note = tr|A0A1N6F304|A0A1N6F304_9GAMM Epoxyqueuosine reductase OS=Sulfurivirga caldicuralii OX=364032 GN=queG; PE = 3 SV=1
MNDTARLKESIRAEAQRLGFADCGVTHTDLSAYEASYFNWLGQHFHGEMEYMARHGLKRTRPNLLVPGTQSIISVRMNYYDCDSENPLAQLQRGDHAYISRYALGRDYHKLIRNRLKNLVAFIEKAVGPFNYRIFTDSAPVLERPIAREAGLGFIGKNSLVIHPRAGSWFFLGEIYTDLQLPPDPCFEKQGCGPCTACLDACPTGAIVADGVVDARRCISYLTIEHPGAIPEDLRPLIGNRIYGCDDCQLVCPWNRFAEPNRETDFKPRHALDRATLLELWQWSETDFLERFAGSPIRRIGFERWQRNLAVALGNAPASDAVVAALGAKKPQISSKMVLEHVHWALAQQREKRHRKKVGDPPLLVGRKAYLPRRCKEKLVKREE

SEQ ID NO: 81440 - protein, 338 aa, Sulfurospirillum sp.
  REGION 1..338: note = tr|A0A290HM36|A0A290HM36_9PROT Epoxyqueuosine reductase OS=Sulfurospirillum sp. JPD-1 OX=220622; GN = SJPD1_0663 PE=4 SV=1
MQTIAQAIQDKAYELGYEKCGIIPLSMMHEFEGKLEERTRSVPSSSGFYERQKRLIDPTKTYPWAKSIVVVAERYGQYKLPSTLAGHIGRPYLYDARINEKTEEFQRGLLLDAYLKSLGFQTATERKFGLVGLRWAAMKAGLGIIRRNNFFYTDSGSWVTLYAWLIDEEMTLVETNTLPSCPEKCQRCITACPTKSLSAPYTMNPMRCISFLTTFGGRDLPHEPLAKSFGACIYGCDICQEVCPMNHKKLSDEKEFPELLALAPFLTPERIMEMDEDFYREHIQPKFFYLSPDDLWKWKVNVLCFMQNNYQESFRPYILEARSASHEKVREMANSIIF

SEQ ID NO: 81441 - protein, 312 aa, Sulfurovum sp.
  REGION 1..312: note = tr|A0A0C2ZPW1|A0A0C2ZPW1_9PROT Epoxyqueuosine reductase OS=Sulfurovum sp. FS06-10 OX=1539064 GN=queG; PE = 3 SV=1
MSSNFKLPTSNYSKIIKAESKRLGFFSCGISKAGFLEEEAPRLENWLNKNMNGQMSYMENHFDKRLNPTLLVDDAKSVISLLLNYYPSELQNRDSYQISKYAYGQDYHLVIKEKLKELLHFIQTEIGEVSGRAFVDSAPVLDKAWAAKSGLGWVGKNSNLITQKVGSFYFIAELIIDLELDYDTPTTDHCGSCTACLDACPTDAIVAPYVVDGSKCISYFTIELKDNLPQELKSKFDDWMFGCDICQDVCPWNRFSKPHSEPLLKANAAVLNFSKSDWEEITEDTFQKVFKNSAVKRTKYDGLKRNINFLKQ

SEQ ID NO: 81442 - protein, 331 aa, unidentified
  source 1..331: note = Sunxiuqinia dokdonensis
  REGION 1..331: note = tr|A0A0L8V8G8|A0A0L8V8G8_9BACT Epoxyqueuosine reductase OS=Sunxiuqinia dokdonensis OX=1409788 GN=queG; PE = 3 SV=1
MNTRQKPGIFIFGKIGQNMEQQEQAAKIKEKAFELGFLDCGISKADFLSEEKSRLERWLNQELHGEMAYMARNVEMRLDPRLIFEGAKSVISVLLNYYPTEKQLADDAPVLSKYAYGKDYHFVLKDKLNELLKFIQNEIEPCNGRPFVDSAPVLDKAWAAKAGLGWVGKHTNLISVEHGSFFFIGELIVDLELPADNKTVRDHCGTCTRCIDACPTQAIVAPQVVDAQRCISYQTIELKGELDQSLQGKFEDRVFGCDICQDVCPWNLKSEPHREPDFEPHPKLMALTRNEWMEMDKPLFNELFRKSAVKRTKFEGLKRNLEFIDSASNSD

SEQ ID NO: 81443 - protein, 308 aa, Sunxiuqinia elliptica
  REGION 1..308: note = tr|A0A4R6H5F5|A0A4R6H5F5_9BACT Epoxyqueuosine reductase OS=Sunxiuqinia elliptica OX=655355 GN=queG PE=3; SV = 1
MTRTKSEKIKAKALELGFLSCGISEADFLSDEKDALQKWLQQGMHGEMSYMEHNQEMRLDPRLIFEGARSVISVLLNYYPKKEQQDAEAPVLSKYAYGKDYHFVLKEKLNLLLKYIQEEIAPCNGRPFVDSAPVLDKAWAAKAGLGWIGKHSNLISVEHGSFFFIGELIVDLPLKPDQKTVRDHCGTCTRCIDACPTQAIVAPGIVDARRCISYQTIELRGELDDKLKDQFKNRVFGCDICQDVCPWNLKSEPHQEPDFEPHPQLLELTRKEWMDIDHALFNELFRKSAVKRTKYDGLKRNLRFLDDQ

SEQ ID NO: 81444 - protein, 308 aa, Sunxiuqinia elliptica
  REGION 1..308: note = tr|A0A1I2KH89|A0A1I2KH89_9BACT Epoxyqueuosine reductase OS=Sunxiuqinia elliptica OX=655355 GN=queG PE=3; SV = 1
MTRTKSEKIKAKALELGFLSCGISEADFLSDEKDALQKWLQQGMHGEMSYMERNQEMRLDPRLIFEGARSVISVLLNYYPKKEQQDAEAPVLSKYAYGKDYHFVLKEKLNLLLKYIQEEIAPCNGRPFVDSAPVLDKAWAAKAGLGWIGKHSNLISVEHGSFFFIGELIVDLPLEPDQKTVRDHCGTCTRCIDACPTQAIVAPGVVDARRCISYQTIELRGELDDKLKDQFKNRVFGCDICQDVCPWNLKSEPHQEPDFEPHPQLLELTRKEWMEMDHALFNELFRKSAVKRTKYDGLKRNLRFLDDQ

SEQ ID NO: 81445 - protein, 379 aa, unidentified
  source 1..379: note = Superficieibacter electus
  REGION 1..379: note = tr|A0A2P5GID4|A0A2P5GID4_9ENTR Epoxyqueuosine reductase OS=Superficieibacter electus OX=2022662 GN=queG; PE = 3 SV=1
MSQPLDLNQLAQNIKQWGTELGFQQVGIADTDLSASEPKLQAWLDKQYHGEMEWMARHGMMRARPHELLPGTLRVISVRMNYLPANAAFARTLKNPSLGYVSRYALGRDYHKLLRNRLKKLGEKIQQQCASLNFRPFVDSAPLLERPLAEKAGLGWTGKHSLILSRDAGSFFFLGELLIDLPLPVDSPVEEGCGRCVACMTICPTGAIVEPYTVDARRCISYLTIELEGAIPEEFRPLMGNRIYGCDDCQLICPWNRYSQLTEEDDFSPRKSLHAPELIELFAWSEAWFLKVTEGSAIRRIGHLRWLRNIAVALGNAPWDEANIAALETRRGEHPLLDEHIAWAIAQQIEKRNACVVEVQLPKKQRLVRVIEKGLPRDA

SEQ ID NO: 81446 - protein, 361 aa, unidentified
  source 1..361: note = Sutterellaceae bacterium
  REGION 1..361: note = tr|A0A2E2R1S6|A0A2E2R1S6_9BURK Epoxyqueuosine reductase OS=Sutterellaceae bacterium OX=2026794 GN=queG; PE = 3 SV=1
MQAHQEQENWALLQRVAKAQGLGCMGVSDTHLQACEPHLQAWLNQGMHGEMAYMERHGLKRLNTDTLFPGAIRIVSLRVPYVPETTLNQPDAATFTEKTLSEIEARDTPYVSLYARGRDYHKVIRQRLKRFADAVNSEVAGFGFRVAVDSAPTAEVEIARKAGLGWRGKHTLLIHPDEGSLFFLGEVFTNMPLPLSGEFGKNHCGTCNSCMTACPTQAIVKPYQVDARLCISYLTIEHDSEIPLELRPLVGTRIYGCDDCQLACPWNKFAKPAQYADFNPRAEFEKPDWFDMMRWTEDEFLKRTEGSAIRRIGYKRFRRNLAVAAGNSVGVMGIREALLGMRKTADAFLMEHIDWALSRLD

SEQ ID NO: 81447 - protein, 361 aa, unidentified
  source 1..361: note = Sutterellaceae bacterium
  REGION 1..361: note = tr|A0A2D6RUL6|A0A2D6RUL6_9BURK Epoxyqueuosine reductase OS=Sutterellaceae bacterium OX=2026794 GN=queG; PE = 3 SV=1
MQAHQEQENWALLQRVAKTQGLGCMGVSDTHLQACEPHLQTWLNQGMHGEMAYMERHGLNRLNADTLFPGAIRIVSLRVPYVPETTLNQPDATTFTEKTLMEIEAHNKPYVSLYARGRDYHKVIRQRLKRFADAVNSEVGGFGFRVAVDSAPTAEVEIARKAGLGWRGKHTLLIHPEEGSLFFLGEVFTNMPLPLSGEFGKNHCGTCTSCITACPTRAIVKPYQVDARLCISYLTIEHDSEIPLELRPLVGTRIYGCDDCQLACPWNKFAKPAQYADFNPRAEFEKPDWFAMMRWTEQEFLRITEGSAIRRIGYKRFRRNLAVAAGNSVGVVGMREALLEMRSSADAFLMEHIDWALSRLD

SEQ ID NO: 81448 - protein, 351 aa, Swaminathania salitolerans
  REGION 1..351: note = tr|A0A511BS68|A0A511BS68_9PROT Epoxyqueuosine reductase OS=Swaminathania salitolerans OX=182838 GN=queG; PE = 3 SV=1
MSKSIEDRIADHARHLGFDAIGFCDASLPEEARTRLRQFVEDGRHGTMGWMEQRIEQRGDPRALWPDVRSVISLGLSYAPEADPAETLDRPDTGTISVYARHRDYHDVLKGMLKHLAQFVVRQDVGGEGTQVKVFVDTAPVLEKPLAEQARLGWQGKHTNLVSRDHGSWLLLGEIYTTLALTPSPPRAGSCGSCTRCLTACPTDAFPRPYALDARRCIAYLTIEHDGPIPVEFRKAMGNRIYGCDDCLNACPWNRFAATSRHMKLQPRPDLMAPELDDLARLDDAGFRSFFSGSPIKRIGRNRFVRNVLVALGNSGDATKLPLIASLMADENETVAEAAVWAWTQLAEPDR

SEQ ID NO: 81449 - protein, 351 aa, unidentified
  source 1..351: note = Swingsia samuiensis
  REGION 1..351: note = tr|A0A4Y6UMF5|A0A4Y6UMF5_9PROT Epoxyqueuosine reductase OS=Swingsia samuiensis OX=1293412 GN=queG PE=3; SV = 1
MPSPSSHERSLEESITLHAQHLGFDAVGFCKADLPKEIEHGLRAFVAQEYHGTMSWMETRIEQRSHPQALWPEVKSVISLALSYAPAEEPDQTLKNPSCGNISVYARNRDYHDVIKGMLKQLAQFVVKQGGEQTQVKVFVDTAPVSERALAEQAHLGWQGKHTCLVSRHHGSWLLLGEIYTTLELTPSSPQGGKCGSCSRCLTACPTNAFIGPYRMDARRCISYLTIEHKGPIPHEFRTQIGNRIYGCDDCIMACPWNRFAQTASHLKLRARSDLIEPPLAELAQLNDQEFRKMFSGSPVKRIGRNRFIRNVLIAIGNSKDITLIPSAQRHLTDPDADIRETAQWALEQLS

SEQ ID NO: 81450 - protein, 387 aa, Symbiobacterium thermophilum
  REGION 1..387: note = tr|Q67MF6|Q67MF6_SYMTH Uncharacterized protein; OS = Symbiobacterium thermophilum (strain T / IAM 14863); OX = 292459 GN=STH2152 PE=4 SV=1
MPDLQRLKAEMKDRAREIGIDLVGVAPAEPFLRERQILEERIARGRGPNPYEHPVVEERVYPERLLPGVKAIIACGIAYYHPDAPRPPEDRVALRGWLSRYCRGRDYHQILKDRILALAAWLERRAPGHRHVAYVDTGPPLDRAVAERAGIGKFGKHTNLITREYGTWVFLGELLTTLPLPPDEPQPPACGACTLCIDACPTGALSEWRLEWDRCLSHITQMKGIIPAEYREVMGNRLFGCDDCQDVCPYNRRARPSRHPEFAPSPDLDGGEPDLLRLMAMTKGDFRRWFEPTAAGWRGKTTIQRNALIALGNSGDPAALPALTAALESESAILRAHAAWALGRLGRLAPDARDAARSALARRATCETDPAVRLELGAALESLGGGE

SEQ ID NO: 81451 - protein, 316 aa, unidentified
  source 1..316: note = Synechococcales bacterium
  REGION 1..316: note = tr|A0A354B0A5|A0A354B0A5_9CYAN Epoxyqueuosine reductase OS=Synechococcales bacterium UBA10510 OX=2055795; GN = queG PE=3 SV=1
MAEATSLEALASGLKRQAHSLGFDPVGIAAVAAGERMRLRSAALERWLQAGHQADMGWMADPRRRQIEALLPGCRSLLAVGLSYYVRAERQPGTLAVARYGWGRDYHRLIEGRLRRLGRWLEEQWPTARWRACVDSAPLMDKAWAEEAGLGWIGKHGNLIHRQRGSWLLLGHLLTSLELPPDRAASPLCGSCNRCIPACPTGAIVEPFVVDSRRCIAFHTIENRDPELPAAIAAGMGPWVAGCDICQEACPWNQQPLASSEDPDLQPRPWLLELRAEQAQLWSDAEWDERLRASALRRIKPWMWRRNLRAARPDPA

SEQ ID NO: 81452 - protein, 312 aa, unidentified
  source 1..312: note = Synechococcales bacterium
  REGION 1..312: note = tr|A0A3D0PBM8|A0A3D0PBM8_9CYAN tRNA epoxyqueuosine(34) reductase QueG (Fragment); OS = Synechococcales bacterium UBA8647 OX=2055797 GN=queG; PE = 4 SV=1
MVSSDTGECFSGATVRVPADLADALKQQALEQGFALAGIAAVPSGERIAMRTAALQRWLAAGHQADMAWMQDPRRQAIELLLPGVQSVLAVALNYYVDQQQTPASPKIARYGWGRDYHRVMDQRLRRLGRWLEEQQPSCRWRACVDSAPLMDKAWAEEAGLGWIGKNGNLISPSHGSWLLLGHLLTTASLPADQPARSLCGHCQRCLPACPTAAITEPFVVDSRRCIAFHTIENRDEQVPLPLHGWVAGCDVCQEVCPWNQHHAQSSADPAVQPREWILSSTANEMASWSDDTWSERLQASALRRIKPWMWR

SEQ ID NO: 81453 - protein, 317 aa, Synechococcus elongatus
  REGION 1..317: note = tr|Q31QV7|Q31QV7_SYNE7 Epoxyqueuosine reductase; OS = Synechococcus elongatus (strain PCC 7942) OX=1140; GN = queG PE=3 SV=1
MVATLAEQIKAEAIALGFDKVGIASVDPPDTEALAALDRWLAQGYQAEMDWMASDRRRDVRNLLPNAQSVICVALNYYSGDHPDPSPEVGKIARYAWGRDYHRVVEKRLKALARWLQTQQPDCECRWYVDSGPIADKVWAQRAGLGWIAKNSNVISREFGSWIFLGELVTTLALPADRPHTAHCGSCSRCLEACPTQAIVEPYVVDANRCIAYHTIENRAADLPAAIAQNLQGWVAGCDICQEVCPWNQRFAQITTLPDLQPRSELLAPALAELATLSEEAWDQQFQGSALRRIKPAMWRRNSRANLRQQSEGNRLS

SEQ ID NO: 81454 - protein, 317 aa, Synechococcus elongatus
  REGION 1..317: note = tr|A0A3G6WWW5|A0A3G6WWW5_SYNEL Epoxyqueuosine reductase OS=Synechococcus elongatus PCC 11801 OX=2219813; GN = queG PE=3 SV=1
MTPTLAEQIKAEAIALGFDKVGIASVDPPDTAALAALDRWLEKGYQAEMGWMASDRRRDVRNLLPSAQSVICVALNYYTGDHPESTPDVGKIARYAWGRDYHRVLEKRLKALARWLQTQQPGCECRWYVDSGPIADKVWAQRAGLGWIAKNSNVISREFGSWIFLGELVTDLALPADRPHTAHCGTCSRCLDACPTQAIVEPYVVDANRCIAYHTIENRATELPEAIAQNLHGWVAGCDICQEVCPWNQRFAQQTTLPELQPRPELLAPDLAKLAILSEEAWDQQFQGSALRRIKPAMWQRNSRANLAQQPEGNPLS

SEQ ID NO: 81455 - protein, 302 aa, unidentified
  source 1..302: note = Synechococcus lacustris
  REGION 1..302: note = tr|A0A2P7EH25|A0A2P7EH25_9SYNE tRNA epoxyqueuosine(34) reductase QueG OS=Synechococcus lacustris OX=2116544 GN=queG PE=4 SV=1
MPVNLADQLKQQALAQGFAVAGVASTSAGGRMPLRTAALERWLAAGYQADMAWMNNPKRLAVQQLLPGVRSLLAVGLNYYVDQQQGVGVARIARYGWGRDYHRLIEQRLKRLGRWLELQQPDSRWRVCVDTAPLLDKAWAEEAGIGWIGKNGNLISQSHGSWLLLGHLLTTCELTPDAPAIPLCGSCNDCLPACPTGAIAEPFVVDSRRCIAFHSIENRDDTLPLPLHGWVAGCDLCQEVCPWNKHHAKASTDPELQPRNWILQSKPQELKEWDDNQWDEALRSSALRRIKPQMWRRNLGCL

SEQ ID NO: 81456 - protein, 320 aa, Synechococcus lividus
  REGION 1..320: note = tr|A0A2D2Q4M3|A0A2D2Q4M3_SYNLI Epoxyqueuosine reductase OS=Synechococcus lividus PCC 6715 OX=1917166; GN = queG PE=3 SV=1
MICAATIKDYAYGLGVHRVGIVDLRTYCDDHPSGTAALRRWLAQGYHADMAWMSAPHRQNLQAVLPGAQSVIAVALNYFPGASPPQGDRPGKIARYAWGRDYHKVLGKRLKALGQWLKEQVPDVSYRWYVDTGPVQDKVWAQQAGIGWIGKHSNVISRQYGSWIALGELITTLALEGDRPHLNHCGTCTRCLEACPTGAIVEPYVVDANYCIAYHTIENRQPELPPAIVPKLEGWVAGCDICQEVCPWNQRFAQPTDIEDFAARSPLLDTSLEQLATLSDADWDHLTRGSALRRIKPAQWRRNAQALLANAQRETPSHPY

SEQ ID NO: 81457 - protein, 317 aa, Synechococcus sp.
  REGION 1..317: note = tr|A0A0H3K806|A0A0H3K806_SYNP6 Epoxyqueuosine reductase OS=Synechococcus sp. (strain ATCC 27144 / PCC 6301 / SAUG 1402/1) OX=269084 GN=queG PE=3 SV=1
MVATLAEQIKAEAIALGFDKVEIASVDPPDTEALAALDRWLAQGYQAEMDWMASDRRRDVRNLLPNAQSVICVALNYYSGDHPDPSPEVGKIARYAWGRDYHRVVEKRLKALARWLQTQQPDCECRWYVDSGPIADKVWAQRAGLGWIAKNSNVISREFGSWIFLGELVTTLALPADRPHTAHCGSCSRCLEACPTQAIVEPYVVDANRCIAYHTIENRAADLPAAIAQNLQGWVAGCDICQEVCPWNQRFAQITTLPDLQPRSELLAPALAELATLSEEAWDQQFQGSALRRIKPAMWRRNSRANLRQQSEGNRLS

SEQ ID NO: 81458 - protein, 322 aa, Synechococcus sp.
  REGION 1..322: note = tr|A0A316JPG5|A0A316JPG5_9SYNE Epoxyqueuosine reductase OS=Synechococcus sp. XM-24 OX=1979185 GN=queG; PE = 3 SV=1
MGKRRGDQPKPQPLPAGELASALKAQALELGFNLVGIASARGSERIRLRNAALQRWLSAGHHGEMAWMQDPRRQAIEALLPGVRSVVAVGLNYYVDDQPAPGSLKVARYGWGRDYHRVIDGRLRALGRWLESNQPQSQWRACVDSTPLLDKAWAEEAGLGWIGKHSNLINRDWGSWLLIGHLLTDLELPDDEPATPNCGACRACLDACPTQAITEPFVVDARRCIAFHTIENRADQLPADIASNLNGWVAGCDICQDVCPWNQQALVSSTDPDLQPRPWWLDLQGADALGWSDGAWDEKLRASALRRIKPSMWRRNIAAALG

SEQ ID NO: 81459 - protein, 310 aa, Synechocystis sp.
  REGION 1..310: note = tr|A0A068MYU0|A0A068MYU0_SYNY4 Epoxyqueuosine reductase OS=Synechocystis sp. (strain PCC 6714) OX=1147; GN = queG PE=3 SV=1
MSQTPLEEHIKAQALAIGFHRVGIASVSGTESDLAVQRLENWLALGYNADMAWMANPKRQDIRELLPSAQSVIAVALNYYTSHRRSGDPVHGKISRYAWGRDYHRVLTKKLKALNFWLEQQVPDLLSRYYVDTGPIQDKAWAERAGLGWVGKNGNLISRDYGSWLFLGEIVTNLPLAGDRPHGHHCGTCTRCLEACPTQAIVKPFVVDSNKCIAYHTIENRAETLPTAIANNLQGWVAGCDICQDVCPWNERFAQVTDVEDFHPYPGNLNPDLQALAQINEMDWQKQFTASALRRIKPAMLRRNARANLQ

SEQ ID NO: 81460 - protein, 289 aa, Synechocystis sp.
  REGION 1..289: note = sp|P73526|QUEG_SYNY3 Epoxyqueuosine reductase; OS = Synechocystis sp. (strain PCC 6803 / Kazusa) OX=1111708; GN = queG PE=3 SV=1
MGIAPVSETENDEAAQRLQSWIALGYNADMAWMANPKRQNIRELLPSARSVIAVGLNYYTPHQRSGDPAHGKISRYAWGRDYHRVLTKKLKALNLWLEQQVPDLQSRYYVDTGPIQEKAWAERAGLGWVGKNGNLISRDYGSWLFLGEIVTNITLQGDRPHSQHCGTCTRCLEACPTQAIVEPFVVDSNKCIAYHTIENRAEILPTAIADNLQGWVAGCDICQDVCPWNQRFAQPTDVADFDPYEGNLNPELETLANITEADWQQQFTASALRRIKPAMLRRNAQANLQ

SEQ ID NO: 81461 - protein, 353 aa, unidentified
  source 1..353: note = Synergistaceae bacterium
  REGION 1..353: note = tr|A0A3D3CHL3|A0A3D3CHL3_9BACT PBS lyase; OS = Synergistaceae bacterium OX=2053624 GN=DIC53_08210 PE=4; SV = 1
MKVTDIIKRKGLELGFSHIGITTAEPFIEYAQELLRRPDYAIWADPDRSKYPGRTYLTETATPKNYYPQGTSIICATLGYSQYLYPEELTRHVARAYLCRSYVPQPNDLAGIRVAEYKRFIKSLGIGMYEGECDLPQRAACARAGIITYGKNNFAYTKEDGSFNILFTFLVDTVLDYDEPTVRCDCPESCHKCIDACPSQAIAAPGRLLPRNCAMNNHQLPLGAFPDDLWDKFSTSIHGCDICQLACPRNAAVLKRASRKDPFLETLKDEFDLEKVLFLDEDYYETAIRPIMYNYIRDMDLFRRNAAIAMGNSGNSAYITPLEKALTVYKDKPELLKPIVWALGRLRGEEKSN

SEQ ID NO: 81462 - protein, 235 aa, unidentified
  source 1..235: note = Synergistetes bacterium
  REGION 1..235: note = tr|A0A1V6A3E1|A0A1V6A3E1_9BACT Epoxyqueuosine reductase OS=Synergistetes bacterium ADurb.Bin155; OX = 1852914 GN=queG PE=4 SV=1
MSDDLTLELEKVVREAGGSGCGFSDLSDLQDLPYPGLTRGVTVLLALAPAIIAAIGEGPTRDYHDEYERANKELARIGFEVVRFLEKAGYRAGLIDPTTQEYDEGTLSAPFPHKTAALRAGVGWIGKCDLLVTEEFGSAFRMCTIFTDAPLTPGDPSRESRCGPCTDCVLACPVKAPTGKDWMEGVYRDELVDIFACNRYARKLSADNGWSHVICGICIQACPWTRRYINSRSVP

SEQ ID NO: 81463 - protein, 257 aa, unidentified
  source 1..257: note = Synergistetes bacterium
  REGION 1..257: note = tr|A0A1V5HQF8|A0A1V5HQF8_9BACT Epoxyqueuosine reductase OS=Synergistetes bacterium ADurb.BinA166; OX = 1852916 GN=queG PE=4 SV=1
MNYLTRHATLREQPELLLPGVKTILVAALRHAPTASPGYAAYAAGADYHAVIRTRLQPLADLIRSRAPEARTRIAVDSAPVAERDWAMRCGIGWRGRQGQVLNAEAGAHLLLGEILTTVELPPTPPVENRCGECRLCVDACPTGALQADGTVDARLCRSYWTIEHRGPIPESVRASIGDCLFGCDRCVSICPWNARATAPIPPEFTPRDLPPVEVCLTLDAAGFTERFGDSAVLRTGLDGLQRNARIVMDNQRPTPP

SEQ ID NO: 81464 - protein, 95 aa, unidentified
  source 1..95: note = Syntrophaceae bacterium
  REGION 1..95: note = tr|A0A3D4QZL3|A0A3D4QZL3_9DELT 4Fe-4S ferredoxin-type domain-containing protein OS=Syntrophaceae bacterium OX=2052184 GN=DIW05_00310 PE=4 SV=1
MVTDAVIEADPMLPADPCPPNCTACAKICPSKAFDAEGKFNKMTCLGYTIKHAIYPLALSSEAGLKNIERVINTAGHNYWIGCDECLKVCPLNKG

SEQ ID NO: 81465 - protein, 256 aa, unidentified
  source 1..256: note = Syntrophaceae bacterium
  REGION 1..256: note = tr|A0A1V5ECP3|A0A1V5ECP3_9DELT Epoxyqueuosine reductase OS=Syntrophaceae bacterium PtaU1.Bin231; OX = 1811718 GN=queG_2 PE=4 SV=1
MANSFEDIRKTLLEEGADLVGFADVTAVAAEERRGMPRAISIAAALQPAIVSRIAKGPTQEYFREYGRANSLLSSLAHRAAGLLKERGFAAIALEPTTEEFDAVRLRAGLSHKIAATRSGLGWIGKNALVITKPFGSAVRFTTVLADAPLETGTPLDESRCGTCTACVDVCPAKAPSGKNWRLGTGRDEFFDAHACCRKATEFCKAAGIDSTICGICIEACPWTRKYLKRASRRKGITKNPLFAPLLRSAGRPGNE

SEQ ID NO: 81466 - protein, 326 aa, Syntrophobacter sp.
  REGION 1..326: note = tr|A0A2U3KUU6|A0A2U3KUU6_9DELT Putative Fe-S protein; OS = Syntrophobacter sp. SbD1 OX=2043167 GN=SBDP1_440007; PE = 4 SV=1
MTKSNMGRENMIYSAAEIKKICLDAGADDAGLVELDRESLQNEREGILNIYSLARTVIAVVIANNRENIQSPARYVANEEFHHGGDRTSSISREILRRLNQLGIRGVVVNKGWPMAMDRYPGKIWDVSHKVMAVEAGLGHMGMNRLVLHQKYGSCIGLESILINGVVDEYDRPLKENPCIKCNLCAVVCPTGAITKDRPFDFFACITHTYRDNFAGFQNWVDAMVTSDDMGEYRTHFDDLETALMWQSLMFRIGYRCSYCMAVCPAGEDIKPDYLENKKEHVERVLKPLRDRQERVYVMAGSKAESRARKNPLKEVRIVTGMMRKP

SEQ ID NO: 81467 - protein, 376 aa, unidentified
  source 1..376: note = Syntrophobacterales bacterium
  REGION 1..376: note = tr|A0A2M7BP90|A0A2M7BP90_9DELT Epoxyqueuosine reductase OS=Syntrophobacterales bacterium CG03_land_8_20_14_0_80_58_14 OX=1974100 GN=COS57_00515; PE = 4 SV=1
MVGKREVIEKALECGFEDTGFTTAAPFDAQRAYIEERREDYAWAIRSGLDLIAGTDPKSILPEAKSIIVIMEAYFREAFPPSLERHFGRCYLDDDRMTKGRLAKRVKAFRAFLRENGIHSKVPFHLPHRMAAARAGMGTFGKNCLFYSRKVAAHGSWVLPIALVVDREFEPDEPTIEVGCPDWCKNACMAACPTGALVGPRRINPRRCISYLTYFGGEMTPRELRAPMGLCVYGCDRCQNVCPRNAPWLARELKMNEKAAGMVEDFRLEKLLGMDKAWFTERIWPHMFYMSAADLWRWKMNAARAMGNTLDETYIPHLTLAFRRESDERVKAMAAWALGRIGGPAAKQPLTAFLAKSAGSIRSEILAALEGASRRF

SEQ ID NO: 81468 - protein, 378 aa, unidentified
  source 1..378: note = Syntrophobacterales bacterium
  REGION 1..378: note = tr|A0A1G3UP61|A0A1G3UP61_9DELT PBS lyase; OS = Syntrophobacterales bacterium GWC2_56_13 OX=1802287; GN = A2X96_11860 PE=4 SV=1
MVGKREVIEKARECGFEDTGFTTAAPFDSQRSLLDQRREEYGWAIRSGLDLIAGTDPQTILPGAKSIIVLVDAYFREAFPPSLERHFGRCYLDDDRMTGTRLGKRVKALRVYLRENGIDSKVPFHLPHRLAAARAGLGTFGKNCLFYSRKVAAGGSWVTPIVLVVDREFEPDEPTLEVGCPDWCRNACIAACPTGALKGPRHLDPRRCISYLTYFGEELTPRELRAPMGLCVYGCDRCQNVCPRNAPWLARELTMNRKAEGMVEDFRLENLLHMDKAYFTAKIWQHMFYMSDAGLWRWKANAARAMGNTLDEKYVSELARAFRENGDERTSAMIAWALGRIGGPAAKQVLEAALPGSSSPVREEILAALEGTPATGEC

SEQ ID NO: 81469 - protein, 375 aa, Syntrophomonas sp.
  REGION 1..375: note = tr|A0A3B8HSJ7|A0A3B8HSJ7_9FIRM Epoxyqueuosine reductase OS=Syntrophomonas sp. OX=2053627 GN=DCD98_01940; PE = 4 SV=1
MLTKEQIIGEALRLGFDDVGFTSAEPFDSHKEILLSRLELYDWCIDKGINLIQGTDPQAVWPQCRSIIVLIENYHRQSFPASMLGKFGRCYMDDDRVTKDGVSKRIKAFRSFLRENSIDSRVPFNVPQRLAAARAGLGTFGKNCLFYSRRAARQSSWVSPITVLVDVEFTPDTPTMEVGCPNWCRNACIASCPTGALLGPRKIDPRRCISYLSYYGEDITPLPLREPMGMKVYGCDRCQEVCPRNESWMVQVQELEVNPRAGAIAPHFELRALLHMDVEYYKTHIWPHMFYMEPKDLWRFQMNVARAMGNSRDPVYLPDLIKAFQENNDERVVGMAAWAIGRIGGDEAQRFLKGELNRASGLVREEIEQALQVTV

SEQ ID NO: 81470 - protein, 236 aa, unidentified
  source 1..236: note = Syntrophorhabdaceae bacterium
  REGION 1..236: note = tr|A0A1V5CD89|A0A1V5CD89_9DELT Epoxyqueuosine reductase OS=Syntrophorhabdaceae bacterium PtaU1.Bin034; OX = 1811715 GN=queG_1 PE=4 SV=1
MNEKSMSSSIRNSELKTQNLPLVALLKEMGADVFGIADMARYDREILGLGDDISAKYPFAISFGLLVSRGVLKTLTDGPTLFYLHHYRQVNYRLDMIAYLLAKKLEGMGYDALPLAASQMVDWQNQKGHISHKHIGQAAGIGWIGRNNLLVHPRYGSRVRYNTILTNMPLAPDEPAEFGCGWCTACMSSCPASAIREEPADFDHRGCFAMLQVFKNKRNLGHHICGLCVRACGGKE

SEQ ID NO: 81471 - protein, 303 aa, unidentified
  source 1..303: note = Syntrophorhabdaceae bacterium
  REGION 1..303: note = tr|A0A1V5BRZ6|A0A1V5BRZ6_9DELT Epoxyqueuosine reductase OS=Syntrophorhabdaceae bacterium PtaU1.Bin034; OX = 1811715 GN=queG_2 PE=4 SV=1
MSHLTKDLKEYAYSQGADLCGIARAEDLNETFTPPHRPIDLLPEVKTIVVASLHIPDGALEAQRAGITNYSYNMFGYAYLNREMDFVAYRITRFLERQGYQALPIPARGMHYWEKKKYHGPFSFRHAAVAAGLGNFGWSGIVLTPEFGSRQRFIAILTDAPLTPDPQRENEDNPCEKCYECVKNCPAGAVTKKPWSCVIGGKTHTYGVVEADRCYWVCKGLTTKAWPGAPFNPAVNVEKPENMTGEEKFKAIWEKRDARIRLSEHDEGNYGATLCGRCMIFCSAGRTAMERRLKKPKGNASNG

SEQ ID NO: 81472 - protein, 222 aa, Syntrophorhabdus sp.
  REGION 1..222: note = tr|A0A1V4W835|A0A1V4W835_9DELT Epoxyqueuosine reductase OS=Syntrophorhabdus sp. PtaB.Bin006 OX=1811698; GN = queG PE=4 SV=1
MESNDTWLKEYCEREGLDVFGVGKMAVYEKELVGIDDSVKDRFPFAISFGLVLSKGVIGTVKNGPNVLYLHHYRQANYRLDMVAYLLSKEIEKRGYQAMPFPASQLVDWRNQKGHISHKRVGEITGVGWIGRNNLLIHPLFGARARYNTVLTDMPLTAHEPLRAGCGECRACISVCPAGAIKDDRSEFDHIGCFNMITQLKNKRNLGHHICGICIAVCQGEE

SEQ ID NO: 81473 - protein, 221 aa, Syntrophorhabdus sp.
  REGION 1..221: note = tr|A0A1V5CZE0|A0A1V5CZE0_9DELT Epoxyqueuosine reductase OS=Syntrophorhabdus sp. PtaU1.Bin153 OX=1811705; GN = queG PE=4 SV=1
MESNDTWLKDYCEREGLDVFGVGNMARYDKELVGVDDSVKDRFPFAISFGLVLSKGVIGTVEDGPNVLYLHHYRQANYRLDMVAYLLSKEIEKKGYQAMPFPASQLVDWRNQKGHICHKRVGEISGLGWIGRNNLLVHPLFGARARYNTVLTDMPLTAHEPLQAGCGDCRACISVCPAGAIKDDRSEFDHIGCFNMITQLKNKRNLGHHICGICIAVCQGQ

SEQ ID NO: 81474 - protein, 287 aa, Syntrophus gentianae
  REGION 1..287: note = tr|A0A1H7WEP9|A0A1H7WEP9_9DELT Epoxyqueuosine reductase QueG (Queuosine biosynthesis) OS=Syntrophus gentianae OX=43775 GN=SAMN04489760_10691 PE=4 SV=1
MESKKQNLKEEVLRFCRERDVELVGFAPVERWDAFGEVPPEFRPRALWPFSRTVIVMGLPMLLPIVETTPSVLHKEMYTVVNHKLDTLAYELANFLNGKGYASSFFCRDTYANLKALRSAPFAAFSHVMAAKYAGLGTIGVSHCLLTQAFGPRVRFVSVLTAAELPGDPLLTEELCIKCGACAKCCPKQALVMRKDQVIGDYDKAACLEMHEELVRRRCYPCGICTKVCPIGEDRRLYGGKELQRKYLEEAKALAANPDDPAYASWAHIRKWGSLPEVPSDGKKQQG

SEQ ID NO: 81475 - protein, 227 aa, Syntrophus sp.
  REGION 1..227: note = tr|A0A3C0KPR0|A0A3C0KPR0_9DELT PBS lyase (Fragment); OS = Syntrophus sp. (in: Bacteria) OX=48412 GN=DCG53_02960; PE = 4 SV=1
MSLSEEIKDYALALGYSRVGIATAEPFPLYAQSMEERADDYDWAVDSGLRLERGVDPQDRLPGARSIIVAVYDYVREHFPEELVGKIGRLYQSRSYIEPPTSLGGARVQLMRQFLEGKGMQVGRWFLISSGVPDRLAAVRAGVGEIGRNTFVCAPGIGTFVIIHTFIVDAELEYDTPTNGTHCPPACRLCIEACPTGAIVADFRMNPRRCLTFNHVVNVHGFRNTSP

SEQ ID NO: 81476 - protein, 391 aa, Syntrophus sp.
  REGION 1..391: note = tr|A0A1G3W1S2|A0A1G3W1S2_9DELT PBS lyase (Fragment); OS = Syntrophus sp. RIFOXYC2_FULL_54_9 OX=1802292; GN = A3J94_10080 PE=4 SV=1
MREVSLISATTRDEAQRSIRTFYEAIKKGGYQMPSKQEIIEKAYECGFEDAGFTTAEPFASQRALLDQRREEYGWAIRSGLDLPAGTDPQTILPGAKSIIVVIEAYFREAFPPALERHFGRCYLDDDRMTGNRLGKRIKAFRAYLRDNGIDSKVPFHLPHRLAAARAGLGTFGNNCLFYSRKVAAGGSWVTPIALVVDRSFAPDEPTLDVGCPDWCKNACIAACPTGALKGPRHIDPRRCISYLTYFGRGATPTDLREPMGLCVYGCDRCQNVCPRNSPWLARELPMNRKAAGMVEDFRLEKLLHMDKAFFTEKIWPHMFYMSDADLWRWKSNAARAMGNTRDEAYVPELARAFGESVDERVAAMIAWALGRIGGDSARRALEAFLPGSRS

SEQ ID NO: 81477 - protein, 340 aa, unidentified
  source 1..340: note = Tabrizicola sp.
  REGION 1..340: note = tr|A0A411Z3E5|A0A411Z3E5_9RHOB tRNA epoxyqueuosine(34) reductase QueG OS=Tabrizicola sp. DJC; OX = 2305252 GN=queG PE=4 SV=1
MTDDLKSRLHARALGEGFSAMRVTAPGAVPQVAARLAEFVAQGRHGQMGWMAERMAWRGDPSALWPEARSVIMLAESYAPEENPLPLLEQRDRGVISVYAQGKDYHDLVKRRLKRLGRWLIDQAECQIKVFVDTAPVMEKPLAEAAGLGWQGKHTNLLSRDLGNWFFLGAIFTTLDLAKDAAEVSHCGSCTACLTICPTGAFPAPYQLDARRCISYLTIEHSGPVDEALRGLMGNRIYGCDDCLAVCPWNKFAKAASDIGYAPRHGAPPLAELAVLDDAAFRARFVGSPIKRIGRGRFVRNVLYAIGNSGELALKAVAQGLCDDADVAVADAARWAVTRL

SEQ ID NO: 81478 - protein, 340 aa, unidentified
  source 1..340: note = Tabrizicola sp.
  REGION 1..340: note = tr|A0A4Z0LRL4|A0A4Z0LRL4_9RHOB Epoxyqueuosine reductase OS=Tabrizicola sp. WMC-M-20 OX=2528693 GN=queG; PE = 3 SV=1
MTNDLKSRLHSRALAEGFSAMRVTTPDAIPLAAERLAAFVAQGRHGQMGWMAERMAWRGDPTALWPQARSVIMLAESYAPEENPLPLLELRDRGVISVYAQGKDYHDLVKRRLKRLGRWLIDQAECEIKVFVDTAPVMEKPLAQAAGLGWQGKHTNVLSRDLGNWFFLGAIFTTLELPPDKPEVSHCGSCTACLTICPTGAFPAPYQLDARRCISYLTIEHSGPVDEELRGLMGNRIYGCDDCLAVCPWNKFAKAARDIGYAPRHGAPPLAELAGLDDATFRARFAGSPVKRIGRGRFVRNVLYAIGNSGDAALREVAQGLCGDADSTVADAARWAVARL

SEQ ID NO: 81479 - protein, 353 aa, unidentified
  source 1..353: note = Tahibacter aquaticus
  REGION 1..353: note = tr|A0A4R6YX55|A0A4R6YX55_9GAMM Epoxyqueuosine reductase OS=Tahibacter aquaticus OX=520092 GN=queG PE=3; SV = 1
MDYAELAVAIRRWGAELGFQQVGIAGTELAADETHLLNWLEAGRHGEMDYMQRHGTKRSRPQELQPGTLRVVSVRMDYAPPGIANGWEVLADTSLGYVSRYALGRDYHKLMRNRLQQLADRIAAQIGPFGYRAFVDSAPVLERALARNAGLGWIGKHTCLINRDAGSWFFLGELYTDLPLPLDQAATAHCGSCTRCLDICPTQAIVAPYQVDARRCISYLTIELHGSIPEPLRKPMGNRIYGCDDCQLICPWNKFSEPTAEADFSPRHKLDGAALIDLFAWSEDEFLRRTEGSAIRRIGHERWLRNIAVALGNARDTAGVVAALQSRAAHPSELVREHVQWALQQHATAAPAT

SEQ ID NO: 81480 - protein, 312 aa, unidentified
  source 1..312: note = Taibaiella chishuiensis
  REGION 1..312: note = tr|A0A2P8D1K9|A0A2P8D1K9_9BACT Epoxyqueuosine reductase OS=Taibaiella chishuiensis OX=1434707 GN=queG; PE = 3 SV=1
MNLSTQTTFIKTLSRELGFDYCGIARAQRLDDDARKLEQWLTKGYQGKMGYMENHFDMRVDPTLLVPGAKSVVTLLLNYYPEEQQAEGAPKIAKYAYGTDYHLVIREKMNEFLYRIREKIGQVEGRGFVDSAPVLERSWAVRSGLGWVGKNGNLIHKQTGSFFFIATLIIDLELEYDDPFAKDYCGSCTRCLDACPTGAIVDPTLIDGSRCISYLTIELKDELIAPEFRDKMEGWMFGCDICQDVCPWNRFARPHQQDAFAPIPLLLNLGTAEWEAMDEQFFRTLLKNSPMKRSKWKGIQRNIRFLENPGKI

SEQ ID NO: 81481 - protein, 310 aa, unidentified
  source 1..310: note = Taibaiella soli
  REGION 1..310: note = tr|A0A2W2BCE0|A0A2W2BCE0_9BACT Epoxyqueuosine reductase OS=Taibaiella soli OX=1649169 GN=queG PE=3 SV=1
MSLAEKHSIIIKQEAARLGFESCGIAVAQRLDEDARKLESWLSKGFHGKMQYMENHFDLRVDPRKLVPGAKSVVTLLMNYFPSEEQQRDAPKIAKYSWGIDYHYVIREKLNELLDFIRANIGEVDGRGFVDSAPVLERSWAVRTGLGWVGKNGNLLTKKNGSFFFIATLITDLELQPDAPFTTDHCGSCTRCLDACPTGAIVSPSLVDGSKCISYLTIELKDALIPDEFHSKMDGWMFGCDVCQDVCPWNRFAKPNHEPAFTPVPEILNLSTSQWQEMTDESFRRIFKNSPLKRSKWQGIQRNLQAIKIV

SEQ ID NO: 81482 - protein, 309 aa, unidentified
  source 1..309: note = Taibaiella sp.
  REGION 1..309: note = tr|A0A3N7A5W9|A0A3N7A5W9_9BACT Epoxyqueuosine reductase OS=Taibaiella sp. KBW10 OX=2153357 GN=queG PE=3; SV = 1
MTAAQHTRIVKELSKRLGFDYCGIAKAEQLEDDARHLEAWLHKGYNAGMSYMERNFDLRINPQLLVPGAQSVITLMMNYYPDQKQDTDAPQIAKYAYGHDYHEVIRAKLHEFLFEIQAQIGEVQGRGFVDSAPVLERSWAQRTGLGWIGKNANLINKQSGSFFFLATLIVDLSLEYDDPFAKDFCGTCTKCIDACPTQAIVSPSVIDANKCISYLTIELKDELIPDELSGKFKNWMFGCDICQDVCPWNRFSQPHQQEAFKPIPEILNFSSGDWESLDEDFFKVLLKNSPIKRSKWKGIRRNISFIKTS

SEQ ID NO: 81483 - protein, 356 aa, unidentified
  source 1..356: note = Tamilnaduibacter salinus
  REGION 1..356: note = tr|A0A2U1CUG7|A0A2U1CUG7_9ALTE Epoxyqueuosine reductase OS=Tamilnaduibacter salinus OX=1484056 GN=queG; PE = 3 SV=1
MPTETLDSLPGKIRRWAAELGFQDVGITEADTGDHGDYLQDWLDRGYHGELFFMDAHGDKRYRPEKLMEGTRRVISVRLDYLPAPDNPSHILRDGEKAYVSRYAVGRDYHKLMRKRLAKLSRWIDEELEGHQHRAFVDSAPVMERALAQRAGLGWFGKNTMIIHPRAGSYFFLGEIYTTAPLPVDPPFETEHCGSCSACLDICPTDAFDGPHRLDARRCISYLTIELKGSIPQELRPLMGNRVFGCDDCQLICPWNKFSKPTAEPDFQPRHNLDNADLAELFLWSEETFLDRTAGSAIRRTGYEGWLRNLAVGLGNAPSTIPVIEALKQRAHYPSELVREHVHWALKRHGIDPVTA

SEQ ID NO: 81484 - protein, 356 aa, unidentified
  source 1..356: note = Tamilnaduibacter salinus
  REGION 1..356: note = tr|A0A2A2I5A3|A0A2A2I5A3_9ALTE Epoxyqueuosine reductase OS=Tamilnaduibacter salinus OX=1484056 GN=queG; PE = 3 SV=1
MPTETLDSLPGKIRRWAAELGFQDVGITEADTGDHGDYLQDWLDRGYHGELSFMDAHGDKRYRPEKLMEGTRRVISVRLDYLPAPDNPSHILRDGEKAYVSRYAVGRDYHKLMRKRLAKLSRWIDEELEGHQHRAFVDSAPVMERALAQRAGLGWFGKNTMIIHPRAGSYFFLGEIYTTAPLPVDPPFETEHCGSCSACLDICPTDAFDGPHRLDARRCISYLTIELKGSIPQELRPLMGNRVFGCDDCQLICPWNKFSKPTAEPDFQPRHNLDNTDLAELFLWSEETFLDRTAGSAIRRTGYEGWLRNLAVGLGNAPSTIPVIEALKQRAHYPSELVREHVHWALKRHGIDPVTA

SEQ ID NO: 81485 - protein, 307 aa, unidentified
  source 1..307: note = Tamlana nanhaiensis
  REGION 1..307: note = tr|A0A0D7VZX6|A0A0D7VZX6_9FLAO Epoxyqueuosine reductase OS=Tamlana nanhaiensis OX=1382798 GN=queG PE=3; SV = 1
MNLQSKYSQLIKTEAKRLGFMSCGISKAQFLEEEAPRLEKWLKQNMNGEMRYMENHFDKRLDPTKLVEDSKSVVSLLLNYYPSETQNSDSFKLSKYAYGTDYHFVIKDKLKSLLHYIQEEIGEVHGRAFVDSAPVLDKTWAAKSGLGWIGKNSNLLSQKVGSFFFIAELIIDLELEYDTITTDHCGTCTACIDACPTQAIVEPYVVDGSKCISYFTIELKDNIPSEFKGKFDDWMFGCDVCQDVCPWNRFSKSHNEPLFNPHPELLLMSKKDWEEITEDTFRKVFKNSAVKRTKYAGLTRNIKFLKS

SEQ ID NO: 81486 - protein, 308 aa, unidentified
  source 1..308: note = Tamlana sedimentorum
  REGION 1..308: note = tr|A0A0D7W8Q2|A0A0D7W8Q2_9FLAO Epoxyqueuosine reductase OS=Tamlana sedimentorum OX=1435349 GN=queG PE=3; SV = 1
MVNNKSKYSQLIKSEAKRLGFLSCGISKAAFLEEEAPRLEKWLNKNMNGEMRYMENHFDKRLDPTKLVEDSKSVVSLLLNYYPDKIQNEDSYKLSRYAYGTDYHFVIKDKLKSLLYFIQEEIGEVSGRAFVDSAPVLDKAWAAKSGLGWIGKHSNLLSQKVGSFFFIAELIIDLELDYDTPTTDHCGTCTACIDACPTQAITEPYVVDGSKCISYFTIELKENIPTEFKGKFDDWMFGCDVCQDVCPWNRFSKPHNEPLFNPHPELLSMSKKDWEDITEETFRKVFKNSAVKRTKYSGLTRNIKFLKT

SEQ ID NO: 81487 - protein, 306 aa, Tamlana sp.
  REGION 1..306: note = tr|A0A5C4SET0|A0A5C4SET0_9FLAO Epoxyqueuosine reductase OS=Tamlana sp. CW2-9 OX=2583814 GN=queG PE=3 SV=1
MKSYNHSKFIKTEAKRLGFLSCGISKAQFLEEEAPRLEKWLTNNMHGKMQYMENHFDKRLDPTKLVEGSKSVISLLLNYYPNETQNTDSYKLSKYAYGTDYHFVIKDKLRLFLQSIRDEIGEVNGRAFVDSAPVLDKAWAAKSGLGWIGKHSNLITQQVGSFYFIAELIVDLELEYDPPTTDHCGTCTACIDACPTQAITAPYVVDGSKCISYFTIELKDNLPTAFKDQFDDWMFGCDVCQDVCPWNRFSKPHSEPLFNPNPELLNMTKRDWEDLTQETFSKVFKKSAVKRTKFSGLKRNIDFLKI

SEQ ID NO: 81488 - protein, 311 aa, Tamlana sp.
  REGION 1..311: note = tr|A0A2I7SG36|A0A2I7SG36_9FLAO Epoxyqueuosine reductase OS=Tamlana sp. UJ94 OX=2069432 GN=queG PE=3 SV=1
MLNNKTKYSQFIKTEAKRLGFLSCGISKAEFLEEEAPRLEKWLKNNMNGEMRYMENHFDKRLDPTKLVEGSKSVVSLLLNYYPKDIQTENSYKLSKYAFGTDYHFVIKDKLKDLLHFIQDEIGEVDGRAFVDSAPVLDKAWAAKSGLGWVGKHSNLLTQKVGSFYFIAELIIDLDLEYDARVTDHCGTCTACIDACPTEAITAPYVVDGSKCISYFTIELKENIPSEFQGKFDDWMFGCDVCQDVCPWNRFSKPHNEPLFNPHPELLSMTKKDWEDITAETFQKVFKKSAVKRTKFAGLNRNINFLKDTNL

SEQ ID NO: 81489 - protein, 314 aa, unidentified
  source 1..314: note = Tangfeifania diversioriginum
  REGION 1..314: note = tr|A0A1M6ABW2|A0A1M6ABW2_9BACT Epoxyqueuosine reductase OS=Tangfeifania diversioriginum OX=1168035; GN = queG PE=3 SV=1
MQNQNNISEKIKSKAKELGFLDCVILPATELTEEKEHFQNWLDADMNGKMGYMERNKEKRLNPRLLFENAKSILIVLQNYHTHKTQEDPDAPVISKYAYGTDYHFVMKDKLKSLLQFINNEFGPCNGRPFVDSAPVLERAWARRAGLGWVGKNSNLISVEHGSFFFIGELILDIELPFDQPKIVSDHCGNCTRCIDACPTNAIVDNRVIDARKCISYQTIELRGDLDENLKGQFENRVFGCDICQDVCPWNLKPEPHDEPHLKPAPKLLELTREEWYKMEKPQFNQLFKKSAVKRTGFKGLKRNLEFIQTNTDE

SEQ ID NO: 81490 - protein, 313 aa, Tannerella sp.
  REGION 1..313: note = tr|G9S575|G9S575_9BACT Uncharacterized protein; OS = Tannerella sp. 6_1_58FAA_CT1 OX=665949; GN = HMPREF1033_01911 PE=4 SV=1
MNEFSLKNKIFERAFALGFSACGITPVKEVDADCRLHFDKWLQKGKEARMQYMKNYKDKRFDPRLLVENARSVLVVALNYYPSIHIPENHPQFALYSYGQDYHIVLKEKLNELFSYINTLIPIEGRIFCDTAPVMERYWAQQAGIGFIGKNTQLIIPGKGSFFFLGEIISSLELPWDTPMQNRCGHCNSCIKHCPTQALIPGDFTTLDSNRCISYQTIENRSDIPFEIGSKMNNRVYGCDTCQKVCPWNRFSIPTTIPEFEPSSEFLSLDQEKLEHLTHEDYNRIFKKSAVKRVKYEGLLRNINMLRKNKSES

SEQ ID NO: 81491 - protein, 313 aa, Tannerella sp.
  REGION 1..313: note = tr|R7DHE8|R7DHE8_9BACT Uncharacterized protein; OS = Tannerella sp. CAG:51 OX=1262979 GN=BN686_02455 PE=4; SV = 1
MNEFSLKNKIFERAFALGFSACGITPVKEVDADCRLHFDKWLQKGKEARMQYMRNYKDKRFDPRLLVENARSVLVVALNYYPSIHIPENHPQFALYSYGQDYHIVLKEKLNELFSYINTLTPIEGRIFCDTAPIMERYWAQQAGIGFIGKNTQLIIPGKGSFFFLGEIISSLELPWDTPMQNRCGHCNSCIEHCPTQALIPGDFTTLDSNRCISYQTIENRSDIPFEIGSKMNNRVYGCDTCQKVCPWNRFSIPTTIPEFEPSSEFLSLDQEKLEHLTHEDYNRIFKKSAVKRIKYEGLLRNINILRKNKSES

SEQ ID NO: 81492 - protein, 346 aa, Tanticharoenia sakaeratensis
  REGION 1..346: note = tr|A0A0D6MPW6|A0A0D6MPW6_9PROT Epoxyqueuosine reductase OS=Tanticharoenia sakaeratensis NBRC 103193; OX = 1231623 GN=queG PE=3 SV=1
MPPDLTTRIAEHARDLGFDAVGFCAAELGPEAGDRLREAVELGWHADLSWLAERQEARAQPRALWAEARSVIALGLSYAPDGDPLETLREPSCGNISVYARHRDYHDVMKGMLKHLAQFVVKLAGPDGAQVKVFVDTAPVSEKALAEQARLGWQGKHTNLVSREHGSWLLLGEIYTTLELAPSEPRAGSCGSCSKCLNACPTDAFPAPYRMDARRCISYLTIEHKGPIPHEFRKAIGNHIYGCDDCLSVCPWNRFAVESRHLKLRAREDLIAPTLAELASLDDAGFRAKFSGSPIKRIGRNRFVRNVLIAIGNASDPALLPCAQALMGDPDPVVAEAAVWAAAQYT

SEQ ID NO: 81493 - protein, 411 aa, unidentified
  source 1..411: note = Tardiphaga robiniae
  REGION 1..411: note = tr|A0A164B5N1|A0A164B5N1_9BRAD Epoxyqueuosine reductase OS=Tardiphaga robiniae OX=943830 GN=queG PE=3; SV = 1
MAGGRAGIADLCGSRFLSTSADDERVALPIDLRDRLAREARALGFDSIGITDPDSIAGVRERLQEFLNAGAHGDMEWLADNPNRRADPKVMWQDVRSVIMLGVNYGPDENPLEILKQRSHAAISVYARGDDYHDLIKKRLKLLARWLIAQAGGDVKVFVDTAAVMEKPLAGAAGLGWQGKHTNLVSREFGSWLFLGAIFTTLELPRDARTIDHCGSCQACLDSCPTAAFPAPYKLDARRCISYLTIENKGPIPHEFRKPMGNRIYGCDDCLAACPWNKFAQEGREIKLAARDELRAPSLAELAKLDDAAFRAFFTKSPVKRIGRNRFIRNVLIAIGNSNDLSLVSDAQQLLGDKSPVVRGAAIWALSQLMPADEFAALATQLGDAEKDESVNDEWQLALSSSDVAPSPAAL

SEQ ID NO: 81494 - protein, 411 aa, unidentified
  source 1..411: note = Tardiphaga sp.
  REGION 1..411: note = tr|A0A370QYX7|A0A370QYX7_9BRAD Epoxyqueuosine reductase OS=Tardiphaga sp. CF115 OX=2135486 GN=queG PE=3; SV = 1
MAGGRAGIADLCGSRFLSPSADDDRATLSADLRDRLTREAKALGFDSIGITDPDAIAGVRERLQEFLNAGAHGDMEWLADNPDRRADPKVMWQDVRSVIMLGVNYGPDENPLEILKQRSHAAISVYARGDDYHDLIKKRLKLLARWLIAQAGGEVKVFVDTAAVMEKPLAGAAGLGWQGKHTNLVSREFGSWLFLGAIFTTLELPRDARTIDHCGSCQACLDSCPTSAFPAPYKLDARRCISYLTIENKGPIPHEFRKPMGNRIYGCDDCLAACPWNKFAQEGREIKLAARDELRAPSLAELAKLDDAAFRAFFTKSPVKRIGRNRFIRNVLIAIGNSNDLSLVSDAQQLLGDESPVVRGAAIWALSQLMPADEFAALATQLGDAEKDGSVNDEWQLALNSSDVAPSPAAL

SEQ ID NO: 81495 - protein, 411 aa, unidentified
  source 1..411: note = Tardiphaga sp.
  REGION 1..411: note = tr|A0A420B572|A0A420B572_9BRAD Epoxyqueuosine reductase OS=Tardiphaga sp. YR296 OX=2135488 GN=queG PE=3; SV = 1
MAGGRAGIADLCGSRFLSPSADDAIATLPADLKDTLTREAKALGFDSIGITDPDAIAGVRERLQEFLNAGAHGDMEWLADNPDRRADPKVMWQDVRSVIMLGVNYGPDENPLEILKQRSHAAISVYARGDDYHDLIKKRLKLLARWLIAQAGGDVKVFVDTAAVMEKPLAGAAGLGWQGKHTNLVSREFGSWLFLGAIFTTLELPRDARTIDHCGSCQACLDSCPTSAFPAPYKLDARRCISYLTIENKGPIPHEFRKPMGNRIYGCDDCLAACPWNKFAQEGREIKLAARDELRAPSLAELAKLDDAAFRAFFTKSPVKRIGRNRFIRNVLIAIGNSNDLSLVSDAQQLLGDESPVVRGAAIWALSQLMPADEFAALATQLGDAEKDGSVNDEWQLALSSSGVAPSPVAL

SEQ ID NO: 81496 - protein, 347 aa, Tateyamaria omphalii
  REGION 1..347: note = tr|A0A1P8MYS1|A0A1P8MYS1_9RHOB tRNA epoxyqueuosine(34) reductase QueG OS=Tateyamaria omphalii; OX = 299262 GN=BWR18_17270 PE=4 SV=1
MGLKEKVIGRALDEGFVMARVCLPDAVPEVAGRLEAFVEGGRHGQMGWMAERMHWRGNPAALWPEARSVIMLAESYAPEHDPLAALERPALGAVSVYAQGRDYHDIVKKRLKRLARWLIAEAGGEVKVFVDTAPVPEKALGQAAGLGWQGKHTNLVSREWGNWAFLGSVFTTLELEPDEAEVDHCGSCRACLDVCPTDAFPAPYQLDARRCISYLTIEHKGPVDDALRPALGNRIYGCDDCLAVCPWNKFAVAASDMRYLGAVGAPPLAELAALDDAGFRARFSGSPIKRIGRDRFVRNVAYAIGNSGTIDLLPAVQALVDDPDPAVADAARWAVTQLGATGREQAR

SEQ ID NO: 81497 - protein, 344 aa, Tateyamaria sp.
  REGION 1..344: note = tr|A0A0B4D4Q5|A0A0B4D4Q5_9RHOB Epoxyqueuosine reductase OS=Tateyamaria sp. ANG-S1 OX=1577905; GN = RA29_08440 PE=4 SV=1
MDLKERVIGRALDEGFIMARVCRPDAVPEVAERLEAFVEAGRHGQMGWMAERMHWRGNPAALWPEARSVIMLAESYAPEHDPLAVLERPELGAVSVYAQGRDYHDIVKKRLKRLARWLIAEAGGEVKVFVDTAPVPEKALGQAAGLGWQGKHTNLVSREWGNWAFLGSVFTTLELEPDASEVDHCGSCRACLDVCPTNAFPAPYQLDARRCISYLTIEHKGPVDEALRSGLGNRIYGCDDCLAVCPWNKFAVAASDMRYLGAVGAPPLAELAALDDAGFRARFSGSPIKRIGRDRFVRNVAYAIGNSGLPELVHAAQALVDDADPAVADAARWALTQLGATDRE

SEQ ID NO: 81498 - protein, 366 aa, Telmatospirillum siberiense
  REGION 1..366: note = tr|A0A2N3PPL2|A0A2N3PPL2_9PROT Epoxyqueuosine reductase OS=Telmatospirillum siberiense OX=382514 GN=queG; PE = 3 SV=1
MKEAIRAKALELGFAEARFAPAAPVPGAAPGLAGYLAAGCHGEMAWMAETAERRAQPRALWPEAASVIVLGENYGPGRHPLAALDHPDRGHISVYARGRDYHDVLKKRLKALARWLVERHGGEVKVFSDTAPVMEKPLAAVAGLGWQGRHTNLVSQRFGSWLFLGEVFTTLEIPPDPPEGDHCGRCRACETSCPTGALVEGRIDPRRCVSYLTIEHKGHIPRELRALMGNRIYGCDDCLAVCPWNKFAVPTAHADYLPRAELLAPRLADLASLDDEAFRSFFSASPIKRIGRDRFLRNVLIALGNSTDPAFAPVARRMVGDASPLVRGSAIWALRRLLPIDDFTALRALLAGEESDAAVALEWGEV

SEQ ID NO: 81499 - protein, 308 aa, unidentified
  source 1..308: note = Tenacibaculum caenipelagi
  REGION 1..308: note = tr|A0A4R6TGA6|A0A4R6TGA6_9FLAO Epoxyqueuosine reductase OS=Tenacibaculum caenipelagi OX=1325435 GN=queG; PE = 3 SV=1
MNQKQQYSNFIKTQAKRLGFLGCGIAKADFLEEEAPRLEKWLQNGYHGEMHYMENHFDKRLDPRLLVEGAKSVISLSYNYFPSEVQQEGSYKISKYAYGQDYHHIIKDKLRELLQLINDEIGEVSGRCFVDSAPVLERAWAAKSGLGWNGKHSLLIQKQQGSFFFLAELIIDLELEYDAPFKTDHCGSCTRCIDACPTQAILPNNTVDGSKCISYLTIELKDAIPSGFEGQLQDWMFGCDVCQDVCPWNRFSKPHEESLFTPQESLLDMTKRDWQELTQETFSKVFKKSAVKRTKFSGLSRNIDFLKK

SEQ ID NO: 81500 - protein, 308 aa, Tenacibaculum discolor
  REGION 1..308: note = tr|A0A497ZIP8|A0A497ZIP8_9FLAO Epoxyqueuosine reductase OS=Tenacibaculum discolor OX=361581 GN=queG PE=3; SV = 1
MNKKQQYSNFIKTQAKRLGFLGCGIAKADFLEEEAPRLEKWLQNGYHGEMHYMENHFDKRLDPRLLVDGAKSVISLSYNYFPSEVQEEGSYKISKYAYGQDYHHIIKGKLRELLQLINDEIGEVSGRCFVDSAPVLERAWAQKSGLGWNGKHSLLIQKQQGSFFFLAELIIDLELEYDEPFKTDHCGSCTRCIDACPTQAILPNNTVDGSKCISYLTIELKDAIPSEFKGEMQDWMFGCDVCQDVCPWNRFSQPHEESLFAPQENLLQMNKRDWQELTQETFSKVFKKSAVKRTKFSGLLRNIDFIKQ

SEQ ID NO: 81501 - protein, 308 aa, Tenacibaculum gallaicum
  REGION 1..308: note = tr|A0A3E0ICL4|A0A3E0ICL4_9FLAO Epoxyqueuosine reductase OS=Tenacibaculum gallaicum OX=561505 GN=queG; PE = 3 SV=1
MNRRKQYSSFIKEQAKRLGFLGCGIAKADFLEEEAPRLEEWLQNGYHGEMRYMENHFDKRLDPRLLVDGAKSVISLSYNYFPSEVQEEGSYKISKYAYGQDYHHIIKDKLRELLQLINDEIGEVSGRCFVDSAPVLERAWAEKSGLGWNGKHSLLIQKQQGSFFFLAELIIDLELEYDEPFKTDHCGSCTRCIDACPTQAILPNNTVDGSKCISYLTIELKDAIPSEFKGEMQDWMFGCDVCQDVCPWNRFSQPHEESLFTPQESLLQMTKRDWQELTQETFSKVFKKSAVKRTKFSGILRNIDFIKE

SEQ ID NO: 81502 - protein, 308 aa, unidentified
  source 1..308: note = Tenacibaculum holothuriorum
  REGION 1..308: note = tr|A0A1Y2PAE9|A0A1Y2PAE9_9FLAO Epoxyqueuosine reductase OS=Tenacibaculum holothuriorum OX=1635173; GN = queG PE=3 SV=1
MKIKEQYSQFIKAQAKRLGFLECGIAKADFLEEEAPRLENWLQNNYHGEMRYMENHFDKRLDPRLLVEGAKSVVSLSYNYFPKEVQKNQDYKISKYAYGQDYHHIIKAKLRELLSLINDEIGEVSGRCFVDSAPVLERAWAEKAGLGWNGKHTLLIQKQQGSFFFLAELIIDLELAYDNPFATDHCGKCRRCIDACPTEAILPNNTVDGSKCISYLTIELRDAIPSEFKDKTDNWMFGCDVCQDVCPWNRFSKPHSEPLFAPQEDLLEMTKRDWEEITQETFSKVFKKSAVKRTKYAGLQRNISFLKK

SEQ ID NO: 81503 - protein, 311 aa, Tenacibaculum jejuense
  REGION 1..311: note = tr|A0A238UED4|A0A238UED4_9FLAO Epoxyqueuosine reductase OS=Tenacibaculum jejuense OX=584609 GN=queG PE=3; SV = 1
MKKTAEYSQFIKKEAKRLGFMSCGIAKADFLEEEAPRLETWLKNGFHGEMHYMENHFDKRLDPRLLVEGAKSVISLSYNYFPEEVQNSDSYKLAKYAYGEDYHHVIKNKLFELLESLREEIGEINGRCFVDSAPVMERSWAEKAGLGWNGKHTLLIQKQQGSFFFLAELIIDLELEYDHPFETDHCGKCTRCIDACPTDAILPNNQIDGSKCISYLTIELRDNIPSQFKENMEDWMFGCDICQDVCPWNRFSKPHSEPLFNPKENLLGLEKRDWEELTQETFSKVFKKSAVKRAKFKGLTSTIDFIKKTTP

SEQ ID NO: 81504 - protein, 307 aa, Tenacibaculum litoreum
  REGION 1..307: note = tr|A0A427SG98|A0A427SG98_9FLAO Epoxyqueuosine reductase OS=Tenacibaculum litoreum OX=321269 GN=queG PE=3; SV = 1
MNKKQQYSNFIKTQAKRLGFLGCGIAKADFLEEEAPRLEQWLQNGYHGEMRYMENHFDKRLDPRLLVDGAKSVISLSYNYFPPEVQQEGGYKISKYAYGQDYHHIIKDKLRELLQLINDEIGEVSGRCFVDSAPVLERAWAQKSGLGWNGKHSLLIQKQQGSFFFLAELIIDLELEYDEPFKTDHCGSCTRCIDACPTQAILPNNTVDGSKCISYLTIELKDAIPSEFKGKMQDWMFGCDVCQDVCPWNRFSQPHEESLFTPQENLLQMNKRDWQELTQETFSKVFKKSAVKRTKFSGLLRNIDFIK

SEQ ID NO: 81505 - protein, 308 aa, Tenacibaculum lutimaris
  REGION 1..308: note = tr|A0A420E5A0|A0A420E5A0_9FLAO Epoxyqueuosine reductase OS=Tenacibaculum lutimaris OX=285258 GN=queG; PE = 3 SV=1
MNQKLQYSNFIKEQAKRLGFLGCGIAKADFLEEEAPRLEKWLQNGYHGEMHYMENHFDKRLDPRLLVDGAKSVISLSYNYFPSEVQQEGSYKISKYAYGQDYHHIIKDKLRELLQLINDEIGEVSGRCFVDSAPVMERAWAQKSGLGWNGKHSLLIQKQQGSFFFLAELIIDLELEYDKPFKTDHCGSCTRCIDACPTQAILPNNTVDGSKCISYLTIELKDAIPSEFKGEMQDWMFGCDVCQDVCPWNRFSQPHEESLFAPQENLLQMNKRDWQELTQETFSKVFKKSAVKRTKFSGLLRNIDFIKQ

SEQ ID NO: 81506 - protein, 308 aa, Tenacibaculum maritimum
  REGION 1..308: note = tr|A0A2H1EEB3|A0A2H1EEB3_9FLAO Epoxyqueuosine reductase OS=Tenacibaculum maritimum NCIMB 2154 OX=1349785; GN = queG PE=3 SV=1
MLKKEDYAQFIKEQAKRLGFLDCGIAKATFLEEEAFGLEQWLANGFHGEMHYMENHFDKRLDPRLLVDGAKSVISLSYNYYPPKVQKEDSYKISKYAYGEDYHQVIKTKLRELLSLIHDEIGEVSGRAFVDSAPVLERAWAKKTGLGWTGKNTLLIQKQQGSFFFLAELIIDLELAYDDPFVTDHCGRCTRCIDACPTNAILPNSTVDGSKCISYVTIELKDQIPASFKDKMEGWMFGCDICQDVCPWNRFSKAHSEPLFSPKEHLLEMTKRDWEEVTEETFRKVFKKSPVKRTKFSGLTRNIRFLKE

SEQ ID NO: 81507 - protein, 307 aa, Tenacibaculum mesophilum
  REGION 1..307: note = tr|A0A1M5DG72|A0A1M5DG72_9FLAO Epoxyqueuosine reductase OS=Tenacibaculum mesophilum OX=104268 GN=queG; PE = 3 SV=1
MNKKQQYSNFIKAQAKRLGFLGCGIAKADFLEEEAPRLEQWLQNGYHGEMHYMENHFDKRLDPRLLVDGAKSVISLSYNYFPSEVQQEGSYKISKYAYGQDYHHIIKDKLRELLQLINDEIGEVSGRCFVDSAPVLERAWAKKSGLGWNGKHSLLIQKQQGSFFFLAELIIDLELEYDDPFKTDHCGSCTRCVDACPTQAILPNNTVDGSKCISYLTIELKDAIPSGFKGEMQDWMFGCDVCQDVCPWNRFSQPHKESLFTPQENLLQMTKRDWQELTQETFSKVFKKSAVKRTKFSGLLRNIDFIK

SEQ ID NO: 81508 - protein, 309 aa, Tenacibaculum skagerrakense
  REGION 1..309: note = tr|A0A4R2P2C9|A0A4R2P2C9_9FLAO Epoxyqueuosine reductase OS=Tenacibaculum skagerrakense OX=186571 GN=queG; PE = 3 SV=1
MKKIQQYSNLIKRHAKRLGFLDCGIAKADFLEKEAPRLESWLQNNYHGEMQYMENHFDKRLDPRLLVEGAKSVISLSYNYFPEEHQQKDAYKIAKYAYGEDYHHVIKNKLFELLECLREDIGEINGRCFVDSAPVLERAWAERSGLGWNGKHTLLIQKKQGSFFFLAELIIDLELEYDAPFTTDHCGKCTRCIDACPTEAILPNNNIDASKCISYATIELRDNIPVTFKDKMEDWMFGCDICQDVCPWNRFSKSHNEPLFSPKSPMLEMNKRDWEELTEETFKKVFKKSAVKRTKFTGLTRNINFIKEK

SEQ ID NO: 81509 - protein, 311 aa, Tenacibaculum sp.
  REGION 1..311: note = tr|A0A354GF21|A0A354GF21_9FLAO Epoxyqueuosine reductase OS=Tenacibaculum sp. OX=1906242 GN=queG PE=3 SV=1
MILGGSLKNKYRNFIKEQAKRLGFLSCGIAKAEFLEEEAPRVEKWLKKGYHGKMHYMENHFDKRLDPRLLVEGAKSVISLSYNYFPENQQKSKEYKLSKYAYGQDYHYVIKDKLKELLQLINDEIGEVSGRCFVDSAPVLERSWAERSGLGWNGKNSLLIQKQEGSFFFLAELIVDIELSYDYPFQTDHCGSCTRCIDACPTQAILSNSTVDGSKCISYLTIELKDAIPNEFKNKTEGWMFGCDICQDVCPWNRFSKPHSEPLFNPHKELLEMDTRDWQELTQETFGKIFKKSAVKRTKFSGLQRNIKFLQ

SEQ ID NO: 81510 - protein, 309 aa, Tenacibaculum sp.
  REGION 1..309: note = tr|A0A2K8VFN2|A0A2K8VFN2_9FLAO Epoxyqueuosine reductase OS=Tenacibaculum sp. SZ-18 OX=754423 GN=queG; PE = 3 SV=1
MKKARQFSKLIKKHASYLGFLDCGIAKADFLEKEAPRLETWLQNNYHGQMQYMENHFDKRLDPRLLVEGAKSVISLSYNYYPEQIQEKNSYKVAKYAYGEDYHHVIKSKLFALLEFLREEIGNINGRCFVDSAPVLERAWAERAGLGWNGKHTLLIQKKQGSFFFLAELIIDLELEYDQPFTTDHCGSCTRCIDACPTDAILPNNSIDASKCISYATIELKDNIPLTFKDKMEDWMFGCDICQDVCPWNRFSKPHNQPLFSPKDSMLEMDKRDWQELTEETFKKVFKKSAVKRTKYAGLTRNISFLKEK

SEQ ID NO: 81511 - protein, 297 aa, unidentified
  source 1..297: note = Tenericutes bacterium
  REGION 1..297: note = tr|A0A1V5HR77|A0A1V5HR77_9BACT Epoxyqueuosine reductase OS=Tenericutes bacterium ADurb.BinA124; OX = 1852921 GN=queG PE=4 SV=1
MKRHEQINHPFVGVIAKESYPHQEVFKPYPLVKSVVVALFPYSNQNKLAPKGTYLPAKMFYGRDYHLVVKDKLQEFVVKWELPDAVIGVDTSPLDERLCAYLAGLGTFGDHNLLINPTLGTFFAIGTIMTSAVFHEYQQPIAELCTHCGACLKACPTQALTGGFHKERCLSNLSQKASSDFSLYDLMHHTCYGCDLCQDACFYNSHPDYSLPELAWDGLSVLTWEGFLQLDAKQYFDYYRDKSWSWIAYERMLRNLMVLRHHDQALSEQEVIQLATKTTKPWFLKHLQYLRGQHGKS

SEQ ID NO: 81512 - protein, 311 aa, unidentified; identical to SEQ ID NO: 73966
  source 1..311: note = Tenericutes bacterium
  REGION 1..311: note = tr|A0A1G3X388|A0A1G3X388_9BACT 4Fe-4S ferredoxin-type domain-containing protein OS=Tenericutes bacterium RIFOXYB2_FULL_36_25 OX=1802357 GN=A2308_06755; PE = 4 SV=1

SEQ ID NO: 81513 - protein, 412 aa, unidentified
  source 1..412: note = Tengunoibacter tsumagoiensis
  REGION 1..412: note = tr|A0A401ZWX9|A0A401ZWX9_9CHLR Epoxyqueuosine reductase OS=Tengunoibacter tsumagoiensis OX=2014871; GN = queG PE=4 SV=1
MLETQTIKDYAYSLGFDLVRVTTALPFREANQAIKDRVSRGYFAGLPWFSAERADVSCDPTALLPEAQSIIALGMCYLTEQPDEGGPLQGRISRYAWGEDYHDLIKPKLQQFTTWINEAVQERPGELPGERLETRLFVDTGRMVDRAVAQRAGLGWYGKNTNILTKGWGSWVFLAEIVTNLPLIPDEPLKSNCGNCEICLHACPTGALPHPYELDSTRCISFLTIELKGSIPIELRPLMGNLIFGCDICQEVCPVNQVAERRLGLRDEQGAPLIGLTTIKRRSTDKPAFQGRTEFQTRPPIGTTPELIPLLALTEEEFRLRFRHSPIKRTKRRGFLRNVCVALGNSGDRSAVPALRLALQDEEPLIRGHAAWALGRLGGDEALQALQAAMAQEADQEVRQEVRYALSLLNAL

SEQ ID NO: 81514 - protein, 379 aa, Tenuibacillus multivorans
  REGION 1..379: note = tr|A0A1H0ETZ6|A0A1H0ETZ6_9BACI Epoxyqueuosine reductase OS=Tenuibacillus multivorans OX=237069 GN=queG; PE = 3 SV=1
MNVQQLKEELIAYSKEIGIQKIGFASTDTFETLKQRLVVQQSLKFQSGFEKGSIDERTTPTQLMPKAQSIISIALAYPSRMKDAPKSKKSDRRGIFARASWGKDYHDVLREKLNLLGEFLQEKMDGVAYKAMVDTGELSDRAVAERAGVGFVGKNCALITEEYGSWVYLGELVTNLPFEPDEPIEEGCGDCNICVDACPTGALVQGGQLNAQRCIAYQSITKSFLPDEFRTKLGNRLYGCDTCQLVCPKNKGMDFHLHPEMEPDPELAKPKLVPLLTISNREFKERFGYMAGSWRGKKPIQRNTIVALAHYKDETAVDTLADLMVNDPRTVIRGTAAWAIGKIGREDAHEMIGQAKEHEEDEDVLYEMEKGLEFLSQHI

SEQ ID NO: 81515 - protein, 395 aa, Tepidamorphus gemmatus
  REGION 1..395: note = tr|A0A4R3M706|A0A4R3M706_9RHIZ Epoxyqueuosine reductase OS=Tepidamorphus gemmatus OX=747076 GN=queG PE=3; SV = 1
MSISTSEHRGYAAQRLKSALIDAALAAGFDIVRVTAPDAAPMAGPRLRAFLDAGQHGDMDWMAATADRRSEPRALWPEVRSVVMLGMNYGPQADPLEGLAQRDRGLISVYARGDDYHDVIKGRLKTVAGAFAARAGAEVKVFVDTAPVMEKPLAEAAGIGWQGKHTNLVSRRFGSWLFLGAIFTTAELPRDGSERDHCGSCRACLDICPTDAFPAPYRLDARRCISYLTIELKGPIPHPLRPAIGNRIYGCDDCLAVCPWNKFAQAGREARLAARAELDLPSLAELAKLDDAAFRSLFRKSPVKRIGRDRFVRNVMIAIGNSGDPALTACLIERLDDAAALVRGAAVWALSRLAETGQFAALAARHGAAEGDPDVRAEWRRGLTAGAESRSKCAS

SEQ ID NO: 81516 - protein, 344 aa, unidentified
  source 1..344: note = Tepidanaerobacter acetatoxydans
  REGION 1..344: note = tr|F4LWE2|F4LWE2_TEPAE Uncharacterized protein; OS = Tepidanaerobacter acetatoxydans (strain DSM 21804 / JCM 16047 / Re1) OX=1209989 GN=TEPIRE1_1723 PE=4 SV=1
MDIKQDIIYFSKEIGLDKVGFTTAKPFLQEKEVLLERKAKNLISPFEEQDIEIRCDPEKSLPGAKTIICFAMGYLIYSQSSLEAVSSHIESRSEGKISRYAQVKDYHVILSEKLRHVVDFISKKRPGRFKIIVDTGSLIEKAAARRAGLGWIGENTCFFTPELGSWIFLGEILTDIEIEPDSHIESNCNGCGSCVSACPTGALMAPFQINPYRCLSYITQIRGHIPEEFRKALGDRVFGCDTCQEVCPCNQKVKIPNHKEFIPDIPAERDLEKLAILSKQDFNMMFNNIAAGWRGRNVIRRNAVCALGNLRSENTRNLLKVLTKDPSEIVREQARWSLQNYLCR

SEQ ID NO: 81517 - protein, 342 aa, Tepidanaerobacter syntrophicus
  REGION 1..342: note = tr|A0A0U9HGL3|A0A0U9HGL3_9THEO Epoxyqueuosine reductase OS=Tepidanaerobacter syntrophicus OX=224999; GN = TSYNT_9193 PE=4 SV=1
MNLKSEIIRFSKEIGIDKVGFASADPFLKEKEILQERKRKQLISPFEEQDMEARCNPQRLLDGAKTIICFAIGYLIEPSVKKEFSSVDIPEGEISKYAQIKDYHNVLNEKLIRIADFISEKEPGKFKIMVDTGALIERAAAARAGIGWIGENTCLFTPEFGSWVFVGEILTDIEIESDDPAETYCDKCGRCIAVCPTGALIEPFKLNPHKCLSYITQMRGQIPKEFRETLGNMIFGCDICQDVCPYNKDVNIPNHQEFFPDVPLEKNLEKLAILSKQDFIRMFKPTAAGWRGRNIIRRNAICALGNIRYKGAIKTLEYLTTDPSEIIREQASWSLRQIIQSV

SEQ ID NO: 81518 - protein, 381 aa, unidentified
  source 1..381: note = Tepidibacillus decaturensis
  REGION 1..381: note = tr|A0A135L1N7|A0A135L1N7_9BACI Epoxyqueuosine reductase OS=Tepidibacillus decaturensis OX=1413211; GN = U473_01090 PE=4 SV=1
MNEKLKQKVIDYAQQIGIDKIGFTSAEPFRELEKILHRHRELGYESGFEEKDIDKRVNPKFTLKNAKSIIAIAIAYPSKIPQPPKGVEGEYRGFVARLAWGIDYHLILQEKLNQLGIYLKQMVPDAEYVAMTDTGVLSDHAVAERAGIGWIGKNSLLITPEFGSYVYLGEMITNISFPEDHPMENQCGDCTRCLDACPTQAIVQAGQVNAKRCLSYITQRKDMLEEELMEKLGNRLYGCDTCQIVCPKNKGINFGHQEKTLPNPELAKPLLKPLLTISNKEFKETWRQTAAAWRGKKPIQRNVIIALAHFKDKTALPLLKDLLINDERPVIRQTSAWSLGKIGGKEVEEILLQAKIKEKDDKVLQEIIRSLNKLANEGILS

SEQ ID NO: 81519 - protein, 386 aa, unidentified
  source 1..386: note = Tepidibacillus fermentans
  REGION 1..386: note = tr|A0A4R3KJ45|A0A4R3KJ45_9BACI Epoxyqueuosine reductase OS=Tepidibacillus fermentans OX=1281767; GN = EDD72_104170 PE=4 SV=1
MNQELKKQLIKYAKKIGIDKIGFTSADPFPELKEILIRHRELGYESGFEEKDLEKRTDPKLSLSDAKSMIAIAIAYPSKIETPPKSTKGEYRGFVSRSAWGIDYHLILHKKLNHLGQFLKELVPSAEYVVMSDTGALSDHAVAERAGIGWIGKNSLLITPEFGSYVYLGQIITNIFFPEDHPMENQCGDCTRCIDACPTQAIVNPYQVNAKQCLSFITQRKDMLEEHWMEKLGNRIYGCDTCQIVCPKNKGINPIHQELTLPNPELAKPLLKPLLTISNKEFKQTWGQTAAAWRGKKPLQRNAIIGLAHFKDESSLPLLKKILEEDERPMIRQTTAWAIGKIGGEKAKEILESAKFKEKDGKVFNQIIKSLKSLANEDILDSPCKK

SEQ ID NO: 81520 - protein, 296 aa, Tepidibacter formicigenes
  REGION 1..296: note = tr|A0A1M6N476|A0A1M6N476_9FIRM Epoxyqueuosine reductase OS=Tepidibacter formicigenes DSM 15518; OX = 1123349 GN=SAMN02744037_01151 PE=4 SV=1
MKKKLKDFCKSLGIENVGIAHIGPYKELEEILKDRINKGYYTGLEEEDIKKRVDPRITMENVKSIIVCLFPYFSGNVKKTNISKYTYSIDYHIIVKNKLENICSYLKDNINDFEYKIFVDTGPLVDRYLAKISGVGYFGINNNIITDKYGSYVSIGYILSNYPFEIDKPIDKTCIKCGLCIKKCPGGAILGNFEINPNKCLSFVTQKKGELSQEEKEMFIKNPSVFGCDICQDVCPHNKRVEVTNIEEFKNDLIYKLEYEEIKNISNREFKRRYGNRAFSWRGKSIILRNLEIINS

SEQ ID NO: 81521 - protein, 392 aa, Tepidibacter formicigenes
  REGION 1..392: note = tr|A0A1M6Q642|A0A1M6Q642_9FIRM Epoxyqueuosine reductase QueG (Queuosine biosynthesis) OS=Tepidibacter formicigenes DSM 15518 OX=1123349 GN=SAMN02744037_01751; PE = 4 SV =1
MKKSKDEIITYDDLVRKWNDEKKQMIEQTSEDRIYRWNPDGMYNIYENTGKAITDNNPYVNLVDIEEFDLIIENEPYPVAPPPMNKGKNKEKSKSAKFFGLMHKEITGDSMYYIKDQRISMERIENEAKGINIPKPAKEKEKDLLKVKKEIFEYAKSLGFASVGVTKVDRRYVSMGVDDEIIFDTIILLGYEMPKDVMKHYPNPKGELGAFGAYTGCARNVHKVADFIRTKGYDCRARGWDGSIKYSPHAVNAGLGNYSTYGVCVTPEAGTRLKYCSILIDAELPLDKPKDFNIEEFCSRCRMCQKSCPSNSIPKEEKKYKGSIKRQTRFSTCLELMTTQKECLKCVRVCPFSMIGYEQCMESLPQYYMYNLERDELDKGFLLSKKEGEHNE

SEQ ID NO: 81522 - protein, 297 aa, Tepidibacter thalassicus
  REGION 1..297: note = tr|A0A1M5RQE2|A0A1M5RQE2_9FIRM Epoxyqueuosine reductase OS=Tepidibacter thalassicus DSM 15285 OX=1123350; GN = SAMN02744040_01464 PE=4 SV=1
MKEKLKYFCKNHLNIESVGIAHIGPYKELEEILKDRIDKGYYTGLEEKDIKKRVDPRITMENVKSIVVCLFPYFSGNVKKSNISKYTYSIDYHIIIKNKLEYICEFLKNNIDNFEYKVFVDNGPLVDRYLANISGLGYFGINNNIITEKYGSYVCIGYILCNYPFEADNPIDKTCIKCGLCIEKCPGGAILGNFEINPNKCLSFITQKKGELSKEEKEMFVKNPSVFGCDVCQDVCPHNKNVEFTNIEEFKSNLIYNLDYDEIKNISNREFKRRYNDRAFSWRGKSVILRNLEIIKG

SEQ ID NO: 81523 - protein, 388 aa, unidentified
  source 1..388: note = Tepidicaulis marinus
  REGION 1..388: note = tr|A0A081BBE4|A0A081BBE4_9RHIZ Epoxyqueuosine reductase OS=Tepidicaulis marinus OX=1333998 GN=queG PE=3; SV = 1
MTTPARPETTEEMTGEKSAELVRRIGEAAREAGFDAVRLVRAVDVPDRTEFLRGWVGAGRHGEMGWMEETAARRGHPSSLWPDVKSIIVLGQNYGPEENPLPDLEKKEQGTVSVYARHKDYHDLIKKRLKRIARWLVAETGCELKVFVDTAPVMEKPLAEAAGLGWQGKHTNLVSREFGSWLFLGSIFTTLDLPADAPEKDHCGSCRACLDICPTKAFPAPYELDARRCISYLTIEHKGSIPLEFRKAMGNRIYGCDDCLAACPWNKFAAQTGEVAFHPRGALKAPLLSELMELDDAAFREMFSGSPVKRIGRNRFLRNVLIAAGNSGAPSLLAPVRARLEDDASEVRAMAVWALGELAPAEEIKTLKARYLPHEREEAVRAEWARLD

SEQ ID NO: 81524 - protein, 367 aa, Tepidicella xavieri
  REGION 1..367: note = tr|A0A4R6UDC2|A0A4R6UDC2_9BURK Epoxyqueuosine reductase OS=Tepidicella xavieri OX=360241 GN=queG PE=3; SV = 1
MFDGVQFVSQIRAWARELGFSQIGVAGVDLRDAEPGLLAWLQAGFHGEMAYMASHGLKRARPQELLPGTLSVVTASMDYLPRQRGSDWCEQEWARLRRPQEAVISMYARGRDYHKVLRQRLQKLAERMQQALDAQRQGDGFTYRAFTDSAPVMEVELAQRSGIGWRGKHTLALRRDGGSLFFLGEIFVNVALPPTPAVSAHCGSCSACLTACPTGALVGPYRLDARRCISYLTIEHAGPIPLALRPLMGNRIYGCDDCQLACPWNKFARRSPLSDFDERAGFSGALLVEYLSWTEAEFLRRTEGSPIRRIGHERWLRNVAVALGNALASGLPAAEQAQALAALHARASHPSPLVREHVCWAMAQAGR

SEQ ID NO: 81525 - protein, 372 aa, Tepidimicrobium xylanilyticum
  REGION 1..372: note = tr|A0A1H2ZYR8|A0A1H2ZYR8_9FIRM Epoxyqueuosine reductase OS=Tepidimicrobium xylanilyticum OX=1123352; GN = SAMN05660923_01918 PE=4 SV=1
MNLKQFIVDKSKALNIDLIGFTDCEPLFDLEDYLVLRQRKSMETEFEEKDLKKRINPKLIFPACKTIIVIGLSYNVDYNENPDYDLKGILSKSSWGLDYHRVLKDKFEQLIAEIKRIKDFEYKYYVDTGPLIDRELANRAGIGYYGKNCSIINDEYGSFIFIGYMLTNLELDVEHSKKESKCGNCSLCIDYCPTKALERPYRVNPKKCISYLTQTKNWIPYELRDKMGVKIYGCDTCQKVCPKNNGVKKSYHEEFIPWTTMGYINIEELLCISNKQFKARYGDMAGSWRGKNILKRNGIIALANMKDKGNIKLLEPLLKDPNPMIRECAAWAIQKLDCNYGKAVIEKRIRIENDEDTKKKMRNLLNNFLTNL

SEQ ID NO: 81526 - protein, 379 aa, unidentified
  source 1..379: note = Tepidimonas alkaliphilus
  REGION 1..379: note = tr|A0A554WA24|A0A554WA24_9BURK Epoxyqueuosine reductase OS=Tepidimonas alkaliphilus OX=2588942 GN=queG; PE = 3 SV=1
MEQPAPATPQPAAAAQLWQRLRGWARELGFSQIGVADIDLSRAEPGLLAWLREGHHGTMDYMARHGLKRARPAELVPGTVSVITARMDYLPRTAPPDWREREWARLRQPHEAVVSLYARGRDYHKVLRRRLQTLAERLQSAWAELEPRQPAPTCRVFADSAPVLEVELAARSGLGWRGKHTLLLSRQAGSMFFLGEIFIDRWLPRTLPESPHCGRCRACLEVCPTQAIVAPYRLDARRCISYLTIEHAGSIPPALRPLIGNRIYGCDDCQLVCPWNKFAQRSALPDFDPRHQLDRATLLELWSWTAADFAQRTEGSAIRRIGYERWRRNLAVALGNARRAAQAGGAATAADAIAQALRVALQEGGDTPMVREHILWALD

SEQ ID NO: 81527 - protein, 378 aa, Tepidimonas aquatica
  REGION 1..378: note = tr|A0A554WVK7|A0A554WVK7_9BURK Epoxyqueuosine reductase OS=Tepidimonas aquatica OX=247482 GN=queG PE=3; SV = 1
MDRAAPTPPADAAHDWLARIEGWARELGFSQIGVADVDLSSAEPGLQAWLAAGYHGTMDYMARHGLKRARPAELVPGTVSVITARMDYLPRSAASDWRAVEWARLHDGRQACVSLYARGRDYHKVLRQRLQRLAQRLQQAWADAYPDDAPLAYRVFTDSAPVLEVELARRSGLGWRGKHTLLLSRQAGSMFFLGEIFIDRWLPRSAPTDGHCGRCRACLDVCPTGAIVAPYRLDARRCLSYLTIEHAGAIPVELRPALGNRIYGCDDCQLVCPWNKFAQRSPLPDFDARPALADATLLQLWAWDATAFECHTEGSPIRRIGYARWRRNLAVALGNARRSALQRGDGGYAQAVQQALHDALRHGGDDALVREHIVWALG

SEQ ID NO: 81528 - protein, 364 aa, unidentified
  source 1..364: note = Tepidimonas fonticaldi
  REGION 1..364: note = tr|A0A1A6DSL5|A0A1A6DSL5_9BURK Epoxyqueuosine reductase OS=Tepidimonas fonticaldi OX=1101373 GN=queG; PE = 3 SV=1
MVERIRGWAHALGFSQIGVSGVDLSSAEPGLQAWLAAGFHGGMAYMARHGLRRARPAELVPGTLSVITARMDYLPRGAPPDWRDREWARLADPDAATVSLYARGRDYHKVLRRRLQQLAQRIEAELAGPAGGDARPVLRPFTDSAPVLEVELASRSGLGWRGKHTLALHRDAGSMFFLGEIFIDRALPPTPPVAAHCGRCRACLDVCPTGAIAAPYRLDARRCISYLTIEHDGPIPVPLRRALGNRIYGCDDCQLVCPWNKYARRSPLPDFDAREALAAPRLLDLWAWSEADFLRHTEGSAIRRIGYERWRRNLAVALGNARAAARARGDGAAQAALAAALATARDDPATPPLVREHIDWALLD

SEQ ID NO: 81529 - protein, 396 aa, unidentified
  source 1..396: note = Tepidimonas fonticaldi
  REGION 1..396: note = tr|A0A554XPL5|A0A554XPL5_9BURK Epoxyqueuosine reductase OS=Tepidimonas fonticaldi OX=1101373 GN=queG; PE = 3 SV=1
MDFLQWRGMQPPPALGPQPDLPSEPAGASGEGLVERIRGWAHALGFSQIGVSGVDLSSAEPGLQAWLAAGFHGGMAYMARHGLRRARPAELVPGTLSIITARMDYLPRGAPPDWRDREWARLADPDAATVSLYARGRDYHKVLRRRLQQLAQRIEAELAGPAGGDARPVLRPFTDSAPVLEVELASRSGLGWRGKHTLALHRDAGSMFFLGEIFIDRALPPTPPVAAHCGRCRACLDVCPTGAIAAPYRLDARRCISYLTIEHDGPIPVPLRRALGNRIYGCDDCQLVCPWNKYARRSPLPDFDAREALAAPRLLDLWAWSEADFLRHTEGSAIRRIGYERWRRNLAVALGNARAAARARGDGAAQAALAAALATARDDPATPPLVREHIDWALLD

SEQ ID NO: 81530 - protein, 378 aa, Tepidimonas ignava
  REGION 1..378: note = tr|A0A4R3LIW8|A0A4R3LIW8_9BURK Epoxyqueuosine reductase OS=Tepidimonas ignava OX=114249 GN=queG PE=3 SV=1
MDRAAPTPPADAAPDWLARLGAWARELGFSQIGVADVDLSSAEPGLLAWLAAGHHGTMAYMARHGLKRARPAELVPGTVSVITACMDYLPPGGRDDWRAAEWARLHDARQACVSLYARGRDYHKVLRQRLQRLAQRLQQAWAAAYPDQAALAYRVFTDSAPVLEVELARRSGLGWRGKHTLLLSRQAGSMFFLGEIFIDRWLPRTAPTDGHCGRCRACLDVCPTGAIVAPYRLDARRCLSYLTIEHAGAIPVELRPALGNRIYGCDDCQLVCPWNKYARRSPLPDFEPRPALADATLLQLWAWDAAAFERHTEGSPIRRIGYARWRRNLAVALGNARRAALARGDTGHAQAVQQALQQALAQGDDDPLVREHIAWALG

SEQ ID NO: 81531 - protein, 379 aa, unidentified
  source 1..379: note = Tepidimonas sediminis
  REGION 1..379: note = tr|A0A554WPB1|A0A554WPB1_9BURK Epoxyqueuosine reductase OS=Tepidimonas sediminis OX=2588941 GN=queG PE=3; SV = 1
MEPPPPGSLEAAAAHALLRRLRGWAQELGFSQIGVAGIDLQDAEAGLLAWLREGCHGTMDYMARHGCKRARPAELVPGTVSIITARMDYLPAAAAPDWRAREWGRLHDPQAAVVSLYARGRDYHKVLRQRLQKLAERLRAAWVELQPHAPPPACRVFTDSAPVLEVELAARSGLGWRGKHTLLLSRQAGSTFFLGEIFIDRWLPRTPSESSRCGRCRACLDACPTQAIVAPYRLDARRCISYLTIEHAGPIPPALRPLIGNRIYGCDDCQLACPWNKFARRSALPDFEPRHALDAATLLELWRWDTAAFERRTEGSAIRRIGHERWRRNLAVALGNARRALMASGDQATAQAVAHALVAALQTGADTPLVREHVAWALG

SEQ ID NO: 81532 - protein, 391 aa, Tepidimonas sp.
  REGION 1..391: note = tr|A0A554X7L6|A0A554X7L6_9BURK Epoxyqueuosine reductase OS=Tepidimonas sp. SPSP-6 OX=2267262 GN=queG; PE = 3 SV=1
MQACTRPESAATANADAVAHHPDVREGAALLQHIRQWARALGFSQIGVADVDLSSAEPALQAWLQAGFHGDMDYMARHGMRRARPAELVPGTLSVITARLDYLPRDAPPDWRAREWARVADPDAAVVSLYARGRDYHKVLRQRLQRLADRIEAALTEAGSPPPRQRPFTDSAPVWETELAARSGLGWRGRHTLVLHRAAGSLFFLGEIFIDRWLPRTAATSAHCGQCRACLDICPTQAIVAPYRLDARRCISYLTIEHPGPIPEPLRPALGNRIYGCDDCQLICPWNKYAQRSTLPDFDERAPFQAPRLLTLWAWSEAAFLHHTEGSAIRRIGYLRWRRNLAVALGNARRAARMRGDADTAAAIAVALQAVWDDAATPALVREHIAWALAQ

SEQ ID NO: 81533 - protein, 399 aa, Tepidimonas taiwanensis
  REGION 1..399: note = tr|A0A554X6S3|A0A554X6S3_9BURK Epoxyqueuosine reductase OS=Tepidimonas taiwanensis OX=307486 GN=queG; PE = 3 SV=1
MATAAPTPPRAAGAGGAIAAKVPGTPPTTASHIPLLDRIRAWARDLGFSQIGVSGVDLASAEPGLLAWLAAGFHGQMDYMARHGLRRARPAELVPGTVSVITVRMDYLPRNAPPDWRAREWARLGDPHAATVSLYARGRDYHKVLRQRLQRLAERIDAALRAEDPAGPPLGYRVFTDSAPVLEVELAARAGLGWRGKHTLLLQRDAGSMFFLGEIYVDRALPPTPPAPAHCGRCRACLDVCPTQAIVAPYRLDARRCISYLTIEHDGPIPPALRRAIGNRIYGCDDCQLVCPWNKYARRSALSDFDVRAPFAAPRLLALWAWDEADFLRHTEGSAIRRIGYGRWRRNLAVALGNARAAARDSGDTAAAAAIAAALAPARDDPATPPLVREHVAWALEAP

SEQ ID NO: 81534 - protein, 152 aa, Tepidimonas thermarum
  REGION 1..152: note = tr|A0A554X9A7|A0A554X9A7_9BURK Epoxyqueuosine reductase OS=Tepidimonas thermarum OX=335431 GN=queG PE=4; SV = 1
MAPYRLDARRCISYVTIEHDGPIPEPLRRPMGNRIYGCDDCQLVCPWNKYARRSPLPDFDARAPLAAPRLLELWAWTEADFERLTEGSAIRRIGYARWRRNLAVALGNARAAARARGDTASAAAITAALASACNDPDPTGWVREHIVWALEG

SEQ ID NO: 81535 - protein, 351 aa, unidentified
  source 1..351: note = Tepidiphilus thermophilus
  REGION 1..351: note = tr|A0A0K6IV70|A0A0K6IV70_9PROT Epoxyqueuosine reductase OS=Tepidiphilus thermophilus OX=876478 GN=queG; PE = 3 SV=1
MEPIDWAVRKRAIAEAAARLGFSAMRVVEPDLSACEAGLLAWLEAGFHGEMDYMRRHGLLRARPAELVPGTVRVISLRFPYWPADAAPAQEVLADPGLGYVSRYALGRDYHKAVRARLARLVAFMEAMGPHRGRVFVDSAPVMEVALAERAGLGWRGKHTLLLNREEGSFFFLGEIFTDWPLPVDAPIEAHCGRCTRCLDLCPTRAIVAPYRLDARRCISYLTIEHPGPIPEVLRPAIGNRIYGCDDCQLVCPWNRFARRVDLPEFTPRHGLDAPMLTSLFAWSEGEFLEKFAGSPIRRIGWERWLRNLAVALGNAPTSPEVVAALMARREHPSALVREHVAWALARHGVS

SEQ ID NO: 81536 - protein, 382 aa, unidentified
  source 1..382: note = Terasakiispira papahanaumokuakeensis
  REGION 1..382: note = tr|A0A1E2V5Y1|A0A1E2V5Y1_9GAMM Epoxyqueuosine reductase OS=Terasakiispira papahanaumokuakeensis; OX = 197479 GN=queG PE=3 SV=1
MTQTLSSTQAHALAQEIKTWARELGFSDCGISDIDLDEHETYLERWLAAGYHGEMAWMAHHGHKRSRPDELVPGTLRIISLRLDYLPPEVETTQLLSQPQKAYISRYALGRDYHKLMRKRIAQLAQQIESVAGPYGYRAFVDSAPVLERAVATKAGLGWIGKNAMLIHPKAGSMFFLGELYTDLPLPADSPYPKDHCGKCNACQTGCPTDAFVDDKVLDARRCISYLTIELKSAIPEALRPLMGNRVFGCDDCQLVCPWTRFTRITQEADFHPRHDLDRRDLLDLFLWDEATFLSRTEGSAIRRIGYERWLRNLAVGLGNAPYDPDIVEALTQRLDYPSELVAEHIQWALQQQSHKQSAGLKRIPTEFIPTVSAPSITTKHR

SEQ ID NO: 81537 - protein, 383 aa, Teredinibacter sp.
  REGION 1..383: note = tr|A0A509DT66|A0A509DT66_9GAMM Epoxyqueuosine reductase OS=Teredinibacter sp. ISS155 OX=2584524 GN=queG; PE = 3 SV=1
MTSEAYQSQNIVMAAQNDFTELRNLLNNWAQDLGFQQVGITETGLDEDLVRFREWLAKGYHGSMQWMQENAALREDPSLLVPGAVRVISLRMNYLPDDTHPIKILKSSEKAYISRYSLGRDYHKLIRKRLAQLAKQLEAYCTDNQLFGDAQQRAFVDSAPVLERPYAEKAGLGSTGKHTLIINRDAGSWFFLGEIITNIPLPVDKASKEDLCGECDACLKVCPTDAFPKPYQLDARRCISYLTIENKDAIPLEFREPIGNRVFGCDDCQAICPWNKQAPTTAETDFQPRHELDSSDLLRLFLWSEDEFLKFTEGSAIRRIGYERWLRNLSVGLGNAPKSEKIIEALKMRLASAEGMLHEHFSWALDRQLHFKGMRKRKIKRKP

SEQ ID NO: 81538 - protein, 392 aa, Teredinibacter turnerae
  REGION 1..392: note = tr|C5BRI3|C5BRI3_TERTT Epoxyqueuosine reductase; OS = Teredinibacter turnerae (strain ATCC 39867 / T7901); OX = 377629 GN=queG PE=3 SV=1
MTYISPQNQKTVTALDQTQLNALAELIQLWGREQGFQQIAITDTDLDAEQSRLESWLDKGYHGSMQWLAEHREMRTKPDQLVPGARRVISARMDYLPPDTDQIKVLKSADQAYISRYSLGRDYHKLIRKRLAKIADNIRQHCDAVGIEQRPFVDSAPVMERPLAQKAGLGWVGKHTLLLNPHAGSWFFLGEIFTNLPLPVNNQRHKDQCGTCQACLQICPTDAFPKPYELDARRCISYLTIENKGPIPEEYREPIGNRVFGCDDCQAICPWNKFAKPTCEKDFHPRHGLQNSRLIDLFLWDERTFLKHTEGSAIRRIGYERWLRNLAVGLGNANPSVEVIAALQKKKEVGVSPLVEEHIDWAIHRQQNPRRRRRKIKRTSDTLPVRSAFYSQ

SEQ ID NO: 81539 - protein, 392 aa, unidentified
  source 1..392: note = Terrabacteria group
  REGION 1..392: note = tr|A0A537LIU3|A0A537LIU3_9BACT tRNA epoxyqueuosine(34) reductase QueG OS=Terrabacteria group bacterium ANGP1 OX=2569760 GN=queG PE=4 SV=1
MACGTCSTHACRPDRLTLMDRQLSLDVKACARGLGFDLVGITTADPLPEDGARMAQWVAAGMHGEMDYMSRHMPTAAHPAHVAAGARSIVVVGLAYHWDASEPPSGSLRGRISSYARGTDYHAVMERKLADLSRFLIGRGAGLARYYVDTGPLLDRAVAHRAGLGWFGKNTMLITKAGYGSYVFLGEVLTDLELQPDQPAEGSCGRCRLCLDQCPTGAIVAPFVVDARRCISYLTIELRGWIPRELRPLMQTWVFGCDVCQDVCPHNGLVRQGIHQEFAPRKDVAFPDLVELLHIDEVTYQERFRHSAIKRAKRQGLRRNAAVALGNLRDARAVPSLARALDDDDPLIRGHAAWALGRIADPQAAGVLRARLARESNPPVREEIEFALAGSP

SEQ ID NO: 81540 - protein, 414 aa, unidentified
  source 1..414: note = Terrabacteria group
  REGION 1..414: note = tr|A0A537IWU4|A0A537IWU4_9BACT Epoxyqueuosine reductase OS=Terrabacteria group bacterium ANGP1; OX = 2569760 GN=queG PE=3 SV=1
MALNLSRSGDLSHGDGVQSAGRRPAGPARPAHADLIHSSLMDHALTLEVKAYAHGLGFDLVGITTADPLPEHGERMAQWVAAGMHGEMEYVSRHAPKAANPAYTAAGARSVVVVGLAYRWDAPAPSPDSLSGRISSYARGTDYHEVMEHRLRDLAGFLSERGAGLARYYVDTGPLLDRAIAHRAGLGWFGKNTMLITKTGHGSYVFLGEILTDLELESDQPAEGSCGRCRICLDQCPTGAIVAPFVVDARRCISYLTIELRGWIPRELRPLMQTWVFGCDVCQDVCPHNALVREGIHQEFAPRKDVAFPDLVELLHIDEAAYQERFRHSAIKRAKRQGLRRNAAVALGNLRDPRAVPALVRALDDEDSIVRGHAAWALGRIAHPQARATLRDRLEQESDPRVREEIEFALTSLS

SEQ ID NO: 81541 - protein, 382 aa, Terribacillus aidingensis
  REGION 1..382: note = tr|A0A285P346|A0A285P346_9BACI Epoxyqueuosine reductase OS=Terribacillus aidingensis OX=586416; GN = SAMN05421503_2498 PE=4 SV=1
MDTEKLKQELIAYSKEIGVDKIRFTTADVFQELKERLKQQQEKNYQSGFEKGTIEERTEPKKLMPSAQSIIAIALAYPSRLPNAPKSTKEEPRGLFCRASWGMDYHEVLRDRLNKLSAFLAERVEGFAYRSMVDTGELSDRAVAERAGIGFSAKNSFVITPEFGSYVYLGEMITNVPFQPDEAVEDSCGSCTKCIDSCPTGALVQGGQLNAQRCIAYLTQTKDFLPDEFRTKIGNRIYGCDTCQLVCPKNKGMNFHLHEEMEPDPEIVKPLLKPLLKMSNKEFKTKFGVISGSWRGKKPIQRNAILTMAHYKTTTAVPDLIELMEKDPRPVIRGTAAWAIGKIGLPEGFEAIKRAVEEEEDAQVREEMEKGLQFEKEYAKAH

SEQ ID NO: 81542 - protein, 382 aa, Terribacillus goriensis
  REGION 1..382: note = tr|A0A075LH03|A0A075LH03_9BACI Iron-sulfur cluster-binding protein OS=Terribacillus goriensis; OX = 386490 GN=GZ22_04480 PE=4 SV=1
MDTEQLKQELIAYSKKIGVDKIRFTTADVFQELKERLKQQQENNYQSGFEKGTIEERTEPKKLMPSAQSIIAIALAYPSRLPNAPKSTKEEPRGLFCRASWGMDYHEVLRDRMNKLTAFLSERVEGFTYRSMVDTGELSDRAVAERAGIGFSAKNSFVITPEFGSYVYLGEVITNIPFLPDEAVEDSCGTCTKCIDSCPTGALVQGGQLNAQRCIAYLTQTKDFLPDEFRSKIGNRIYGCDTCQLVCPKNKGMDFHLHEEMEPDPEVVKPLLKPLLKMSNKEFKAKFGLISGSWRGKKPIQRNAILAIAHYKTTSAVPDLIELMEQDPRPVIRGTAAWAIGKIGLPEGFDAVRKAMDKEQDDQVIEEMRKGLQFEEEYAETH

SEQ ID NO: 81543 - protein, 382 aa, Terribacillus halophilus
  REGION 1..382: note = tr|A0A1G6WFE7|A0A1G6WFE7_9BACI Epoxyqueuosine reductase OS=Terribacillus halophilus OX=361279 GN=queG; PE = 3 SV=1
MDAEKLKQELIAYSKTIGVDKIRFTTADVFQELKERLKQQQENNYQSGFEKGTIEERTEPKKLMPSAKSIIAIALAYPSRLPNAPKSTKEEPRGLFCRASWGMDYHEVLRDRLNKLAAFLAERVDGFTYRSMVDTGELSDRAVAERAGIGFSAKNSFVITPEFGSYVYLGEMITNIPFLPDEPVEDSCGTCTKCIDSCPTGALVQGGQLNAQRCIAYLTQTKDFLPDEFRSKIGNRVYGCDTCQLVCPKNKGMDFHLHEEMEPDPEIVKPLLKPLLKMSNKEFKAKFGLISGSWRGKKPIQRNAILAIGHYKSTSAVPDLIELMEQDPRPVIRGTAAWAIGKIGLPEGYEAIRNALVKEREEQVREEMEKGLQFEQQYAETH

SEQ ID NO: 81544 - protein, 382 aa, Terribacillus saccharophilus
  REGION 1..382: note = tr|A0A268A8W4|A0A268A8W4_9BACI tRNA epoxyqueuosine(34) reductase QueG OS=Terribacillus saccharophilus OX=361277 GN=queG PE=4 SV=1
MDTEQLKQELIAYSKKIGVDKIRFTTADVFQELKERLKQQQENNYQSGFEKGTIEERTEPKKLMPSAQSIIAIALAYPSRLPNAPKSTKEEPRGLFCRASWGMDYHEVLRDRMNKLTAFLSERVEGFTYRSMVDTGELSDRAVAERAGIGFSAKNSFVITPEFGSYVYLGEVITNIPFLPDEAVEDSCGTCTKCIDSCPTGALVQGGQLNAQRCIAYLTQTKDFLPDEFRSKIGNRIYGCDTCQLVCPKNKGMDFHLHEEMEPDPEVVKPLLKPLLKMSNKEFKARFGLISGSWRGKKPIQRNAILAIAHYKTTSAVPDLIELMEQDPRPVIRGTAAWAIGKIGLPEGFDAVRKAMDKEQDEQVLEEMRKGLQYEEEYAEAH

SEQ ID NO: 81545 - protein, 382 aa, Terribacillus saccharophilus
  REGION 1..382: note = tr|A0A268HA03|A0A268HA03_9BACI tRNA epoxyqueuosine(34) reductase QueG OS=Terribacillus saccharophilus OX=361277 GN=queG PE=4 SV=1
MDAEQLKQELIAYSKEIGVDKIRFTTADVFQELKERLKQQQENNYQSGFEKGTIEERTEPKKLMPSAQSIIAIALAYPSRLPNAPKSTKEEPRGLFCRASWGMDYHEVLRDRMNKLTAFLSERVEGFTYRSMVDTGELSDRAVAERAGIGFSAKNSFVITPEFGSYVYLGEVITNIPFLPDEAVEDSCGTCTKCIDSCPTGALVQGGQLNAQRCIAYLTQTKDFLPDEFRSKIGNRIYGCDTCQLVCPKNKGMDFHLHEEMEPDPEVVKPLLKPLLKMSNKEFKAKFGLISGSWRGKKPIQRNAILAIAHYKTTSAVPDLIELMEQDPRPVIRGTAAWAIGKIGLPEGFDAVRKAMDKEQDDQVLEEMRKGLQFEEEYAESH

SEQ ID NO: 81546 - protein, 382 aa, Terribacillus sp.
  REGION 1..382: note = tr|A0A268BLQ6|A0A268BLQ6_9BACI tRNA epoxyqueuosine(34) reductase QueG OS=Terribacillus sp. 7520-G OX=2025389 GN=queG PE=4 SV=1
MDAEKLKQELIAYSKTIGVDKIRFTTADVFQELKERLKQQQEKNYQSGFEKGTIEERTEPKKLMPSAQSIIAIAMAYPSRLPNAPKSTREEPRGLFCRASWGMDYHEVLRDRLNKLAAFLAERVEGFSYRSMVDTGELSDRAVAERAGIGFSAKNSFVITPEFGSYVYLGEMITNIPFLPDEPVEDSCGTCTKCIDSCPTGALVQGGQLNAQRCIAYLTQTKDFLPDEFRSKIGNRIYGCDTCQLVCPKNKGMDFHLHEEMEPDPEIVKPLLKPLLKMSNKEFKAKFGLISGSWRGKKPIQRNAILAIAHYKSSSAVPDLIELMERDPRPVIRGTAAWAIGKIGLPEGFEAIRNAMEKEQDEQVREEMEKGLQFEQQYAQTH

SEQ ID NO: 81547 - protein, 378 aa, unidentified
  source 1..378: note = Terriglobus albidus
  REGION 1..378: note = tr|A0A5B9ELZ9|A0A5B9ELZ9_9BACT tRNA epoxyqueuosine(34) reductase QueG OS=Terriglobus albidus; OX = 1592106 GN=queG PE=4 SV=1
MGNPVTSIGSELRDALVARALECGFSAAGIAAVPEDNPDLRRRYESWVDQGYAGEMGYLQRRDEAGQLLRSSLRVAIPWARSVIVCSLNYNAAHPKSIDPAPEGAGWIARYAWSGRPEGDTLSPTDYHDVLLSKLRGVEEFLREHAGPDLEVRSYVDTGPVVERGFAEAADVGWVGKNTCLIRQGTGSWTLLAVIVTSLPLAREAELLPAADRCGTCTRCLDACPTGALIAPRQMDARKCIAYLTIEKKGEIEEELRPLMGRQIFGCDICQDVCPWNRKAPIGATTEMQARIELVNPDLAMLAAMTPAEFRTRFRGSPLERTRLKRLRRNIAIAMGNSEDARYLPQLEAWQQSEDTVLRTTAAWAVQRITHSRQRASV

SEQ ID NO: 81548 - protein, 377 aa, Terriglobus roseus
  REGION 1..377: note = tr|A0A1H4IWL2|A0A1H4IWL2_9BACT Epoxyqueuosine reductase OS=Terriglobus roseus OX=392734; GN = SAMN05443244_0160 PE=4 SV=1
MITPRLREQLVARALCAGFDLAGVAAVPERDSPQERLQSERFTEWARAGFAGDMAWMLRADADGVPLRSSLQRAVPWARSVVLCAVNYNSAQPRSVDAAPAGAGWIARYAWSGTGTGEDSVPTDYHEVLLARLKQVEADLHATVPAGEEAIQTRCYVDTGPVVERWFAQLAGIGWIGKNTCVLNQGQGSWMLLGVLLTSLPLSDEAVLLPTADRCGTCTRCIDACPTDALIAPRKMDASRCIAYLTIEKKGSIDESLRPQMGRQVFGCDICQDVCPWNRRAPIGTAQDMQARTALVNPSLEDLAAIDTPEFKRRFRGSPLERTGRRRLQRNVAIAMGNSHDACHVPRLEAWAAGEDEMLREAALWALEQIAGSATSL

SEQ ID NO: 81549 - protein, 399 aa, Terriglobus roseus
  REGION 1..399: note = tr|I3ZGC1|I3ZGC1_TERRK Uncharacterized Fe-S protein; OS = Terriglobus roseus (strain DSM 18391 / NRRL B-41598 / KBS 63) OX=926566 GN=Terro_2003 PE=4 SV=1
MITPRLRENLIASALGAGFDLAGVAAVPERDSPEEKLQSERFAEWARAGFAGDMAWMLREDADGVPLRSSLQRAVPWARSVVLCAINYNSAQPRSIDAAPDGAGWIARYAWSGDSTGDEAVPTDYHEVLLARLKRVEADLHAMVPPGEEAIQTRCYVDTGPVVERWFAQLSGIGWIGKNTCMLNQQQGSWLLLGVLLTSLPLTNDAVLLPAADRCGTCTRCIDACPTDALIAPRRMDATRCIAYLTIEKKGSIDESLRPLMGRQVFGCDICQDVCPWNRRAPVGTAPDMQARTSLVNPSLEDLAAMDTPAFKRRFRGSPLERTGRRRLQRNVAIAMGNSGDARHTQRLQTWAAGEDEMLREAAAWALEQIVGTGTSLDQQTPQAFKEEKITPDSSASIV

SEQ ID NO: 81550 - protein, 367 aa, Terriglobus saanensis
  REGION 1..367: note = tr|E8V469|E8V469_TERSS 4Fe-4S ferredoxin-type domain-containing protein OS=Terriglobus saanensis (strain ATCC BAA-1853 / DSM 23119 / SP1PR4) OX=401053; GN = AciPR4_1753PE=4 SV=1
MRARIVARSLEAGFHAAAIAPAPESGSEGERLLRERFLAFIAQGRGAEMHYLQRADEQGNMLRTSIHTAFPWARSVVLCAFNYNAAASRSIDPAGKSEGWIARYAWSGDGEKATDYHNVLLAKLRAVEQTIQDAAPGVQTRSYVDTGPLVERHFAQLAGLGWIGKNTCVMSQELGSWLLLGVIVTSLEVQSGAVLGPAADRCGSCTRCIDACPTDALIAPRQMDAGRCIAYLTIEKKGSIPEEMRAPMGRQIFGCDICQDVCPWNRKSPVGGDEGMHARDELINPSLHWIAEMGNAEFRAHFRGSPLERTGRKRLHRNTAIAMGNSGDVTFLPKLKEWAAGDDVVLAETATWAIAEIQRKSSEGLLC

SEQ ID NO: 81551 - protein, 311 aa, Terrimonas sp.
  REGION 1..311: note = tr|A0A2T7QDU5|A0A2T7QDU5_9BACT Epoxyqueuosine reductase OS=Terrimonas sp. NS-102 OX=2171976 GN=queG PE=3; SV = 1
MNTFGNSHIIKQIATQSGFDYCGIARALPLDEDARRLETWLNKGYNGNMQYMENHFELRINPQKLVPGAKSVITLLLNYYPADIPTAGRDVPKISKYAWGNDYHEVIKAKLRSFIEEIKLRIGDVHGRGFVDSAPVLERAWAQRSGLGWIGKNGNLINKQSGSFFFIATLIVDIELEYDDPLAKDFCGTCTKCIDACPTNAILDNRVVDGSKCISYYTIELKDALIPDNMKGKFDNWMFGCDVCQDVCPWNRFSSPTTETRFTPIPEILDFTKENWEELTEESFKKIFRHSPLKRSKFQGIKRNLKFITKA

SEQ ID NO: 81552 - protein, 301 aa, unidentified
  source 1..301: note = Terrisporobacter glycolicus
  REGION 1..301: note = tr|A0A354KQN8|A0A354KQN8_9FIRM tRNA epoxyqueuosine(34) reductase QueG OS=Terrisporobacter glycolicus OX=36841 GN=queG PE=4 SV=1
MNKDEIKKLFYNKGLDVVGVAPIGPYYELRKTLEEKVNANLVTGMEEPDIEKRINPKLIMEDASSIIVCAFPYYIEQNQKSNISKYCYGLDYHLVIKERLNNICEEIKKIDETFDYKVFADNGPLVDRHLAYLSGIGYYGINNNIITDKYGSYVFIGYIVNNYDLEPDKPTNKTCIKCKKCVKYCPGNALEGNYKMNPKNCVSFITQKKEELTLEEIEKIKKNESIFGCDICQQVCPHNKNICESNIEEFALNLITNLNEEEINNISNKEFKRRYKNRAFSWRGKNIIKRNMDILKEKSMK

SEQ ID NO: 81553 - protein, 301 aa, unidentified
  source 1..301: note = Terrisporobacter glycolicus
  REGION 1..301: note = tr|A0A1I3SZ90|A0A1I3SZ90_9FIRM Epoxyqueuosine reductase OS=Terrisporobacter glycolicus OX=36841; GN = SAMN02910355_3434 PE=4 SV=1
MNKDEIKNLFYNKGLDVVGVAPIGPYYELRKTLEEKVNANLVTGMEEPDIEKRINPKLIMEDASSIIVCAFPYYIEQNQKSNISKYCYGLDYHLVIKERLNNICEEIKKIDETFDYKVFADNGPLVDRHLAYLSGIGYYGINNNIITDKYGSYVFIGYIVNNYDLEPDKPTNKTCIKCNKCVKYCPGNALEGNYKMNPKNCVSFITQKKEELTLEEIEKIKKNESIFGCDICQQVCPHNKNICKSNIEEFTLNLITNLNEEEINNISNKEFKRRYKNRAFSWRGKNIIKRNMDILKEKSMK

SEQ ID NO: 81554 - protein, 302 aa, unidentified
  source 1..302: note = Terrisporobacter othiniensis
  REGION 1..302: note = tr|A0A0B3W7F5|A0A0B3W7F5_9FIRM Iron-sulfur cluster-binding protein OS=Terrisporobacter othiniensis; OX = 1577792 GN=QX51_03210 PE=4 SV=1
MNKEEIKELFKNKGLDAIGIASVGPYYELKEILEEKVNKGLVTGMEEPDIEKRINPKLIMEDAASIIVCAFPYHIEQENESNISKYCYGLDYHLVIKEKLNNLCEEIKEVDESFNYKIFADNGPLVDRYLAYLAGIGYYGINNNLITDKYGSYVFIGYIVNNYDLEPDNPTSKTCIKCNKCVKYCPGNALEGNYKMDPKKCVSFITQKKEELTSEEVEKMKKNKSIFGCDICQQVCPHNKDICETNIKEFNTNLITTLSEEEINNISNKEFKRRYKDRAFSWRGRNIIKRNIDILKEKSMKR

SEQ ID NO: 81555 - protein, 381 aa, Tetragenococcus halophilus
  REGION 1..381: note = tr|A0A3G5FJQ4|A0A3G5FJQ4_TETHA tRNA epoxyqueuosine(34) reductase QueG OS=Tetragenococcus halophilus OX=51669 GN=queG PE=4 SV=1
MPSLKEKIIAESKNLGIDKIGFTTAEPFDELKASLIAQKAADHTSGFEHKNIDERLYPELTFENPQSIIAIALAYPTKIHEKVPRDEKRGQMARASWGTDYHDILKDRLTKLIDFIKKEAENTQDAENWRFSPQVDTGELVDVAVAQRAGLGFIGRNGLLITEEYGSFVYLGEIITNIQFEADEPGTFGCGECRRCITHCPTGALLGDGKMDAQKCLSYQTQTKTMMPKKYRKQIHNVIYGCDICQLVCPYNQGKDFHFHKEMEPSVDEVRPKLAPLLSVSNREFKEQFGHLAGTWRGKKPLQRNALIALANLGGRENLVKIFKCLEDVRPVIRGTAVWAIGELTKRQPEQAIDLLYELQEKETDEEVLNELEETLTMLGK

SEQ ID NO: 81556 - protein, 386 aa, Tetragenococcus halophilus
  REGION 1..386: note = tr|A0A424XTN4|A0A424XTN4_TETHA tRNA epoxyqueuosine(34) reductase QueG OS=Tetragenococcus halophilus subsp. halophilus DSM 20339 OX=1123358 GN=queG; PE = 4 SV=1
MPSLKEKIIAESKNLGIDKIGFTTAEPFDELKESLIAQKAAGHTSGFEHKNIDERLYPELTFENPQSIIAIALAYPTKIHEKVPRDEKRGQMARASWGIDYHDILKNRLTKLIAFIQKEAANTQDAENWRFLPQVDTGELVDVAVAQRAGLGFIGRNGLLITEEYGSFVYLGEIITNIQFEPDEPGTFGCGECRRCITHCPTGALLGDGKMNAQKCLSYQTQTKTMMPKKYRKQIHNVIYGCDICQLVCPYNQGKDFHFHKEMEPSIDEMRPKLAPLLSVSNREFKEQFGHLAGTWRGKKPLQRNALIALANLGGRQSLVKICQCLEDVRPVIRGTAVWAIGELTKRQPEQAIDLLYELEEKETDGEVLNELEETLIMLEERKKKA

SEQ ID NO: 81557 - protein, 386 aa, Tetragenococcus koreensis
  REGION 1..386: note = tr|A0A3G5F901|A0A3G5F901_9ENTE tRNA epoxyqueuosine(34) reductase QueG OS=Tetragenococcus koreensis OX=290335 GN=queG PE=4 SV=1
MSNLKEKIIAESKRLGIDKIGFTTAEPFAELKESLVAQKAAGHTSGFEHPNIDERLYPELTFENPQSIIAIALAYPTKINEKVPRDEKRGQFARASWGIDYHDILKDRLTKLIHFIEEIAEDEKETENWRFAPQVDTGELVDVAVAQRAGLGFIGRNGLLITEEYGSFVYLGEIITNIQFEPDEPKPFGCGDCTRCITHCPTGALLGDGKMDAQKCLSYQTQTKGMMPKKYRKQIHNVIYGCDICQLVCPYNQGKDFHFHEEMEPSIDEVRPKLAPMLSMSNKEFKKQFGHLAGFWRGKKPLQRNALIALANLGGRESLVKICKCLEDPRPVIRGTAVWSIGELTKKHPEQAIDLLYELQETETDEEVLTELTETLTMLETNKKKA

SEQ ID NO: 81558 - protein, 386 aa, Tetragenococcus muriaticus
  REGION 1..386: note = tr|A0A091BZ26|A0A091BZ26_9ENTE Iron-sulfur cluster-binding protein OS=Tetragenococcus muriaticus 3MR10-3 OX=1302648 GN=TMU3MR103_1296 PE=4 SV=1
MPSLKERIITKSKQLGIDKIGFTTAEPFDELKDSLVAQKAAGHTSGFEHPNIDERLYPELTFDNPQSIIAIALAYPTKIHEKVPRDEKRGQFARASWGIDYHDILNDRLTKLIEFIKKEAQDASEASTWRFAPQVDTGELVDVAVAQRAGLGFIGRNGLLITEEYGSFVYLGEIITNIQFEPDTPKAFACGDCTRCITQCPTGALLGDGKMDAQKCLSYQTQTKGMMPKKYRKQMHNVIYGCDICQLVCPYNQGKDFHFHQEMESSVEEVRPKLAPMLSMSNKEFKKQFSHLSGFWRGKKPLQRNALIALANLGGRESLVKIFQCLEDPRPVIRGTAVWSIGELTKKQPDQAIDLLYELQEKETDTDVLQELKETIMMLETRKKDM

SEQ ID NO: 81559 - protein, 311 aa, Tetragenococcus muriaticus
  REGION 1..311: note = tr|A0A091CD19|A0A091CD19_9ENTE Iron-sulfur cluster-binding protein OS=Tetragenococcus muriaticus PMC-11-5 OX=1302649 GN=TMUPMC115_1458 PE=4 SV=1
MPSLKERIITKSKQLGIDKIGFTTAEPFDELKDSLVAQKAAGHTSGFEHPNIDERLYPELTFDNPQSIIAIALAYPTKIHEKVPRDEKRGQFARASWGIDYHDILNDRLTKLIEFIKKEAQDASEASTWRFAPQVDTGELVDVAVAQRAGLGFIGRNGLLITEEYGSFVYLGEIITNIQFEPDTPKAFACGDCTRCITQCPTGALLGDGKMDAQKCLSYQTQTKGMMPKKYRKQMHNVIYGCDICQLVCPYNQGKDFHFHQEMESSVEEVRPKLAPMLSMSNKEFKKQFSHLSGFWRGKKTTAAKCAYRFS

SEQ ID NO: 81560 - protein, 386 aa, Tetragenococcus osmophilus
  REGION 1..386: note = tr|A0A3G5FE93|A0A3G5FE93_9ENTE tRNA epoxyqueuosine(34) reductase QueG OS=Tetragenococcus osmophilus OX=526944 GN=queG PE=4 SV=1
MPSLKERIIAKSKQLGIDKIGFTTAEPFDELKDSLVAQKAAGHTSGFEHPNIDERLYPELTFDNPQSIIAIALAYPTKIHEKVPRDEKRGQFARASWGIDYHDILNDRLTKLIEFIRKEAQDASEASTWRFAPQVDTGELVDVAVAQRAGLGFIGRNGLLITEEYGSFVYLGEIITNIQFEPDTPKAFACGDCTRCITQCPTGALLGDGTMDARKCLSYQTQTKGMMPKKYRKQMHNVIYGCDICQLVCPYNQGKDFHFHQEMEPSIEEVRPKLAPMLSMSNKEFKKQFSHLSGFWRGKKPLQRNALIALANLGSRENLVNIFKCLEDPRPVIRGTAVWSIGELTKKQPDQAIDLLYELQEKETSGDVLQELTETITMLETRRKEV

SEQ ID NO: 81561 - protein, 377 aa, unidentified
  source 1..377: note = Tetzosporium hominis
  REGION 1..377: note = tr|A0A264W7K8|A0A264W7K8_9BACL tRNA epoxyqueuosine(34) reductase QueG OS=Tetzosporium hominis; OX = 2020506 GN=queG PE=4 SV=1
MNVRDFQQQLIHYAHSIGIDKIGFASAAPFPDLKQRLLVQQQLGYASGFEEPDITKRTEPVQLLDGVQTIISIALAYPSKMKDAPQSKRGARRGIFARASWGMDYHTVLREKLAKLEAFILVHAPDAKLKSMVDTGELSDRAVAERAGIGWSAKNCSIITPEFGSYVYLGEMLTNLPFEPSVPMEDECGDCTLCLDVCPTGALIEGGQLNAKRCIAFLTQTKTMVPKEFRAKIGNRLYGCDTCQTVCPKNKGKHSAHQHDFTPDPELVKPLLMPLLEHTNRTFKETYGHMSGAWRGKNPIQRNAIIALVHFKEREAISKLMTILSEDPRPVMRGTAAWALGELTSTEGMEALRNQLDQEKEGLVIEEIQEALLKGEQ

SEQ ID NO: 81562 - protein, 377 aa, Thalassobacillus cyri
  REGION 1..377: note = tr|A0A1H4GZF6|A0A1H4GZF6_9BACI Epoxyqueuosine reductase OS=Thalassobacillus cyri OX=571932 GN=queG PE=3; SV = 1
MDYKQLKEEVIAYSKEIGIDKIGFASVDVFGELKARLKRQEELSYQSGFEKGTVEERTEPSRLLPEAQSIISIALAYPSKMKDAPKSKKGDRRGIFCRASWGQDYHDVLRDRLQKLGEFLTEKFPEVSIKSMVDTGELADRAVAERAGIGFSGKNCAIITPEFGSYVYLGEMVTNIPFEADEPVEDSCGDCNICVDACPTGALVQGGQLDANKCIAFLTQTKDFLADEYRVKIGNRLYGCDTCQTVCPKNKKKDFHLHEEFEPDPEVTKPRLKPLLSISNREFKEQFGPIAGSWRGKKPIQRNAILALGHYKDETAVDDLIRLMKEDPRPVIRGTAAWSLGKIGSPGAYEAIEAAMEKESDEQVLFEMEKGLGFQLN

SEQ ID NO: 81563 - protein, 351 aa, Thalassobacter sp.
  REGION 1..351: note = tr|A0A099TB30|A0A099TB30_9RHOB Epoxyqueuosine reductase OS=Thalassobacter sp. 16PALIMAR09 OX=1225651; GN = queG PE=3 SV=1
MRTSTSDPSPAELRAGLEAQARDAGFASMGICAPDAVPELPARLKAFVDANRHGQMAWMAERMAWRGDPGALWPEARSVIMLAEPYTPDSDPLDDITHRENGVISVYARNRDYHDLVKKRLKRVARWLVAAAECEVKVFVDTAPVMEKPLAQAAGLGWQGKHTNLLSRKLGNWFFLGAVFTTADLPKDTPEAEHCGNCRACLDICPTQAFPAPFQLDARRCISYLTIEHKGPVDDSLRPALGNRIYGCDDCLAVCPWNKFAVEATELRYHARDDLRQPALAELATLDDAAFRARFSGSPIKRIGRDRFVRNVLYAIGNSAQPDLRPVAQSLCEDNDPTVADAARWAEERLR

SEQ ID NO: 81564 - protein, 351 aa, unidentified
  source 1..351: note = Thalassobacter stenotrophicus
  REGION 1..351: note = tr|A0A0N7LTG5|A0A0N7LTG5_9RHOB Epoxyqueuosine reductase OS=Thalassobacter stenotrophicus OX=266809; GN = queG PE=3 SV=1
MRTSTSDPSPAELRARLEAEARDAGFASMGICAPDAVPELPARLKAFVDANRHGQMAWMAERMAWRGNPSALWPEARSVIMLAEPYTPDSDPLDDITHRENGVISVYARNRDYHDLVKKRLKRVARWLVAAAECEVKVFVDTAPVMEKPLAQAAGLGWQGKHTNLLSRKLGNWFFLGAVFTTADLPKDTPEAEHCGNCRACLDICPTQAFPAPFQLDARRCISYLTIEHKGPVDENLRPALGNRIYGCDDCLAVCPWNKFAVEATELRYHARDDLRQPALAELAALDDAGFRARFSGSPIKRIGRDRFVRNVLYAIGNSAQPDLRPVAQSLCEDNDPTVADAARWAEERLR

SEQ ID NO: 81565 - protein, 375 aa, Thalassobaculum litoreum
  REGION 1..375: note = tr|A0A1G7Q4N7|A0A1G7Q4N7_9PROT Epoxyqueuosine reductase OS=Thalassobaculum litoreum DSM 18839 OX=1123362; GN = queG PE=3 SV=1
MTDAPTLAERIEAKARAAGFDAVGITRAEVGAREQARLDAFVAAGQHGEMAWMADTHDRRRDPKTLWPEARSVVVCAMNYGPEHDPLDDLRRTDRGVIAAYARNRDYHDLVKKRLKRVARWMHAELDCEVKVFVDTAPVLEKPLAASAGVGWQGKHSNLVSREHGSWLFLGEIFTTLDLTPDAAETDHCGSCRRCLDICPTDAFPAPYTLDARRCISYLTIEHKGPVPREFRAAMGNRIYGCDDCLAVCPWNKFAETAREAAFVAREDLTLPLLSELAGLDDAAFRARFSGSPIKRTGRDRFVRNVLIALGNSGTADALPSVASLLDDDSALVRGAAVWAYLRLGGAPGDRPARENDREVLAEWAAGPDERGLRR

SEQ ID NO: 81566 - protein, 366 aa, unidentified
  source 1..366: note = Thalassobium sp.
  REGION 1..366: note = tr|A0A2G2Q3A8|A0A2G2Q3A8_9RHOB Epoxyqueuosine reductase OS=Thalassobium sp. OX=2030825 GN=queG PE=3 SV=1
MTERSSDNAPDCAELSPSWAGLRAQLDEWATELGFQQLGITGVELAEHEQRLQQWLAAGYHGDMAYMADHGNMRSRPAELLPGTLRVISVRMDYLAPDIRISEQLSDKNQAYISRYALGRDYHKLVRKRLTELGKRLQQAAGEMGFRAFVDSAPVLERALANQAGLGWIGKNTMLINRKAGSYFFLGEILTDLPLPIDKPYTQDHCGRCTACLDICPTQAFVGPHVLDARRCISYLTIELNGPIPQDLRPGIGNRIFGCDDCQIGCPWNRFSNASKEGDFSPRHQLDKASLLELFAWDEATFLSRTEGMPIRRTGYENWLRNIAVALGNAPRSLEVTDALQRKRPQVSALVQEHIDWALQQQQNPR

SEQ ID NO: 81567 - protein, 342 aa, unidentified
  source 1..342: note = Thalassobium sp.
  REGION 1..342: note = tr|C7DE39|C7DE39_9RHOB Epoxyqueuosine reductase; OS = Thalassobium sp. R2A62 OX=633131 GN=queG PE=3 SV=1
MSEALKQALLARSLDEGFSAMGVCRPDAMPELPARLAQFVEAGRHGQMGWMAERMHWRGAPDALWPEARSVVMLAEAYTPEHDPLAVLEQTSKAAVSVYAQGRDYHDIVKKRLKRVGRWLLDQAEGEAIKVFVDTAPVMEKPLAAAAGLGWQGKHTNLLSRELGNWSFLGAIFTTIDLPVDEPVEDRCGSCRACLDICPTDAFPAPNQLDARRCISYLTIEHKGPVDVELRAKMGNRIYGCDDCLAICPWNKFAREARELRYASSPDAPDLNELVGLDDAAFRARYSGSPIKRIGRDQFVRNVLYAIGNSGDVALKSGAQALVDDADETVADAARWAVERLT

SEQ ID NO: 81568 - protein, 372 aa, unidentified
  source 1..372: note = Thalassobius activus
  REGION 1..372: note = tr|A0A0P1IS10|A0A0P1IS10_9RHOB Epoxyqueuosine reductase OS=Thalassobius activus OX=1715691 GN=queG PE=3; SV = 1
MGQRRSFGTPNRSDIRSNQSDPTLGKEQAALLKTRLINEAHEIGFDLCRICRPDAVPQVPEGLRGFLAKNYEGQMNWLAERVHWRENPAELWPEAKSVIMLAQSYSPDEDPRIVHGMPDCGAISVYARNKDYHDLVKKRLKRLARWLIAEVGDETQVKVFVDTAPVPEKPLGQAAGLGWQGKHTNLLSRDLGSWFFIGSIFTTVELEVDAPEVNNCGSCTACLTACPTDAFPEPHKIDARRCISYLTIEHHGPVDEDLRPLMGNRIYGCDDCLAACPWNKFAVEAREIRYHARDDLRAPSLAELAALDDTEFRAKFSGSPIKRIGRNRFVRNVLYAMGNSGIQDYLLQIEDLIQDPDETVADAARWAKERLK

SEQ ID NO: 81569 - protein, 351 aa, unidentified
  source 1..351: note = Thalassobius autumnalis
  REGION 1..351: note = tr|A0A0P1G9U2|A0A0P1G9U2_9RHOB Epoxyqueuosine reductase OS=Thalassobius autumnalis OX=2072972 GN=queG; PE = 3 SV=1
MADGLKQRLVAQAHAEGFDAARICRPWDVPEVPARLQAFLEAGYHGQMGWMAERVHWRENPAALWPEARSVIMLAESYTPEHDPTEILQHADLGAISVYAQNKDYHDLVKKRLKRLARWLIAETGDETQVKVFVDTAPVPEKPLGQAAGLGWQGKHTNLVSRDLGSWFFIGSIFTTLEIDSDPAEIDRCGSCVACQVACPTEAFPAPYQLDARRCISYLTIEHHGPVDEDLRAKMGNRIYGCDDCLAACPWNKFAVEARELRYAARDELKAPKLAELAQLDDAGFRAFFSGSPIKRIGRNRFVRNVLYAIGNSGDAALREVAQSLCEDEDATVQDAARWAVGQLHTKSPAR

SEQ ID NO: 81570 - protein, 349 aa, Thalassobius gelatinovorus
  REGION 1..349: note = tr|A0A0P1F6S8|A0A0P1F6S8_THAGE Epoxyqueuosine reductase OS=Thalassobius gelatinovorus OX=53501 GN=queG; PE = 3 SV=1
MKQGLKQSLVSQALQEGFDACRICRPGDIPQVPKRLSAFLAKGRHGQMAWMENRAEWRGNPSALWPEARSVIVLAESYTPEHDPLQILQQRDCGAISVYAQNKDYHDLVKKRLKRLARWLIAEAGGEVKVFVDTAPVAEKPLGQAAGLGWQGKHTNLVSRELGSWFFIGSIFSTLELDPDPAETDHCGSCTACQDICPTAAFPAPYQIDARRCISYLTIEHHGPVEQDLRPLLGNRIYGCDDCLAVCPWNKFAIEARELRYHAREELKAPKLAELAVLDDAGFRAFFSGSPIKRIGRNRFVRNVLYAIGNSGQSDLLPVARRLTEDTDATVADAARWAVLRLNTNATKD

SEQ ID NO: 81571 - protein, 351 aa, Thalassobius mediterraneus
  REGION 1..351: note = tr|A0A0P1HDJ2|A0A0P1HDJ2_9RHOB Epoxyqueuosine reductase OS=Thalassobius mediterraneus OX=340021 GN=queG; PE = 4 SV=1
MADGLKQRLVAQAIAEGFDLARICRPWDVPEMPDRLQAFLDAGYHGQMGWMAERIHWRSNPAALWPEAQSVIMLGESYTPQHDPAEVLVHPDLGAISVYAQNKDYHDLVKKRLKRLARWLIAEVGDDAQVKVFVDTAPVPEKPLGQAAGLGWQGKHTNLVSRDLGSWFFIGSIFTTVKLDTDPAERDHCGSCDACQVACPTDAFPAPYQLDARRCISYLTIEHHGPVDEDLRALMGNRIYGCDDCLNACPWNKFAVEARELRYLARDELKAPKLAELAVLDDAGFRAFFSGSPIKRIGRNRFVRNVLYAIGNSGDAALLRVAQGLTEDEDDTVRDAARWALGRLRTIATAG

SEQ ID NO: 81572 - protein, 313 aa, Thalassobius sp.
  REGION 1..313: note = tr|A0A2E9FXV9|A0A2E9FXV9_9RHOB Epoxyqueuosine reductase OS=Thalassobius sp. OX=1979401 GN=queG PE=3 SV=1
MHIEQQIVKNTRLIKESAKKLGFDFVGISKAAFLEEDAPKLESWLNNNMHGEMAYLANHFDKRLDPTKLVPGAKSVISLMCNYYPSENLNNKTGYKIAKYAYGEDYHFVIKKKLKSLVKIIHDEIGEVEGRVFVDSAPVMERQWAAKSGLGWIGKNSLLLNKGAGSFFFLAELIIDLELQEDGPVKDYCGTCTRCLDACPTDAIPAPFVVDGSKCISYFTIELKDELPAQYSDKFKDWIFGCDICQDVCPWNRFSKPHQTIEFNPHPDLNKMDKESWHDLTEDVFKVLFKKSAVKRTKFEGLKRNIKFVKATN

SEQ ID NO: 81573 - protein, 346 aa, Thalassococcus halodurans
  REGION 1..346: note = tr|A0A1H5YHT5|A0A1H5YHT5_9RHOB Epoxyqueuosine reductase OS=Thalassococcus halodurans OX=373675 GN=queG; PE = 3 SV=1
MSVTDLKEKLVAEARDIGFELARVCRPWDVPQVPERLGVFLSEDRHGTMSWMEERVHWRGAPQVLWPDAKSVIMLGESYTPDHDPLDVLNMPDRAGISVYAQNRDYHDVLKKKLKRLARWLIAEAGGEVKVFVDTAPVPEKPLGQAAGLGWQGKHTNLVSRQMGSWFFLGSVFTTLDLPADAPEVDHCGSCHACLDICPTDAFPAPYQLDARRCISYLTIEHKEPVDEALRPLLGNRVYGCDDCLAACPWNKFAAEAREAKYHARPELVAPALADLAVLDDAGFRAHFSGSPIKRIGRGRFVRNVLYAIGNSNDPALLPVAQSLVDDPEHVVADAARWAVGCLTES

SEQ ID NO: 81574 - protein, 347 aa, unidentified
  source 1..347: note = Thalassococcus profundi
  REGION 1..347: note = tr|A0A369TYX9|A0A369TYX9_9RHOB Epoxyqueuosine reductase OS=Thalassococcus profundi OX=2282382 GN=queG; PE = 3 SV=1
MDRLTELLRAEAGAVGFDLCRICRPWDVGHVPARLAAFLDRGYHGQMSWLEDRAEWRGAPDRLWPEARSVIVLGESYTPEHDPLAVLEHPEQAAISVYAQNRDYHDTVKKRLKRLARWLIAEAGPDTEVKVFVDTAPVPEKPLGQAAGLGWQGKHTNLVSRDLGSWFFIGSIFTTLDLPVDAAETDHCGSCRACLDICPTDAFPAPYQLDARRCISYLTIEHKGPVDEELRARMGNRIYGCDDCLAACPWNKFAREAREVKYHARPDLVSPDLAELARLDDAGFRARFSGSPIKRIGRDRFVRNVLYAIGNSGAARLRPVAQGLCEDADETVRDAARWAVLRLEDAT

SEQ ID NO: 81575 - protein, 359 aa, Thalassococcus sp.
  REGION 1..359: note = tr|A0A4P6MKF9|A0A4P6MKF9_9RHOB Epoxyqueuosine reductase OS=Thalassococcus sp. S3 OX=2017482 GN=queG PE=3; SV = 1
MGDRFKDRLVARALEEGFIACRVCRPWDVPEVPERLSAFVEAGYHGQMGWLAERMHWRGNPAALWPEARSVVMLAESYTPERDPMERLGWRDRGVISVYAQNRDYHDLVKKRLKRLARWMIAEGARELHANTLPEVKVFVDTAPVPEKALGQAAGLGWQGKHTNLLSREWGNWAFLGSVFTTLEIEADAPEVDHCGSCRACLDVCPTEAFVGPYRLDARKCISYLTIEHKGPVDEDLRARMGNRIYGCDDCLAVCPWNKFAVEASDLRYAARDELEAPRLAELARLDDAAFRALFSGSPIKRIGRDRFVRNVLYAIGNSGEPELAAAARELVEDTDEAVADAARWAVAMLTQMGETGRE

SEQ ID NO: 81576 - protein, 356 aa, Thalassolituus oleivorans
  REGION 1..356: note = tr|A0A1L6KAD3|A0A1L6KAD3_9GAMM Epoxyqueuosine reductase OS=Thalassolituus oleivorans OX=187493 GN=queG; PE = 3 SV=1
MNQSATTSLTAEQLTRLRDDIRQWATELGFQQAGIAGVALGEHEDLLQEWLENGYHGEMDYMASHGNMRSRPAELLPGTLSVISVRMDYLPPDGNMREQLGDPNKAYVSRYALGRDYHKLIRKRLTELGKRIKQAAGQMGFRAFVDSAPVLERALAEQAGLGWIGKNTMLINRKAGSYFFLGEILTDLPLPADNNPESDHCGRCTSCLDICPTQAFVGPHVLDARRCISYLTIELNGPIPEDLRSGMGNRIFGCDDCQIGCPWNRFSKATSETDFTPRHQLDKATLLELWAWDEAEFLSKTEGMPIRRTGYENWRRNIAVALGNAPKSIEIEQALRARLGDSALVDEHIEWALRQS

SEQ ID NO: 81577 - protein, 356 aa, Thalassolituus oleivorans
  REGION 1..356: note = tr|W8G2G7|W8G2G7_9GAMM Epoxyqueuosine reductase; OS = Thalassolituus oleivorans R6-15 OX=1208320 GN=queG PE=3; SV = 1
MNQSATTSLTAEQLTRLRDDIRQWATELGFQQAGIAGVALGEHEDLLQEWLENGYHGEMDYMASHGNMRSRPAELLPGTLSVISVRMDYLPPDGNMREQLGDPNKAYVSRYALGRDYHKLIRKRLTELGKRIKQAAGQMGFRAFVDSAPVLERALAEQAGLGWIGKNTMLINRKAGSYFFLGEILTDLPLPADNNPESDHCGRCTSCLDICPTQAFVGPHVLDARRCISYLTIELNGPIPEDLRSGMGNRIFGCDDCQIGCPWNRFSKATSETDFTPRHQLDKATLLELWAWDEAEFLSKTEGMPIRRTGYENWRRNIAVALGNAPKSIEIEQALRARLGESALVDEHIEWALRQS

SEQ ID NO: 81578 - protein, 365 aa, Thalassolituus sp.
  REGION 1..365: note = tr|A0A558NJI7|A0A558NJI7_9GAMM Epoxyqueuosine reductase OS=Thalassolituus sp. C2-1 OX=2597518 GN=queG; PE = 3 SV=1
MTERSSDNAPDCTDLSPSWAILRAQLHSWAEELGFQQLGITGVDLGEHEQRLQQWLAAGYHGEMGYMADHGNMRSRPAELLPGTLRVISVRMDYLAPDIRITDQLSDKNQAYISRYALGRDYHKLVRKRLTELGKRLQQAAGEMGFRAFVDSAPVLERALANRAGLGWIGKNTMLINRKAGSYFFLGEILTDLPLPLDEPYTQDHCGRCTACLDICPTQAFVGPHVLDARRCISYLTIELNGPIPEDLRSGIGNRIFGCDDCQIGCPWNRFSNASKEGDFSPRHQLDKASLLQLFAWDEATFLNRTEGMPIRRTGYENWLRNIAVALGNAPRSLEVADALQRRRPQVSALVQEHIDWALQQQQTP

SEQ ID NO: 81579 - protein, 386 aa, Thalassomonas actiniarum
  REGION 1..386: note = tr|A0A0D8CUS5|A0A0D8CUS5_9GAMM Epoxyqueuosine reductase OS=Thalassomonas actiniarum OX=485447 GN=queG; PE = 3 SV=1
MSSSTINYQELAEKIKFWGRELGFSQVGISDIDLSEHEAALKHWLEQGYHGNMDYMARHGMMRARPDELEPGTVSVISVRLDYLPTDAKFAKLLKKKDHAYISRYALGRDYHKLMRKRLQQLGKKIKEHCQQFNFRPFVDSAPVLERPLAEKAGLGWVGKHSLLINKQAGSWFFLGELLVDIPLPSDSAPKNDCGHCVACLKICPTQAIVAPYTVDARRCISYLTIELRDAIPEEFRPLIGNRIYGCDDCQLICPWNKFAKLGQEDDFQPRNNFDDISLLTLFAWSETEFLDKTQGSPIRRIGYACWQRNIAVALGNAGFSQEIVSALTAKLPDADAMVAEHIQWALTQQQLKAEQAKHEIKVIEVNQRLTGRLIRSIEKGLPRDA

SEQ ID NO: 81580 - protein, 383 aa, Thalassomonas sp.
  REGION 1..383: note = tr|A0A553FKV6|A0A553FKV6_9GAMM Epoxyqueuosine reductase OS=Thalassomonas sp. M1454 OX=2594477 GN=queG; PE = 3 SV=1
MSEQPTINYQDLAEKIKLWGKELGFSDVGICDVDLKTHEQALTKWLENGYHGDMDYMARHDLMRARPADLLPGTLRVISARLDYLPTGAKFAKILKQSDHAYISRYALGRDYHKLMRNRLKQLGDKITAHCEQLNFRPFVDSAPVLERPLAEKAGLGWVGKHSLLLNEQAGSWFFLGELMVNIELPIDQPKANQCGACVSCIKICPTQAIIEPYVVDARRCISYLTIELRDSIPVEFRPLIGNRIYGCDDCQLICPWNRFSQLTSEDDFQPRNHFDHVTLLELFAWDEATFLKKTEGSPIRRIGFDCWQRNIAVALGNAKYDQSIVEDLTKQKQISSEMVIEHIDWALEQQQLKLNKLNEETNLRLTQRLIRTIEKGLPRDAN

SEQ ID NO: 81581 - protein, 386 aa, Thalassomonas viridans
  REGION 1..386: note = tr|A0A0D8D8X8|A0A0D8D8X8_9GAMM Epoxyqueuosine reductase OS=Thalassomonas viridans OX=137584 GN=queG PE=3; SV = 1
MSSSTINYQELAEKIKFWGRELGFSQVGISDIDLSEHEAALSRWLEQGYHGNMDYMVRHGMMRARPGELEPGTVSVISVRLDYLPANAKFAKLLKKKDHAYISRYALGRDYHKLMRKRLQQLGKKIKEHCRQFNFRPFVDSAPVLERPLAEKAGLGWVGKHSLLINKEAGSWFFLGELLVDIPLPSDSAPANDCGNCVACLKICPTNAIVAPYTVDARRCISYLTIELRDAIPVEFRPLIGNRIYGCDDCQLICPWNKFAKLGQEDDFQPRNNFDDVSLLTLFAWSESEFLDNTQGSPIRRIGYACWQRNIAVALGNAGYSPEITEALTAKLPGADAMVAEHIQWALEQQQMKADQAVQVIKITEVNQRLTGRLIRSIEKGLPRDA

SEQ ID NO: 81582 - protein, 386 aa, unidentified
  source 1..386: note = Thalassospira alkalitolerans
  REGION 1..386: note = tr|A0A1Y2LFB1|A0A1Y2LFB1_9PROT Epoxyqueuosine reductase OS=Thalassospira alkalitolerans OX=1293890; GN = queG PE=3 SV=1
MTVVAAITFEDLQAKAREIGFDVCGVARPQIDERNQRRLDEFVAGAEYGTMDWMNDPERLPRRRDPKVLWPEVKSVIVLGSNYGPAENPLTLLDHPDRAMISVYAKNRDYHDLIKKRLKQLARWMIEQAQKSGVGGEQVKVFVDTAPVLEKPLGQAAGIGWQGKHTNLVSREYGSWLFLGEVFTTLEFDLAEPEIDHCGSCSNCLSACPTDAFPAPYKLDARKCISYLTIEHDGLIPIEFRRAMGNRIYGCDDCLAVCPWNKFASRTQELAFIPRAELTAPRLADFLDLDDAAFRTFFTGSPIKRIGRAKFLRNVLTAVGNSAVISLVPRVENLLTDESPLVRGSAVWALAQLTNADAFDDLRARHEQLESDPVVLAEWSRPSAVI

SEQ ID NO: 81583 - protein, 388 aa, unidentified
  source 1..388: note = Thalassospira lohafexi
  REGION 1..388: note = tr|A0A2N3LC48|A0A2N3LC48_9PROT Epoxyqueuosine reductase OS=Thalassospira lohafexi OX=744227 GN=queG PE=3; SV = 1
MAAHSADAITLERLQAKAREIGFDVCGVARPSIDARNQKRLDEFVAGGEYGSMDWMNDPERLPRRRDPVALWPDVKTVIVLGSNYGPAENPMALLDHPDRAMISVYAKNKDYHDLIKKRLKQLARWLMEQAQKSGAGGEQVKVFVDTAPVLEKPLGQSAGIGWQGKHTNLVSREFGSWLFLGEVFTTLEFEEAAPEIDHCGSCSKCVAACPTDAFPAPYKLDARKCISYLTIEHDDVIPHQFRRAMGNRIYGCDDCLAACPWNKFASRTEELAFIPRAELTAPRLADFLELDEAEFRAFFNGSPIKRIGRAKFLRNVLIAAGNSGSKSLIPRVENLLADDSALIRASAVWALTQLMSPDAFATLKSDHYTAEENPVVRDEWDQATKAA

SEQ ID NO: 81584 - protein, 388 aa, Thalassospira lucentensis
  REGION 1..388: note = tr|A0A358HRT7|A0A358HRT7_9PROT Epoxyqueuosine reductase OS=Thalassospira lucentensis OX=168935 GN=queG; PE = 3 SV=1
MAAHSADAITLERLQAKAREIGFDVCGVARPSIDARNQKRLDEFVAGGEYGSMDWMNDPERLPRRRDPVALWPDVKSVIVLGSNYGPAENPMALLDHPDRAMISVYAKNKDYHDLIKKRLKQLARWLMEQAQKSGAGGEQVKVFVDTAPVLEKPLGQSAGIGWQGKHTNLVSRDYGSWLFLGEVFTTLEFEEATPEIDHCGSCSKCVAACPTDAFPAPYKLDARKCISYLTIEHDDVIPHQFRRAMGNRIYGCDDCLAACPWNKFASRTEELAFIPRAELTAPRLADFLELDEAEFRAFFTGSPIKRIGRAKFLRNVLIAAGNSGSESLIPRVKKLLSDESSLIRASAVWALTQLIPSDAFATLKSDHYAAEENPVVRDEWDQATQAA

SEQ ID NO: 81585 - protein, 388 aa, Thalassospira lucentensis
  REGION 1..388: note = tr|A0A367V434|A0A367V434_9PROT Epoxyqueuosine reductase OS=Thalassospira lucentensis MCCC 1A00383 = DSM 14000 OX=1123365 GN=queG PE=3 SV=1
MAAHSADAITLERLQAKAREIGFDVCGVARPSIDARNQKRLDEFVAGGEYGSMDWMNDPERLPRRRDPVALWPDVKSVIVLGSNYGPAENPMALLDHPDRAMISVYAKNKDYHDLIKKRLKQLARWLMEQAQKSGAGGEQVKVFVDTAPVLEKPLGQSAGIGWQGKHTNLVSREFGSWLFLGEVFTTLEFEQATPEIDHCGSCSKCISACPTDAFPAPYKLDARKCISYLTIEHDDVIPHQFRRAMGNRIYGCDDCLAACPWNKFASRTEELAFIPRAELTAPRLADFLELDEAEFRAFFTGSPIKRIGRAKFLRNVLIAAGNSGAESLIPRVEKLLSDESSLIRASAVWALTQLMPSDAFATLKSDHYTGEESSVVRDEWDQATKAA

SEQ ID NO: 81586 - protein, 383 aa, unidentified
  source 1..383: note = Thalassospira marina
  REGION 1..383: note = tr|A0A2N3KXE4|A0A2N3KXE4_9PROT Epoxyqueuosine reductase OS=Thalassospira marina OX=2048283 GN=queG PE=3; SV = 1
MKARPAKLISFDMLWTKAREIGFDVCGVARPEIAARNQLRLDEFVAGQEFGSMAWMADPERLPRRRDPRVLWEDVKSVIVLGTNYGPAQDPLTLLDQPDRAMISVYAQNRDYHDLIKKRLKQLARWLIEQSEAGEQVKVFVDTAPVLEKPLAQSAAIGWQGKHTNVVSRTYGSWLFLGEVFTTLEFADAPNRAEIDHCGSCRNCLDACPTAAFPAPYKLDARKCISYLTIEHDGMIPREFRVAMGNRIYGCDDCLSVCPWNKFASRTEELAFIPRAELTAPRLADFLDMDDTAFRAFFTGSPIKRIGREKFFRNVLTAIGNAGDRQVIPQLRSLLADPSALIRASAVWALSRLMGRDEFAEIRQSHLADERDETVLTEWDATA

SEQ ID NO: 81587 - protein, 378 aa, unidentified
  source 1..378: note = Thalassospira mesophila
  REGION 1..378: note = tr|A0A1Y2L0Q1|A0A1Y2L0Q1_9PROT 4Fe-4S ferredoxin; OS = Thalassospira mesophila OX=1293891 GN=TMES_11080 PE=4; SV = 1
MRFDALQAKAREIGFDVCGVAKPEIDSRNQQRLDEFVAGEEFGSMAWMADPERLPRRRDPKVLWGDVQSVIVLGTNYGPAENPLALLDHSDRAMISVYAQNRDYHDLIKKRLKQLARWLVEQTGGAEQVKVFVDTAPVLEKPLAQAGGIGWQGKHTNVVSRDYGSWLFLGEVFTTLQFDDAPQKPEIDHCGSCRNCLDACPTNAFPEPYKLDARRCISYLTIEHDGVIPREFRRAIGNRIYGCDDCLSVCPWNKFSSRTEELAFIARAELTAPRLADFLAMDDDAFRAFFAGSPIKRIGRAKFLRNVLIAIGNDKNGGDASTIAQLHNLLADPSALIRASTVWAMAQLMDDAAFHEVRQHQLAAETDATVLAEWRDAV

SEQ ID NO: 81588 - protein, 384 aa, unidentified
  source 1..384: note = Thalassospira permensis
  REGION 1..384: note = tr|A0A074J6J5|A0A074J6J5_9PROT Epoxyqueuosine reductase OS=Thalassospira permensis NBRC 106175; OX = 1353532 GN=queG PE=3 SV=1
MTVAAAITLESLQAKAREIGFDVCGVARPQIDERNQARLDEFVAAAEYGTMDWMNDPERLPRRRDPKMLWPDVKSVIVLGSNYGPAENPLTLLDHPDRAMISVYARNRDYHDLIKKRLKQLARWMMEQAQKAGADGEQVKVFVDTAPVLEKPLGQAAGIGWQGKHTNLVSREYGSWLFLGEVFTTLEFDLAAPEIDHCGSCDKCLSACPTDAFPGPYKLDARKCISYLTIEHDGLIPPQFRRAMGNRIYGCDDCLAVCPWNKFASRTQEMAFIPRAELTAPRLADFLDLDDETFRSFFTGSPIKRIGRAKFLRNVLTAVGNSGAVNLVPHVESLLTDESPLVRGSAVWALSQLMDGKAFDALRSRHERMESDPVVLAEWARPAP

SEQ ID NO: 81589 - protein, 378 aa, Thalassospira profundimaris
  REGION 1..378: note = tr|A0A199YGV0|A0A199YGV0_9PROT Epoxyqueuosine reductase OS=Thalassospira profundimaris OX=502049 GN=queG; PE = 3 SV=1
MTTNTRQNITFEMLQAKAREIGFDVCGVARPKIDARNQQRLDEFVAGGEYGSMAWMNDPERLPRRRDPEMLWPDVKSVIVLGSNYGPAENPMALLDHPDRAMISVYAKNKDYHDLIKKRLKQLARWVVEQSGGAEQVKVFVDTAPVLEKPLGQASGIGWQGKHTNLVSREFGSWLFLGEIFTTLELPEAEPEIDHCGSCTKCLSACPTDAFPAPYKLDARKCISYLTIEHDGPIPLEFRKPMGNRIYGCDDCLAVCPWNKFATRTEELAFIPRVELTAPRLADFLDLDDAGFRAFFTGSPIKRIGRAKFLRNVLIAAGNSKAPRLIPRIENLLSDESALIRASAIWALSQLMSAAEFASLKDIHAKIESDPVVLAEWD

SEQ ID NO: 81590 - protein, 384 aa, Thalassospira profundimaris
  REGION 1..384: note = tr|K2KV36|K2KV36_9PROT Epoxyqueuosine reductase; OS = Thalassospira profundimaris WP0211 OX=1177928 GN=queG; PE = 3 SV=1
MTTKTRQNITFEILQAKAREIGFDVCGVARPKIDARNQQRLDEFVAGGEYGSMAWMNDPERLPRRRDPEMLWPDVKSVIVLGSNYGPAENPMALLDHPDRAMISVYAKNKDYHDLIKKRLKQLARWVVEQSGGVEQVKVFVDTAPVLEKPLGQASGIGWQGKHTNLVSREFGSWLFLGEIFTTLDLPEAEPEIDHCGSCTKCLSACPTDAFPAPYKLDARKCISYLTIEHDGPIPLEFRKPMGNRIYGCDDCLAVCPWNKFATRTEELAFIPRAELTAPRLADFLDLDDAGFRAFFTGSPIKRIGRAKFLRNVLIAAGNSKAPRLIPRIENLLSDESALIRASAVWALSQLMSAAEFASLKDIHAKIESDPVVLAEWDQASNAA

SEQ ID NO: 81591 - protein, 386 aa, Thalassospira sp.
  REGION 1..386: note = tr|A0A2E2SX27|A0A2E2SX27_9PROT Epoxyqueuosine reductase OS=Thalassospira sp. OX=1912094 GN=queG PE=3 SV=1
MTVAAAITLESLQAKAREIGFDVCGVARPQIDERNQARLDEFVAAAEYGTMDWMNDPERLPRRRDPKMLWPDVKSVIVLGSNYGPAENPLTLLDHPDRAMISVYARNRDYHDLIKKRLKQLARWMIETAQKSGAGGEQVKVFVDTAPVLEKPLGQSAGIGWQGKHTNLVSRDYGSWLFLGEVFTTLEFDLAAPEIDHCGSCSKCLSACPTDAFPDPYKLDARKCISYLTIEHDGLIPLQFRRAMGNRIYGCDDCLAVCPWNKFASRTQEMAFIPRAELTAPRLADFLDLDDETFRSFFTGSPIKRIGRAKFLRNVLTAVGNSGAVNLVPRVESLLTDESPLVRGSAVWALSQLMDDSGFDALRSRHERMESDPVVLAEWARPASPA

SEQ ID NO: 81592 - protein, 380 aa, Thalassospira sp.
  REGION 1..380: note = tr|A0A1Q4URQ4|A0A1Q4URQ4_9PROT Epoxyqueuosine reductase OS=Thalassospira sp. TSL5-1 OX=1544451 GN=queG; PE = 3 SV=1
MLAHSISFRDIQDKAKDIGFDVCGVARPEIDPRNQQRLDEFVAGREYGSMEWMADPERLPRRRDPRVLWEDVKSVIVLGTNYGPAEDPLTLLDHPDRAMISVYAQNRDYHDLIKKRLKQLARWLMEQSREGEQVKVFVDTAPVLEKPLAQSAAIGWQGKHTNVVSRQYGSWLFLGEVFTTLEFDDAPNRAEIDHCGSCRNCLDACPTNAFPAPYKLDARKCISYLTIEHDGVIPREFRVAMGNRIYGCDDCLSVCPWNKFASRTEELAFIPRAELTAPRLADFLDMDDAAFRAFFTGSPIKRIGRAKFLRNVLIAIGNAGDRQVLPHLRALLKDPAAVIRASVVWALFRLMTTEEFAEIRQIQLAGEQDETVRAEWEAVA

SEQ ID NO: 81593 - protein, 384 aa, Thalassospira xiamenensis
  REGION 1..384: note = tr|A0A285U025|A0A285U025_9PROT Epoxyqueuosine reductase OS=Thalassospira xiamenensis OX=220697 GN=queG; PE = 3 SV=1
MTVAAAITLESLQAKAREIGFDVCGVARPQIDERNQVRLDEFVAAAEYGTMDWMNDPERLPRRRDPKMLWPDVKSVIVLGSNYGPAENPLTLLDHPDRAMISVYARNRDYHDLIKKRLKQLARWMIETGQKSGAGGEQVKVFVDTAPVLEKPLGQAAGIGWQGKHTNLVSRDYGSWLFLGEVFTTLEFDLAEPENDHCGSCSKCLSACPTDAFPGPYKLDARKCISYLTIEHDGLIPLQFRRAMGNRIYGCDDCLAVCPWNKFASRTQEMAFIPRAELTAPRLADFLDLDDETFRSFFTGSPIKRIGRAKFLRNLLTAVGNSGAAYLVPRVEGLLTDESPLVRGSAVWALSQLMDDSGFDVLRSRHERMESDPAVLAEWAREAS

SEQ ID NO: 81594 - protein, 384 aa, Thalassospira xiamenensis
  REGION 1..384: note = tr|A0A0B4XYA6|A0A0B4XYA6_9PROT Epoxyqueuosine reductase OS=Thalassospira xiamenensis M-5 = DSM 17429; OX = 1123366 GN=queG PE=3 SV=1
MTVGAAITLESLQAKAREIGFDVCGVARPQIDERNQARLDEFVAAAEYGTMDWMNDPERLPRRRDPKMLWPEVKSVIVLGSNYGPAENPLTLLDHPDRAMISVYARNRDYHDLIKKRLKQLARWMMEQAQKSGVGGEQVKVFVDTAPVLEKPLGQAAGIGWQGKHTNLVSRDYGSWLFLGEVFTTLEFDLAAPEIDHCGSCAKCLSACPTDAFPGPYKLDARKCISYLTIEHDGLIPPQFRRAMGNRIYGCDDCLAVCPWNKFASRTQEMAFIPRAELTAPRLADFLDLDDETFRSFFTGSPIKRIGRAKFLRNVLTAVGNSGAVNLVPRVESLLTDESPLVRGSAVWALSQLMDGKAFDALRSRHERMESDPVVLAEWARPAP

SEQ ID NO: 81595 - protein, 384 aa, Thalassospira xianhensis
  REGION 1..384: note = tr|A0A367U697|A0A367U697_9PROT Epoxyqueuosine reductase OS=Thalassospira xianhensis MCCC 1A02616; OX = 1177929 GN=queG PE=3 SV=1
MTVAAAITLESLQAKAREIGFDVCGVARPQIDERNQVRLDEFVAAAEYGTMDWMNDPERLPRRRDPKMLWPDVKSVIVLGSNYGPAENPLTLLDHPDRAMISVYAKNRDYHDLIKKRLKQLARWMIEQAQKSGAGGEQVKVFVDTAPVLEKPLGQSAGIGWQGKHTNLVSRDYGSWLFLGEVFTTLEFDLAEPEIDHCGSCSKCLSACPTDAFPGPYKLDARKCISYLTIEHDGLIPPQFRRAMGNRIYGCDDCLAVCPWNKFASRTQEMAFIPRAELTAPRLADFLDLDDETFRSFFTGSPIKRIGRAKFLRNVLTAVGNSGAVNLVPRVESLLTDESPLVRGAAVWALSQLMDDDRFDALRSRHERMESDPVVLAEWARPAP

SEQ ID NO: 81596 - protein, 379 aa, unidentified
  source 1..379: note = Thalassotalea agarivorans
  REGION 1..379: note = tr|A0A1I0CHQ6|A0A1I0CHQ6_THASX Epoxyqueuosine reductase OS=Thalassotalea agarivorans OX=349064 GN=queG; PE = 3 SV=1
MAEPTINYQQLAEKIKSWGEELGFAGVGICGIDLAEHEKPLLDWLDNNYHGSMDYMARHGLMRARAYELVPGTLRVVSVRMNYLPEGAKFAQTLKQPDKAYVSRYALGRDYHKLMRKRLKQLGEKIKSHCASFNYRPFVDSAPVLERPLAENAGLGWVGKHSLVIDEKSGSWFFLGELLVDIPLPVDTKPENKCGSCVACMTICPTGAIVEPYVVDARKCISYLTIEHKGVIDEALRPLMGNRIYGCDDCQLICPWNKYASLSNESDFQSRHNLDNSNLLDLFAFDEPTFMKTFEGSPIRRIGIDAWHRNIAIALGNAPYQQEVVDALEQKLSQCSDLVAEHVTWALHQQHKKATLVVEPKRQTLRLIRAVEKGLPRDA

SEQ ID NO: 81597 - protein, 414 aa, unidentified
  source 1..414: note = Thalassotalea euphylliae
  REGION 1..414: note = tr|A0A3E0TX28|A0A3E0TX28_9GAMM Epoxyqueuosine reductase OS=Thalassotalea euphylliae OX=1655234 GN=queG; PE = 3 SV=1
MTAAINYQDLAEKIKLWGQSLGFAQLGIADIDLSEHEPRLQAWLDNQYHGEMDYMARHGMMRARPNELEPGTVRVISARMNYLPPNAKFAATLKDKELGYVSRYALGRDYHKLMRKRLQQLGKKIQDYCTEFNFRPFVDSAPVLERPLAEKAGLGWVGKHSLLINQEAGSWFFLGELLVNLPLPVDNAPSNQCGHCVACMKICPTNAIVEPYVVDAKRCISYLTIENQSAIPVEFRKALGNRIYGCDDCQLICPWNKFSSLTEEVDFHPRQQLDGSTLLTLFAWRESEFLSRTEGSPIRRIGYHSWLRNIAVALGNAPFQPAIVGALTARAAQLRDESSEQAAKMVLEHIEWALAEQAAKQHSIAVNVPRNDTLLQDNEANSTSTNHDNANDNKTKRLNQRLIRAIEKGLPRDA

SEQ ID NO: 81598 - protein, 401 aa, unidentified
  source 1..401: note = Thalassotalea euphylliae
  REGION 1..401: note = tr|A0A3E0UK66|A0A3E0UK66_9GAMM Epoxyqueuosine reductase OS=Thalassotalea euphylliae OX=1655234 GN=queG; PE = 3 SV=1
MTAAINYQDLAEKIKLWGESLGFAQIGIADIDLKSHEPYLQAWLDNQYHGSMDYMARHGMMRARPQELEPGTVRVISARLNYLPPNAKFAQTLKNKKLGYVSRYALGRDYHKLMRKRLQQLGKKIQDYCSEFNFRPFVDSAPVLERPLAEKAGLGWVGKHSLLINQQAGSWFFLGELLVNLPLPVDSAPENQCGSCVACIKICPTNAIVAPYVVDAKRCISYLTIENQGAIPLEFRKALGNRIYGCDDCQLICPWNKFGSITLEDDFHPRQQLDASELVSLFTWQENEFLARTEGSPIRRIGYQSWLRNLAVALGNAPYEEQIVEVLTAKKQQADLASNTALSVMVIEHIDWALAEQQNKAKAIAVELVTIDSSITECDKKAQRLNQRLIRSIEKGLPRDA

SEQ ID NO: 81599 - protein, 382 aa, unidentified
  source 1..382: note = Thalassotalea sp.
  REGION 1..382: note = tr|A0A1Y5GSC4|A0A1Y5GSC4_9GAMM Epoxyqueuosine reductase OS=Thalassotalea sp. 42_200_T64 OX=1856287; GN = queG PE=3 SV=1
MNESAAINYQELAEKIKLWGKEFGFADVGICDVDLKSHEKALQHWLEQGYHGNMDYMARHDLMRARPDELLPGTLRVISVRLDYLPTEAKFAKTLKRDQHAFISRYALGRDYHKLMRNRLKQLGKKIENYCHNLNFRPFVDSAPVLERPLAEKAGLGWVGKHSLLLNNQAGSWFFLGELMVDIPLPVDTPKTNQCGQCVSCIKICPTNAIVAPYVVDARRCISYLTIELREAIPLEFRPLIGNRIYGCDDCQLICPWNKFAKLSAEDDFQPRNRLDNIHLLEVFAWDEDEFLKNTEGSPIRRIGFDCWQRNIAVALGNARYDEQIVSALAQQHIGASEMVKEHIDWALAQQQLKLEQLGENKNQRLTARLIRTIEKGLPRDA

SEQ ID NO: 81600 - protein, 380 aa, unidentified
  source 1..380: note = Thalassotalea sp.
  REGION 1..380: note = tr|A0A4U1B7U1|A0A4U1B7U1_9GAMM Epoxyqueuosine reductase OS=Thalassotalea sp. ZS-4 OX=2572245 GN=queG; PE = 3 SV=1
MDKKSKINYLELAEKIKHWGQELGFAEVGICEPDLQQHEQALQDWLDNLYHGDMEYMARHGMMRARATELLPGTLRVISTRMDYLPANAKFARVLKQTDHAYVSRYALGRDYHKLLRQRLKRLGENIKNYCEQLNYRPFVDSAPILERPLAAKAGLGWVGKHSLLLNQQAGSWFFLGELLVDIPLPTDTPVKEKCGSCVACIKICPTDAIVAPYVVDARRCISYLTIELRTAIPEEFRPLLGNRIYGCDDCQLICPWNRFANITQEDDFQPRQNLDEITLLELFAWSEFEFDKNLQGSPIRRIGYECWQRNLAVALGNAKPSEVIYQALNDKHPDSTPMVQEHIDWAIEQQRSKQQAVAATLRNKERLIRSIEKGLPRDA

SEQ ID NO: 81601 - protein, 366 aa, Thauera aminoaromatica
  REGION 1..366: note = tr|A0A5C7SLU8|A0A5C7SLU8_9RHOO Epoxyqueuosine reductase OS=Thauera aminoaromatica OX=164330 GN=queG PE=3; SV = 1
METKLPTPDGAAVDGTVLDGAALVARIRQWGRELGFDAVGVGGVDLADAEPGLVAWLEAGFHGDMDYMVRHGMKRARAAELLPGSVRVISVRMGYWPDAAPAMDVLGDPERAYVSRYALGRDYHKLVRNRLQKLADRISAEVPHQYRVFTDSAPILEVEHASRKGLGWRGKHTLLLDRTAGSWFFLGEILTDLPLPVDAPVASHCGRCTACIDACPTGAIVAPYRVDARRCISYLTIELHGAIPEELRPLLGNRIYGCDDCQLVCPWNRFAQLGREPDFAPRQGLDDARLAELFAWTAEEFSERTAGSPIHRIGHARWLRNIAVALGNGPATPAARAALQARADDEDAVVREHVAWALARLAAAAG

SEQ ID NO: 81602 - protein, 337 aa, Thauera aminoaromatica
  REGION 1..337: note = tr|N6YYJ5|N6YYJ5_9RHOO Iron-sulfur cluster binding protein (Fragment) OS=Thauera aminoaromatica S2 OX=1234381; GN = C665_11631 PE=3 SV=1
MPTPDGAAVDGTVLDGAALVARIRQWGRELGFDAVGVGGVDLADAEPGLVAWLEAGFHGDMDYMVRHGMKRARAAELLPGSVRVISVRMGYWPDAAPAMDVLGDPERAYVSRYALGRDYHKLVRNRLQKLADRISAEVPHQYRVFTDSAPILEVEHASRKGLGWRGKHTLLLDRTAGSWFFLGEILTDLPLPVDAPVASHCGRCTACIDACPTGAIVAPYRLDARRCISYLTIELHGAIPEELRPLLGNRIYGCDDCQLVCPWNRFAQLGREPDFAPRQGLDGARLAELFAWTAAEFSERTAGSPIHRIGHARWLRNIAVALGNGPATPAARAALQA

SEQ ID NO: 81603 - protein, 382 aa, Thauera aromatica
  REGION 1..382: note = tr|A0A2R4BML0|A0A2R4BML0_THAAR Epoxyqueuosine reductase OS=Thauera aromatica K172 OX=44139 GN=queG PE=3; SV = 1
MAAGLGGDTDNGVDNNAGEPAGNRLRLDAAGLVARIRQWGQALGFSAIGVGGTDLSGAEPGLAAWVEAGFHGDMDYMARHGMKRARAAELVPGTLRVISARMDYWPDAAPAQAVLDDPARAYVSRYALGRDYHKVLRARLQKLAERIAAETAHQYRVFTDSAPVLEVEHASRNGLGWRGKHTLLLDRAAGSWFFLGEIFTDLPLPLDPPVAPHCGRCSACIDACPTGAIVAPYRVDARRCISYLTIELHGAIPEPLRPLLGNRIYGCDDCQLACPWNRFAGLSCEPDFTPRHGLDGATLAELFAWTAADFAERTAGSPIHRIGHERWLRNLAVALGNAPSAPEVLAALESRAGDDSALVREHVAWARARHRRNGATAEDGAG

SEQ ID NO: 81604 - protein, 384 aa, Thauera chlorobenzoica
  REGION 1..384: note = tr|A0A1L6FEG9|A0A1L6FEG9_9RHOO Epoxyqueuosine reductase OS=Thauera chlorobenzoica OX=96773 GN=queG PE=3; SV = 1
MVMAAGLGGDTDNGVDNNAGEPAGDPLRLDAAGLVARIRQWGQALGFSAIGVGGTDLSDAEPGLAAWLEAGFHGGMDYMARHGMKRARAAELLPGTLRVISARMDYWPDAAPARAVLDDPARAYVSRYALGRDYHKVLRARLQKLAERIAAETAHQYRVFTDSAPVLEVEHACRNGLGWRGKHTLLLDRAAGSWFFLGEIFTDLPLPLDPPVAPHCGRCTACIDACPTGAIVAPYRVDARRCISYLTIELHGAIPGPLRPLLGNRIYGCDDCQLACPWNRFAGLSCEPDFAPRHGLDGATLAALFAWTAADFAERTAGSPIHRIGHERWLRNLAVALGNAPSTPEVRAALQSRAGDDSALVREHVAWALARHRRNGATAGDGAG

SEQ ID NO: 81605 - protein, 367 aa, unidentified
  source 1..367: note = Thauera humireducens
  REGION 1..367: note = tr|A0A140IDQ8|A0A140IDQ8_9RHOO Epoxyqueuosine reductase OS=Thauera humireducens OX=1134435 GN=queG PE=3; SV = 1
MAENAAADGMAGADGTPFDGAALLARIRQWAAELGFGAVGVADTDLHEAEPGLTAWLNAGFHGGMDYMARHGMKRARPAELVPGTLRVISLRLDYWPDAADAGANLADGQRAYVSRYALGRDYHKVLRNRLQKLAERIAAEVPHAYRVFTDSAPVLEVELASRNGLGWRGKHTLLLDRSAGSYFFLGEIFTDLPLPVDEPVEPHCGRCTACIDACPTGAIVAPYQVDARRCISYLTIELHGPIPEALRPSLGNRIYGCDDCQLACPWNRFARLTAEGDFAPRHGLDTARLVELFAWSEAVFAERTAGSPIHRIGHERWLRNIAVALGNAPAAPDVLAALQARADHPSALVREHVAWALARHGAPLAG

SEQ ID NO: 81606 - protein, 365 aa, Thauera linaloolentis
  REGION 1..365: note = tr|N6Z9U0|N6Z9U0_9RHOO Epoxyqueuosine reductase; OS = Thauera linaloolentis 47Lol = DSM 12138 OX=1123367; GN = queG PE=3 SV=1
MLMMANGLAGEADALVDGAALLARIRQWAAELGFGAIGVAGVDLGGAEPGLAAWLEAGFHGEMDYMLRHGMKRARPAELVPGTLRVISARLDYWPDAAGAEANLADGARAYVSRYALGRDYHKVLRNRLQKLAERIAAETPHAFRVFTDSAPVLEVELASRNGLGWRGKHTLLLDRGAGSYFFLGEIFTDLPLPLDAPVDAHCGRCTACIDACPTGAIVAPYSVDARRCISYLTIELKDAIPEALRPMLGNRIYGCDDCQLVCPWNRFARLTKEPDFAPRHGLDSAGLAALFAWSEVDFAERTAGSAIHRIGHERWLRNIAVALGNAPTTAEVLAALQSRADHPSALVREHVVWALARHGRQPAG

SEQ ID NO: 81607 - protein, 362 aa, Thauera phenylacetica
  REGION 1..362: note = tr|N6YVZ7|N6YVZ7_9RHOO Epoxyqueuosine reductase; OS = Thauera phenylacetica B4P OX=1234382 GN=queG PE=3 SV=1
MPAPGGAAVDGTVLDGAALVARIRQWGRELGFDAVGVGGVDLTDAEPGLAAWLEAGFHGHMDYMARHGMKRARAAELLPGSVRVISVRMGYWPDAAPALEVLADGERAYVSRYALGRDYHKLVRNRLQKLADRISAEVAHQYRVFTDSAPILEVEHASRKGLGWRGKHTLLLDRTAGSWFFLGEILTDLPLPVDAPVDSHCGRCTACIDACPTGAIVAPYRVDARRCISYLTIELHGAIPEALRPLLGNRIYGCDDCQLVCPWNRFAQLGREPDFAPRQGLDDARLAELFAWTAAQFSERTAGSPIHRIGHARWLRNIAVALGNGPATPAARAALQARADDEDAMVREHVAWALARLDAAAG

SEQ ID NO: 81608 - protein, 367 aa, unidentified
  source 1..367: note = Thauera propionica
  REGION 1..367: note = tr|A0A235EVQ6|A0A235EVQ6_9RHOO Epoxyqueuosine reductase OS=Thauera propionica OX=2019431 GN=queG PE=3; SV = 1
MAENAVADGMAGADGTPLDGAALLARIRQWAAELGFGAVGVADTDLHEAEPGLTAWLDAGFHGGMDYMARHGMKRARPAELVPGTLRVISLRLDYWPDAADAGANLADGQRAYVSRYALGRDYHKVLRNRLQKLADRIAAEMPHAYRVFTDSAPVLEVELASRNGLGWRGKHSLLLDRDAGSYFFLGEIFTDLPLPIDAPVESHCGRCTACIDTCPTGAIVAPYQVDARRCISYLTIELHGPIPEDLRPLLGNRIYGCDDCQLACPWNRFARLTAEGDFAPRHGLDSAGLVELFAWSEAEFVERTAGSPIHRIGHERWLRNIAVALGNAPTAPEVLAALRARAEHPSAVVREHVAWALARHGAPLAS

SEQ ID NO: 81609 - protein, 367 aa, Thauera sp.
  REGION 1..367: note = tr|A0A351A4D4|A0A351A4D4_9RHOO Epoxyqueuosine reductase OS=Thauera sp. OX=1905334 GN=queG PE=3 SV=1
MSSAAGAQPAAVSGWGPSDGLEFVAQIRQWGREFGFNAIGVGGIDLTDAEPGLMAWVEAGFHGDMDYMARHGLKRARAAELVPGTVRVISARMDYWPAAADAGAALADPQRAYVSRYALGRDYHKVLRARLQKLAERIAAAVPHQYRVFTDSAPVLEVEHASRNGLGWRGKHTLLLDRSAGSWFFLGEIFTDLPLPVDERLEPHCGRCTACIDACPTGAIVAPYRVDARRCISYLTIELQGAIPEALRPQVGNRIYGCDDCQLACPWNRFAQLSCEPDFAPRHRLDSATLVELFAWSAADFAERTAGSPIYRIGHERWLRNIAVALGNAPTTAAVLAALQARAQDDSAIVREHVAWALDRHGGAASG

SEQ ID NO: 81610 - protein, 366 aa, Thauera sp.
  REGION 1..366: note = tr|A0A0C3HXU1|A0A0C3HXU1_9RHOO Epoxyqueuosine reductase OS=Thauera sp. SWB20 OX=1572758 GN=queG PE=3 SV=1
METKLPAPDGAAVDGTVLDGAALVARIRQWGRELGFDAVGVGGVDLADAEPGLVAWLEAGFHGDMDYMVRHGMKRARAAELLPGSVRVISVRMGYWPDAAPAMDVLGDPERAYVSRYALGRDYHKLVRNRLQKLADRISAEVPHQYRVFTDSAPILEVEHASRKGLGWRGKHTLLLDRTAGSWFFLGEILTDLPLPVDAPVASHCGRCTACIDACPTGAIVAPYRLDARRCISYLTIELHGAIPEELRPLLGNRIYGCDDCQLVCPWNRFAQLGREPDFAPRQGLDDARLAELFAWTAAEFSERTAGSPIHRIGHARWLRNIAVALGNGPATPAARAALQARADDEDAVVREHVAWALARLAAAAG

SEQ ID NO: 81611 - protein, 369 aa, Thauera terpenica
  REGION 1..369: note = tr|S9ZS83|S9ZS83_9RHOO Epoxyqueuosine reductase; OS = Thauera terpenica 58Eu OX=1348657 GN=queG PE=3 SV=1
MESSSLMAADSFSDADGVAIDGVALLARIREWALELGFGAIGVADIDLSTAEPGLAAWLEAGFHGEMDYMLRHGMKRARAAELVPGTRRVISARLDYWPAAADAQAVLADGSLAYVSRYALGRDYHKVLRKRLQQLAERIATAVPHAFRVFTDSAPVLEVELASRSGLGWRGKHTLLLERNAGSYFFLGEIFTDLPLPLDAPAEAHCGRCTACIDACPTAAIVAPYQVDARRCISYLTIELKGAIPEDLRPLLGNRIYGCDDCQLVCPWNRFARLTAEGDFAPRHGLDSAALAALFAWSEADFAERTAGSPIHRIGYERWLRNIAVALGNAPSAPEVLAALQSRLEHPSALVREHVGWALARHAAPACG

SEQ ID NO: 81612 - protein, 473 aa, Thermaerobacter marianensis
  REGION 1..473: note = tr|E6SLU5|E6SLU5_THEM7 4Fe-4S ferredoxin-type domain-containing protein OS=Thermaerobacter marianensis (strain ATCC 700841 / DSM 12885 / JCM 10246 / 7p75a); OX = 644966GN=Tmar_1281 PE=4 SV=1
MAGRPSTYATPAALKAALQAEARRLGFAAVGVAAAEPLFDLAALLRLRQERAMATPWEDPDPARRSDPASLLPGARSVVAVAMAYDPPRAAAQAGERAVPGDGDANGWRGPDPSRPDPARQDPDRSRRRPEPPGEVALRGYVAAAGRTRSYQHVMRRRLEALGRWLEAAVPGCRWAVQVDTGPLVDRAWAERAGIGWIGKNACVIVPGRGSWVFLGELVTDVALPPDQPLADACGDCDLCLRACPTGAFLGPRQLDPRRCVSFLSQKPGMLDPDERAALGQSLYGCDACQVVCPYNRGAGPGHPALRPAAFWGTGPADEPAPAGEGNAGTAGSEAASAGPDGTGDSPVAPDLVALLRMGRADFRRRYRSLTGAWRGRKTWQRNAVVALGNRGAAARAAVSVLAELLRADPRPDMRALAAWALGRIGGGAARQALAGVLEREADHRVRAAVREALARMGGDPGDPAGHAVRPVP

SEQ ID NO: 81613 - protein, 504 aa, Thermaerobacter sp.
  REGION 1..504: note = tr|A0A4P7GV56|A0A4P7GV56_9FIRM tRNA epoxyqueuosine(34) reductase QueG OS=Thermaerobacter sp. FW80 OX=2546351 GN=queG PE=4 SV=1
MADAQATAQSRAALKTALLAEARRLGFVAAGVAAAAPLLDLEALLRWRQERGMATPWEDPDPARRADPATLLPGARSVVAVAMAYDPPGRRTASRPASAQDRAAGGGDRAAGGGTGRRRDGRAAGGSRDGGDGGPPLRGYVAAAGRTRSYQHVMRQRLEALGRWLEARVPGCRWAVQVDTGPLVDRAWAERAGLGWVGKNACLIVPGRGSWVFLGELVTDVALPPDQPVADACGDCDLCLRACPTQAFIGPRQLDPRRCVSFLSQKPGMLAPDERAALGQSLYGCDACQVVCPYNRSAGPGHPALRPDDTAPAGGAGNGTTSVPAAPVPSGAPTQARTGGAGGGRAPTAEAAAGPELDASRRAGDPAPDDGPPDATGRPDLVALLRMGRAEFRRRYRSLTGAWRGRKTWQRNALVALGNRGPAARSAVPALVRVLRDDPRPDLRALAAWALGRIGGECAQRALAEARAREDDPAVRAAIADALRPAPGAGRGGGRAEAYGAQAF

SEQ ID NO: 81614 - protein, 413 aa, Thermaerobacter sp.
  REGION 1..413: note = tr|A0A371Z866|A0A371Z866_9FIRM tRNA epoxyqueuosine(34) reductase QueG OS=Thermaerobacter sp. PB12/4term OX=2293838 GN=queG PE=4 SV=1
MACPDPAGLKRALLAQARRLGFVAAGVAAAAPQVDLEWLLRRRQAQGMATPWEDPDPGRRTDPSSLLPGARSVVAVAMAYDPPRTRRRAPEGRSPREGAGHRGESRDPAALRGAALRGYVAAAGRTRSYQHVMTRRLQALGRWLEATVPGGCRWAVQVDTGPLVDRAWAQQAGIGWIGKNACLIVPGTGSWVFLGELVTDVEFPPDQPLADACAGCDLCLRACPTGAFIAPRQLDPRRCISFLSQKPGMLDEEERAALGQSLYGCDACQAVCPFNRRAVPGHPALRPRPGDPEDPAAPLLPDLLAMGRAAFQSRYRPLTGAWRGRKAWQRNAIVALGNRGPAARPAVPALARVLLGDPRPDLRALAAWALGRIGGHAAREALERARAKDRDAAVRQAAARALAEGARAVKGPD

SEQ ID NO: 81615 - protein, 408 aa, Thermaerobacter subterraneus
  REGION 1..408: note = tr|K6Q3Y6|K6Q3Y6_9FIRM Putative Fe-S protein; OS = Thermaerobacter subterraneus DSM 13965 OX=867903; GN = ThesuDRAFT_01594 PE=4 SV=1
MACPDPAGLKRALLAEARRLGFVAAGVAAAAPQVDLEWLLRRRQAQGMATPWEDPDPARRADPSSLLPGARSVVAVAMAYDPPRTRRRAAEGQGPREGTGDRGGRREPPSLRGYVAAAGRTRSYQHVMTRRLQALGRWLEATVPGGCRWAVQVDTGPLVDRAWARQAGIGWIGKNACLIVPGAGSWVFLGELVTDVELPPDQPLADACAGCDLCLRACPTGAFLAPRQLDPRRCISFLSQKPGMLDEEERAALGQSLYGCDACQAVCPFNRRAVPGHPALRPRPGDPEDPAAPLLPDLLAMGRAAFQARYRPLTGAWRGRKAWQRNAIVALGNRGPAARPAVPALARVLLGDPRPDLRALAAWALARIGGDAAREALERARAQDPDAAVRQAAARALAEGARPARKPV

SEQ ID NO: 81616 - protein, 366 aa, Thermanaeromonas toyohensis
  REGION 1..366: note = tr|A0A1W1VHP5|A0A1W1VHP5_9THEO Epoxyqueuosine reductase OS=Thermanaeromonas toyohensis ToBE OX=698762; GN = SAMN00808754_0644 PE=4 SV=1
MALLEALLGKASELGFKAGVIEARVVFERGLARLKEREEYRWVTPFVSGSLEQRCRPLSLYPGARTVIALAYPWYFPDPAPWKPGQGIIAMSARGEDYHRVLRRRLEPLVSWLREQGARLVVTQVDNGPLLEREAAFWAGLGYYGYNCSLIVPGWGSWVALGLIVTDLEIEPTPYQEERRCKECGQCFAACPSGALIGPYILNPSRCLSYLTQKRGFLPREVRSLLGARLYGCDTCQEVCPENEGLSREQAQLAKPFPFPDLVNVLQLDNHSFKEQFGATALAWRGKGVLKRNALIALGNSGYATEEAIKIMEQFLSSPSAILRAHAAWALGQLKVPHSHLALEMALQKEQDPMVRQELEKALFSY

SEQ ID NO: 81617 - protein, 385 aa, unidentified
  source 1..385: note = Thermanaerothrix daxensis
  REGION 1..385: note = tr|A0A0P6XLP3|A0A0P6XLP3_9CHLR 4Fe-4S ferredoxin-type domain-containing protein; OS = Thermanaerothrix daxensis OX=869279 GN=SE15_04495 PE=4; SV = 1
MSGSSNTNSLIEILHFKAEQLGLELLGITVPVAPPHLSTYLGWIAQGHHAGMAYMASERNRFLRTHPEAILPEAQALLVVGMRYPAPHALPPPSSHPVGRIASYAWGKDYHLTLPALLQELLKVAEEYLGHPIPSRLYCDTGPVLERDFAQQAGLGWIGKNTCLIHPRKGSYFFLGEAFIGAPLPPTPAFSTDHCGTCRRCIEACPTQCILPNRTIDAGRCISYLTIENKGAIPRALRPRMGNWVFGCDICQMVCPWNLRFAKADGSPAFEMYPEIAYPDLRRELRLTPEAFKERYGKTPVIRARRRGFLRNLAVALGNAADPSTVPTLGQVLQEEPEPLIRSHAAWALGRIQTRAARYVLEKARKSEPIPEVQMEINAALEETP

SEQ ID NO: 81618 - protein, 382 aa, Thermoactinomyces sp.
  REGION 1..382: note = tr|A0A151Z016|A0A151Z016_9BACL Epoxyqueuosine reductase OS=Thermoactinomyces sp. AS95 OX=1811386 GN=queG; PE = 3 SV=1
MNAEELKQRLKEKAKEIGIDKIGFASADPFTELKERLKESREKGYASGFEEPDIEKRVDPSLSLPQAKTIIAIALSYPSRLKNAPRSEEGAYRGYFCRASWGQDYHDVLKERLRQLEAALKEWVPEARTMIMVDTGALSDRAVAERAGIGWSGKNTAIITEEFGSWVYLGEMITDVYLPPDEPVTDGCGDCTLCLDACPTGALVQPGQLNAQSCIAYLTQTKGFLPDEYRGKIGNRLYGCDTCQIVCPKNRKIDFDHQPEFRPDAEKVKPLLKPLLSISNREFKETYGSMAGSWRGKKPIQRNAILALAHFRDRSAVSGLVRLLRDDPRPVIRGTAAWALGKIGGDEAKEALLEAKEKETDPDVLREIDKGLEFFAGDPVVS

SEQ ID NO: 81619 - protein, 393 aa, Thermoactinomyces sp.
  REGION 1..393: note = tr|A0A1H3QPI6|A0A1H3QPI6_9BACL Epoxyqueuosine reductase OS=Thermoactinomyces sp. DSM 45892 OX=1882753; GN = SAMN05444416_114109 PE=4 SV=1
MNAMELKQKLIEKANEIGIDKIGFTTADPFVELKQKLVQHRESGYESGFEEPDLNLRTIPTLTLPEAKSIIAIAIAYPSKMSNPPRSEPGAYRGIFARASWGQDYHDVLRDKLAQLEAYLLELVPTARIQSMVDTGALSDRAVAERAGIGWSAKNTSILTEEFGSWIYLGEMITDLYLPPDESVLDGCGDCTLCLDVCPTGALVEPGQLDSTKCIAFLTQTKGFIDEFYREKIGNRLYGCDTCQTVCPKNRKRNFTHHAEFEPDPELVKPLLQPLLTMSNREFKEKYGYMSGSWRGKKPIQRNAIIALAHFKDQSAVPLLKNLLRQDPRPVIRGMSAWALSKISGTGAEEILNQAFHEEQDEEVLREIRFGLEQIQKSATSPKTKEDYHDYSL

SEQ ID NO: 81620 - protein, 378 aa, Thermoactinomyces vulgaris
  REGION 1..378: note = tr|A0A0N0Y5Q6|A0A0N0Y5Q6_THEVU Epoxyqueuosine reductase OS=Thermoactinomyces vulgaris OX=2026 GN=queG; PE = 3 SV=1
MNSADLKQKLISKAKEIGIDKIGFTTADPFIALRERLKESQEKGYASGFEEPDIEKRVRPERSLPEAKSIIAIALAYPSKLKNPPRSEAGAYRGIFCRASWGEDYHHVLREKLTLLSAYLQELVPDARTQVMVDTGALSDRAVAERAGIGWSGKNTSIITKEFGSWVYLGEMITDVYIPPDTPATDECGDCTICIDACPTGAIVQAGQLNAQACIAYLTQTKGFLAEEYRSKLGNRLYGCDTCQTVCPKNRKRHFDHQTAFQPDPEKVKPLLKPLLQMSNREFRERFGRMSGAWRGKKPIQRNAIIALAHFKDQTAIPDLVRLLAEDPRPVIRGTAAWALGKIGGKEVLEALQKAQEKEGDQEVLHEIGKALDMAQNA

SEQ ID NO: 81621 - protein, 380 aa, Thermoanaerobacter brockii
  REGION 1..380: note = tr|E8UQL3|E8UQL3_THEBF 4Fe-4S ferredoxin-type domain-containing protein OS=Thermoanaerobacter brockii subsp. finnii (strain ATCC 43586 / DSM 3389 / AKO-1); OX = 509193GN=Thebr_0745 PE=4 SV=1
MDCVTKEEIKKFAQQIGVDLVGFASPDCLKEYDNFLKERENLGYSCSIEERDIQKRISPEFILPEVKSIIAIALSYNVEYEIKYYSRSFGIVSRSSWGIDYHKVLKEKMEKLSEFIKSKCEGVKTVCLVDNNPLLEREIAYHAGIGWFGKNGLIINDEYGSYIFLGEILINKYFEPDAPQKTKCGDCDLCIKACPTNAIVEPYIINAHKCLSYITVKKGKIEEKMSKKMGRRIYGCDTCQHVCPFNKRAKKVVRSEFVPDKLLPRHDLIEILNMSKKEFAEIFGPTSSSWRGKSIIIRNAIIACVNTKEKSCIEPLKNLLKSQSPLLRGYSAWALSHLCDKEILSEIENALLKEKDEMAKKMMIEVLNKLKGDKIENNER

SEQ ID NO: 81622 - protein, 374 aa, Thermoanaerobacter ethanolicus
  REGION 1..374: note = tr|C7IV20|C7IV20_THEET 4Fe-4S ferredoxin-type domain-containing protein OS=Thermoanaerobacter ethanolicus CCSD1 OX=589861 GN=TeCCSD1DRAFT_2131 PE=4 SV=1
MDCVTKEEIKKFAQQIGVDLVGFASPDCLKEYDNFLKERENLGYSCSIEERDIQKRISPEFILPEVKSIIAIALSYNVEYEIKYYSRSFGIVSRSSWGIDYHKVLKEKMEKLSEFIKSKCEGVKTVCLVDNNPLLEREIAYHAGIGWFGKNGLIINDEYGSYIFLGEILINKYFEPDAPQKTKCEDCNLCIKACPTNAIAEPYIIDANKCLSYITVKKGKIEEKIAKKMGRRIYGCDTCQQVCPFNKRAKKVVRPEFVPDKLLPRHDLIEILNMSKKEFAEIFGPTSSSWRGKSIIIRNAIIACVNTKEKSCIEPIKNLLKSQSPLLRGYSAWALSHLCDKDKEVVVEIKEALIEEKDEFAKEMMAKAINRLKG

SEQ ID NO: 81623 - protein, 380 aa, Thermoanaerobacter italicus
  REGION 1..380: note = tr|D3T3L4|D3T3L4_THEIA 4Fe-4S ferredoxin-type domain-containing protein OS=Thermoanaerobacter italicus (strain DSM 9252 / Ab9) OX=580331 GN=Thit_1563 PE=4 SV=1
MGCVTKQEIENYARQIGIDLIGFASPDCLKEYKNFLKERENLGYSCSIEERDIQKRISPEFILPEVKSIIAIALSYNVKYEIKNYSRNFGIISRTSWGIDYHKVLKEKMEKLSEFIKSKCEGVETICLVDNNPLLEREIAYHAGIGWYGKNGLIINDEYGSYIFLGEILINKYFESDIPKQSKCGDCDLCVKACPTKAIVKPYIINANKCLSYITVKKGKIDEKMAKKMGRRIYGCDTCQQVCPFNKRAKKVVRPEFLPDKLLPRHELIEILNMSKKEFEEIFGPTSSSWRGKSIIIRNAIISCVNTKEKNCIEPIKNLLKSQSPLLRGYSAWALSNLCDKEILSEIENALLREKDEMAKKMMTEALNKLKGDKIENHKG

SEQ ID NO: 81624 - protein, 380 aa, Thermoanaerobacter kivui
  REGION 1..380: note = tr|A0A097ASJ4|A0A097ASJ4_THEKI Epoxyqueuosine reductase QueG OS=Thermoanaerobacter kivui OX=2325 GN=queG; PE = 4 SV=1
MECITKEQIRDFAREIGIDLVGFAKPDCLKEDQERLKEREALGLSCSIEERDVLKRISPEFILPEVKSIITIAVSYNVDYDIRHSNRSYGIISRSSWGIDYHKVLKEKMEKLSEFIKSKCQEVKTVCLVDNNPLLEREIAYHAGIGWFGKNGLIINDEYGSYIFLGEILINKYFEPDAPQKTKCGDCNLCIKACPTNAIAEPYIIDTNKCLSYITVKKGKIEEKIAKKMGRRIYGCDTCQQVCPFNKRAKKVVRPEFVPDKLLPRHDLIEILNMSKKEFAEIFGPTSSSWRGKSIIIRNAIIACVNTKEKSCIEPIKNLLKSQSPLLRGYSAWALSHLCEKEILSEIEDALLKEKDEMAKKMMIEALNKLKGDKIENNKG

SEQ ID NO: 81625 - protein, 380 aa, Thermoanaerobacter mathranii
  REGION 1..380: note = tr|D7AQ38|D7AQ38_THEM3 4Fe-4S ferredoxin-type domain-containing protein OS=Thermoanaerobacter mathranii subsp. mathranii (strain DSM 11426 / CIP 108742 / A3); OX = 5833 58 GN=Tmath_1570 PE=4 SV=1
MGCVTKQEIENYARQIGIDLIGFASPDCLKEYKNFLKERENLGYSCSIEERDIQKRISPEFILPEVKSIIAIALSYNVKYEIKNYSRNFGIISRTSWGIDYHKVLKEKMEKLSEFIKSKCEGVETICLVDNNPLLEREIAYHAGIGWYGKNGLIINDEYGSYIFLGEILINKYFESDIPKQSKCGDCDLCVKACPTKAIVKPYIINANKCLSYITVKKGKIDEKMAKKMGRRIYGCDTCQQVCPFNKRAKKVIRPEFLPDKLLPRHELIEILNMSKKEFEEIFGPTSSSWRGKSIIIRNAIISCVNTKEKNCIEPIKNLLKSQSPLLRGYSAWALSNLCDKEILSEIENALLREKDEMAKKMMTEALNKLKGDKIENHKG

SEQ ID NO: 81626 - protein, 380 aa, Thermoanaerobacter pseudethanolicus; identical to SEQ ID NO: 81621
  REGION 1..380: note = tr|B0K870|B0K870_THEP3 4Fe-4S ferredoxin-type domain-containing protein OS=Thermoanaerobacter pseudethanolicus (strain ATCC 33223 / 39E) OX=340099; GN = Teth39_0723 PE= 4 SV=1

SEQ ID NO: 81627 - protein, 374 aa, Thermoanaerobacter siderophilus
  REGION 1..374: note = tr|I9KU18|I9KU18_9THEO Iron-sulfur cluster binding protein, putative OS=Thermoanaerobacter siderophilus SR4; OX = 880478 GN=ThesiDRAFT1_1510 PE=4 SV=1
MDCVTKEEIKKFAQQIGIDLVGFASPDCLKEYNNFLKERENLGYSCSIEERDIQKRISPEFILPEVKSIIAIALSYNVEYEVKYYSRSFGIVSRSSWGVDYHKVLKEKMEKLSEFIKSKCQEVKTVCLVDNNPLLEREIAYHAGIGWFGKNGLIINDEYGSYIFLGEILINKYFEPDAPQKTKCGDCNLCIKACPTNAIVEPYIIDANKCLSYITVKKGKIEEKIAKKMGRRIYGCDTCQQVCPFNKRAKKVVRPEFVPDKLLPRHDLIEILNMSKKEFAEIFGPTSSSWRGKSIIIRNAIIACVNTKEKSCIEPIKNLLKSQSPLLRGYSAWALSHLCDKDKEVVVEIKEALIEEKDEFAKEMMAKAINRLKG

SEQ ID NO: 81628 - protein, 380 aa, Thermoanaerobacter sp.; identical to SEQ ID NO: 81621
  REGION 1..380: note = tr|A0A358VZF7|A0A358VZF7_THESB tRNA epoxyqueuosine(34) reductase QueG OS=Thermoanaerobacter sp. OX=1755 GN=queG PE=4 SV=1

SEQ ID NO: 81629 - protein, 374 aa, Thermoanaerobacter sp.
  REGION 1..374: note = tr|A0A0B3BEH8|A0A0B3BEH8_9THEO Epoxyqueuosine reductase OS=Thermoanaerobacter sp. YS13 OX=1511746; GN = THYS13_09970 PE=4 SV=1
MDCVTKEEIKKFAQQIGIDLVGFASPDCLKEYDNFLKERKNLGYSCSIEERDIQKRISPEFILPEVKSIIAIALSYNVEYEVKYYSRSFGIVSRSSWGIDYHKVLKEKMEKLSKFIKSKCQEVKTVCLVDNNPLLEREIAYHAGIGWFGKNGLIINDEYGSYIFLGEILINKYFEPDAPQKTKCGDCNLCIKACPTNAIVEPYIINANKCLSYITVKKGKIEEKMSKKMGRRIYGCDTCQQVCPFNKRAKKVVRPEFLPDKLLPRHDLIEILNMSKKEFAEIFGPTSSSWRGKSIIIRNAIIACVNTKGKSCIEPIKNLLKSQSPLLRGYGAWALSHLCDKNKEVVVEIKEALIEEKDEFAKEMMTKAINRLKG

SEQ ID NO: 81630 - protein, 380 aa, Thermoanaerobacter thermocopriae
  REGION 1..380: note = tr|A0A101D7H0|A0A101D7H0_9THEO 4Fe-4S ferredoxin-type domain-containing protein; OS = Thermoanaerobacter thermocopriae OX=29350 GN=XD37_1353; PE = 4 SV=1
MDCVTKEEIKKFAQQIGVDLVGFASPDCLKEYDNFLKERENLGYSCSIEERDIQKRISPEFILPEVKSIIAIALSYNVEYEIKYYSRSFGIVSRSSWGIDYHKVLKEKMEKLSEFIKSKCEGVKTVCLVDNNPLLEREIAYHAGIGWFGKNGLIINDEYGSYIFLGEILINKYFEPDAPQKTKCGDCDLCIKACPTNAIVEPYIINAHKCLSYITVKKGKIEEKMSKKMGRRIYGCDTCQHVCPFNKRAKKVVRPEFVPDKLLPRHDLIEILNMSKKEFAEIFGPTSSSWRGKSIIIRNAIIACVNTKETSCIEPIKNLLKSQSPLLRGYSAWALSYLCDKEILSEIENALLKEKDEMAKKMMIEVLNKLKGDKIENNER

SEQ ID NO: 81631 - protein, 374 aa, Thermoanaerobacter thermohydrosulfuricus
  REGION 1..374: note = tr|A0A1G7SL22|A0A1G7SL22_THETY Epoxyqueuosine reductase OS=Thermoanaerobacter thermohydrosulfuricus; OX = 1516 GN=SAMN04244560_01999 PE=4 SV=1
MDCVTKEEIKKFAQQIGIDLVGFASPDCLKEYNNFLKERENLGYSCSIEERDIQKRISPEFILPEVKSIIAIALSYNVEHEIKYYSRSYGIISRSSWGVDYHKVLKEKMEKLSEFIKSKCQEVKTVCLVDNNPLLEREIAYHAGIGWFGKNGLIINDEYGSYIFLGEILINKYFESDAPQKTKCGDCNLCIKACPTNAIAEPYIIDANKCLSYITVKKGKIEEKIAKKMGRRIYGCDTCQQVCPFNKRAKKVVRPEFVPDKLLPRHDLIEILNMSKKEFAEIFGPTSSSWRGKSIIIRNAIIACVNTKEKSCIEPIKNLLKSQSPLLRGYSAWALSHLCDKDKEVVVEIKEALIEEKDEFAKEMMAKAINRLKG

SEQ ID NO: 81632 - protein, 374 aa, Thermoanaerobacter thermohydrosulfuricus
  REGION 1..374: note = tr|M8DPM2|M8DPM2_THETY Iron-sulfur cluster binding protein, putative OS=Thermoanaerobacter thermohydrosulfuricus WC1 OX=1198630 GN=TthWC1_1996 PE=4; SV = 1
MDCVTKEEIKKFAQQIGIDLVGFASPDCLKEYNNFLKERENLGYSCSIEERDIQKRISPEFILPEVKSIIAIALSYNVEHEIKYYSRSYGIISRSSWGVDYHKVLKEKMEKLSEFIKSKCQEVKTVCLVDNNPLLEREIAYHAGIGWFGKNGLIINDEYGSYIFLGEILINKYFESDAPQKTKCEDCNLCIKACPTNAIAEPYIIDANKCLSYITVKKGKIEEKIAKKMGRRIYGCDTCQQVCPFNKRAKKVVRPEFVPDKLLPRHDLIEILNMSKKEFAEIFGPTSSSWRGKSIIIRNAIIACVNTKEKSCIEPIKNLLKSQSPLLRGYSAWALSHLCDKDKEVVVEIKEALIEEKDEFAKEMMAKAINRLKG

SEQ ID NO: 81633 - protein, 374 aa, Thermoanaerobacter uzonensis
  REGION 1..374: note = tr|A0A1M4WKK3|A0A1M4WKK3_9THEO Epoxyqueuosine reductase OS=Thermoanaerobacter uzonensis DSM 18761; OX = 1123369 GN=SAMN02745195_01196 PE=4 SV=1
MDCVTKEEIKNFAKQIGIDLIGFASPDCLKEYDNFLKERENLGYSCSIEERDIQKRISPEFILPEVKSIIAIALSYNIEYEIKYYSRSFGIVSRSSWGIDYHKVLKEKMEKLSEFIKSKCQEVKTVCLVDNNPLLEREIAYYAGIGWFGKNGLIINDEYGSYIFLGEILVNKYFEPDAPQKTKCGDCNLCIKACPTNAIVEPYIINANKCLSYITVKKGKIEEKMSKKMGRRIYGCDTCQHVCPFNKRAKKVVRPEFVPDKLLPRHDLIEILNMSKKEFAEIFGPTSSSWRGKSIIIRNAIIACVNTKEKSCIEPIKNLLKSQSPLLRGYSAWALSHLCDKNKEVVVEIKEALIEEKDEFAKEMMAKAIDRLKG

SEQ ID NO: 81634 - protein, 374 aa, Thermoanaerobacter wiegelii
  REGION 1..374: note = tr|G2MVH0|G2MVH0_9THEO 4Fe-4S ferredoxin-type domain-containing protein OS=Thermoanaerobacter wiegelii Rt8.B1 OX=697303 GN=Thewi_1698 PE=4 SV=1
MDCVTKEEIKKFAQQIGIDLVGFASPDCLKEYNNFLKERENLGYSCSIEERDIQKRISPEFILPEVKSIIAIALSYNVEHEIKYYSRSYGIISRSSWGVDYHKVLKEKMEKLSEFIKSKCQEVKTVCLVDNNPLLEREIAYHAGIGWFGKNGLIINDEYGSYIFLGEILINKYFEPDVPQKTKCGGCDLCIKACPTKAIIEPYIIDANKCLSYITVKKGKIEEKIAKKMGRRIYGCDTCQQVCPFNKRAKKVVRPEFVPDKLLPRHDLIEILNMSKKEFAEIFGPTSSSWRGKSIIIRNAIIACVNTKEKSCIEPIKNLLKSQSPLLRGYSAWALSHLCDKDKEVVVEIKEALIEEKDEFAKEMMAKAINRLKG

SEQ ID NO: 81635 - protein, 367 aa, unidentified
  source 1..367: note = Thermoanaerobacteraceae bacterium
  REGION 1..367: note = tr|A0A5D8Q9W2|A0A5D8Q9W2_9THEO tRNA epoxyqueuosine(34) reductase QueG; OS = Thermoanaerobacteraceae bacterium A05MB OX=2606906; GN = queG PE=4 SV=1
MICVKDEIREYALSIGFDVVGFTGADVFDIADVLKERGEKGYLSGLEKGGIEERIDPRKVLPEARSIISVGIYYGGTKRSEKNKGMISQSGRGRDYHLILDKMMGELVDYLKCEYNAEAVCLADNDPLVDREIARRAGVGFFGKNCSIINPFMGSWIFLGEILTDLDILPDVPLMHACGDCDRCIKACPTGAIAAPYVLNAKRCLSYVTVMKGFVPSEFRERLQNRIYGCDTCQEACPYNRVDLPVNSCLAQDIPYDMEDIGFILSMDSKQFKESFKNTSAGWRGRTVIQRNGLIAAGNMRLKGQAENIIRLLSDERPVIRGTAAWAISRIMGKEALGILYEASKIEKDSEVRREIEEAISWIKKGQ

SEQ ID NO: 81636 - protein, 350 aa, unidentified
  source 1..350: note = Thermoanaerobacteraceae bacterium
  REGION 1..350: note = tr|A0A3A9JR94|A0A3A9JR94_9THEO tRNA epoxyqueuosine(34) reductase QueG; OS = Thermoanaerobacteraceae bacterium SP2 OX=2292448; GN = queG PE=4 SV=1
MGLKEDIKKFAKDIGLDAVGFASAEPFLEEKKILEQKKAKGLLSPFEEQDIEQRCYPEKLLPGARTIICFAMGYLINPYRPVETGLKGPLFGKISRYALVKDYHYVLMDKLKAVIEFISKRKQGRFMIFVDTGSLMDKAAARRAGIGWIGENTCLFTPDLGSWVFLGEILTDIEIEPDEPARDLCDHCGRCVKACPTGALMAPFQINPHHCLSYITQIRGSLPEEFRKPMGSRIFGCDTCQEACPKNNSVRIPHHPEFVPDQPLTSNLLKLATIDKRDFERIFKPTAAGWRGRNVLRRNAICALGNMGKGETDKENVMLLLKKLACDPSEMIREQAGWSFEQLLSSRRRY

SEQ ID NO: 81637 - protein, 350 aa, unidentified; identical to SEQ ID NO: 81636
  source 1..350: note = Thermoanaerobacterales bacterium
  REGION 1..350: note = tr|A0A3G2R6Q5|A0A3G2R6Q5_9FIRM tRNA epoxyqueuosine(34) reductase QueG; OS = Thermoanaerobacterales bacterium SK-G1 OX=2316383; GN = queG PE=4 SV=1

SEQ ID NO: 81638 - protein, 380 aa, Thermoanaerobacterium aotearoense
  REGION 1..380: note = tr|W9E7Y0|W9E7Y0_9FIRM 4Fe-4S ferredoxin-type domain-containing protein OS=Thermoanaerobacterium aotearoense SCUT27 OX=1421016 GN=V518_2117 PE=4 SV=1
MACVTKEEIKEFAYKSGIDVIGFASPDCLFEYRDLLLYRFNNGLNCNIEEKDAEKRINPYYLLDDVKTIISVAISYNVDYKFDPPKSGYGTISKTAWGVDYHKVMIDLLRNLEKFISSKCGAVKTVLLVDNNPLLERAIAYNAGIGFFGKNNMIINEEYGSYLFLGEMLINVPFEPDSKVESKCGSCARCLKACPGKALIEEYKIDANKCLSYATIQKGYLSDSTLKRLGTRIYGCDTCQDVCPFNEKAKKVTRREFTPQNLKPKHDLKDILCLDNKKFKELFGATSASWRGKNTIIRNAIIAAINLNDKDSIQQLRKLISSESAYIRGYSAYALSILDKENAFPHIEKAYLNEKDETAKEFMKKAMMNIRGETFEDNER

SEQ ID NO: 81639 - protein, 380 aa, Thermoanaerobacterium saccharolyticum; identical to SEQ ID NO: 81638
  REGION 1..380: note = tr|I3VY97|I3VY97_THESW 4Fe-4S ferredoxin-type domain-containing protein OS=Thermoanaerobacterium saccharolyticum (strain DSM 8691 / JW/SL-YS485) OX=1094508; GN = Tsac_2 494 PE=4 SV=1

SEQ ID NO: 81640 - protein, 380 aa, Thermoanaerobacterium sp.
  REGION 1..380: note = tr|A0A1X2G115|A0A1X2G115_9FIRM tRNA epoxyqueuosine(34) reductase QueG OS=Thermoanaerobacterium sp. PSU-2 OX=1930849 GN=BVF91_00280 PE=4 SV=1
MTCVTKEEIKEFAYKSGIDVIGFASPDCLFEYRDLLLYRLNNGLNCNIEEKDVEKRINPYYLFSDVKTIISVAVSYNVDYEFEVPKSGYGVISKTAWGTDYHKVMIDLLKNLENFISSKCGGTKTVLLVDNNPLLERAIAYNAGIGFFGKNNMIINEEFGSYLFLGEMLINVQFEPDSKIESKCGSCTRCLKACPGKALIEEYKIDANKCLSYATIKKGYLSDSTLKRLGTRIYGCDTCQDVCPFNEKAKKVTRREFMPQNLKPKHDLKDILCLDNKKFKELFGATSASWRGKNTIIRNAIIAAINSNDKDSIEPLKKLINSESAYIRGYSAYALSILDKENAFPYIEKAYLNEKDESTKEFMKKAITNIRGETFDDNER

SEQ ID NO: 81641 - protein, 225 aa, Thermoanaerobacterium sp.
  REGION 1..225: note = tr|A0A285BJ91|A0A285BJ91_9FIRM Epoxyqueuosine reductase QueG (Queuosine biosynthesis); OS = Thermoanaerobacterium sp. RBIITD OX=1550240; GN = SAMN05660242_2869 PE=4 SV=1
MDNEKILIKKIKEWGASDIGFSDLIDVLPESLKDLRYGITVIVKLSNRIIDEISDKPTYTYFHHYRSVNTLIDQITLRAVLMLEEWGYNALAVPASQSIKELGEYRGLFQHKTAATKAGLGWIGKNGLLITEKYGPRVRLGTILTDMKLSSGTPIEISKCGNCNLCVRNCPAMALYGKTWKAGMLRNEIVDARACSEYMNKKFKHIGRGSVCGICIKVCPYGKKI

SEQ ID NO: 81642 - protein, 380 aa, Thermoanaerobacterium thermosaccharolyticum
  REGION 1..380: note = tr|A0A231VL31|A0A231VL31_THETR Putative fe-s protein; OS = Thermoanaerobacterium thermosaccharolyticum OX=1517; GN = queG PE=4 SV=1
MTCVTKDEIREFAYKSGIDIVGFASPDCLFKYRDLLKNRYENGLSCNIEEKDIEKRINPYYFLKDVKSIVSIAVSYNIVYEADSPKSAYGTISRTAWGVDYHKVLINLLEKLRIFILSKCDDAKTVLLVDNNPLLERAIAYNAGIGFYGKNNMIINEKYGSYLFLGEMLLNIYFEPDKKVETKCGSCTRCLKACPGKALVGEYKIDANKCLSYATIKKGYLSDDTIKKIGTRIYGCDTCQDVCPFNKTAKRVIKDEFIPRGLKPKHDLKEILSLNKEKFQEVFGPTSASWRGKNTMIRNAIIASINSNDKNAIEPLKSLLDGESSYLRGYSAYALSILDGENSLPYIEKAYFKETDVSAKMFMKKAIKKIRGEVFEDNER

SEQ ID NO: 81643 - protein, 380 aa, Thermoanaerobacterium thermosaccharolyticum
  REGION 1..380: note = tr|L0ILJ7|L0ILJ7_THETR Uncharacterized Fe-S protein; OS = Thermoanaerobacterium thermosaccharolyticum M0795; OX = 698948 GN=Thethe_02051 PE=4 SV=1
MTCATKDEIREFAYKSGIDIVGFASPDCLFKYRDLLKNRYENGLSCNIEEKDIEKRINPYYFLKDVKSIVSIAVSYNIIYEADSPKSAYGTVSRTAWGVDYHKVLINLLKKLRNFILSKCNDAKAVLLVDNNPLLERAIAYNAGIGFYGKNNMIINEKYGSYLFIGEMLLNIFFEPDKKIVSKCGSCTRCLKACPGKALVGEYKIDANKCLSYATIKKGYLSDDTIKKIGTRIYGCDTCQDVCPFNKTAKRVIKDEFIPRGLKPKHDLKEILSLNKEKFQEVFGPTSASWRGKNTMIRNAIIASINSNDKNAIEPLKSLLDGESSYLRGYSAYALSILDGENSLPYIEKAYFKETDVSAKMFMKKAIKKIRGEVFEDNER

SEQ ID NO: 81644 - protein, 380 aa, Thermoanaerobacterium xylanolyticum
  REGION 1..380: note = tr|F6BJ15|F6BJ15_THEXL 4Fe-4S ferredoxin-type domain-containing protein OS=Thermoanaerobacterium xylanolyticum (strain ATCC 49914 / DSM 7097 / LX-11); OX = 858215 GN=Th exy_0806 PE=4 SV=1
MTCVTKEEIKDFAYKSGIDVIGFASPDCLFEYRDLLLYRLNNGLNCNIEEKDVDKRINPYYLLSDVKSIISVAISYNVDYEFEAPRYGYGTISKTAWGVDYHKVMIDLLKKLEKFISSKCGDAKTVLLVDNNPLLERAIAYNAGIGFFGKNNMIINEEYGSYIFLGEMLINISFEPDSKVESKCGSCRRCLKACPGKALIEEYKIDANKCLSYATIKKGYLSDSTLKRLGTRIYGCDICQDVCPFNQKAKKVTRREFTPQNLKPKHDLKDILRLDNKKFKELFGDTSASWRGKNTIIRNAIIAAINSNDKDAIEPLKKLINSESAYIRGYSAYALSILDKENAFSYIEKAYLNEKDESTKEFMKKAIMNIRGETFEGNER

SEQ ID NO: 81645 - protein, 315 aa, unidentified
  source 1..315: note = Thermoanaerobaculum aquaticum
  REGION 1..315: note = tr|A0A062XYC7|A0A062XYC7_9BACT 4Fe-4S ferredoxin-type domain-containing protein; OS = Thermoanaerobaculum aquaticum OX=1312852 GN=EG19_11865; PE = 4 SV=1
MERAHHEAKEALRAYALKTLGFDLFGVAPAEPLEGQRHLAAWLAMGFHGEMAYMARTATLRGNPDALLPGARSVICVACAYHDPPDGPLPSGHVRVARYARRRDYHKVIRKKLLKLGEHLVGLFPEAQFRIVVDSGPLLEKEVAQRAGLGWIGKNTCLINRRLGSELLLGELITTVALPPDSPETDHCGSCTACLAACPTEALRGPYQLDARRCISYLTIEHKSAFDADHPPQLSGYLFGCDLCQTCCPWNRHAPLQVNPHLPTRAHLATLSVSELAGLDAEAWAKLAEGSPLRRLTYERLRRNLGALDSTAKQE

SEQ ID NO: 81646 - protein, 418 aa, Thermobacillus composti
  REGION 1..418: note = tr|L0EHE2|L0EHE2_THECK Epoxyqueuosine reductase; OS = Thermobacillus composti (strain DSM 18247 / JCM 13945 / KWC4) OX=717605 GN=queG PE=3 SV=1
MTERPAAFYAELKAEMKAAARSLGIDKIGVASAEPFTELRRTLERHRALGRESGFEEPDLDKRTNPALLMEDPQSIIAIAVAYPSKLRDAPKSEPGARRGILSRSAWGRDYHEVLRDRLSRLEAWLRERAPELRALSMTDTGALVDRAVAERAGIGWSGKNCSIITPEFGSWVYLGEMITNLPLPPDAPVTEMCGECTKCIDACPTGALVGPGELNAQACVSYLTQTKGYLSDGQMRKIGNRLYGCDTCQIVCPVNRGKDWTHHEELQPDPDTVKPLLVPLLSMSNREFKERFGASAAAWRGKKPIQRNAVIALGHFREASAVPDLIRVLTDDPRPVLRGTAAWALGRIGGPEAERALRQALDREADPETSARIKAALEALENPEPRDAAGGRADDRRHGGADSGVPIYEEGAAKPGV

SEQ ID NO: 81647 - protein, 446 aa, Thermobacillus sp.
  REGION 1..446: note = tr|A0A3E0R0J8|A0A3E0R0J8_9BACL Epoxyqueuosine reductase OS=Thermobacillus sp. OX=2108467 GN=queG PE=3; SV = 1
MEQPVRRAGPGRDPAAVAAGLTKEARSAMTERPAAFYAELKAEMKAAARSLGIDKIGVASAEPFTELRRTLERHRALGRESGFEEPDLDKRTNPALLMEDPQSIIAIAVAYPSKLRDAPKSEPGARRGILSRSAWGRDYHEVLRDRLSRLEAWLRERAPELRALSMTDTGALVDRAVAERAGIGWSGKNCSIITPEFGSWVYLGEMITNLPLPPDAPVTEMCGECTKCIDACPTGALVGPGELNAQACVSYLTQTKGYLSDGQMRKIGNRLYGCDTCQIVCPVNRGKDWTHHEELQPDPDTVKPLLVPLLSMSNREFKERFGASAAAWRGKKPIQRNAVIALGHFREASAVPDLIRVLTDDPRPVLRGTAAWALGRIGGPEAERALRQALDREADPETSARIKAALEALENPEPRDAAGGRADDRRHGGADSGVPIYEEGAAKPGV

SEQ ID NO: 81648 - protein, 395 aa, Thermobacillus sp.
  REGION 1..395: note = tr|A0A1Y3QE26|A0A1Y3QE26_9BACL Epoxyqueuosine reductase OS=Thermobacillus sp. ZCTH02-B1 OX=1858795; GN = queG PE=3 SV=1
MTAVTERPAAFYANLKAEMKAAAGSLGIDKIGVASAEPFDELRARLERHRWLGRESGFEEPDLDKRTNPALLMEDARSIIAIAVAYPSKLRDAPKSEPGARRGILSRSAWGRDYHEVLRDRLARLEAWLRERVPELRALSMTDTGALVDRAVAERAGIGWSGKNCSIITPEFGSWVYLGEMITNLPLPPDQPVTEMCGACTKCLDACPTGALVGPGELNAQACVSYLTQTKGFLSDDAMRKIGNRLYGCDTCQIVCPANRGMDWTHHEEFRPDPDTVKPLLVPLLKMGNREFRERFGSSAAAWRGRKPIQRNAVIALGHFREKSAVPDLVRVLMDDPRPVLRGTAAWALGRIGGSDAERALREALEREADPEAAERIRAALAVLEGSTDQDRREV

SEQ ID NO: 81649 - protein, 383 aa, unidentified
  source 1..383: note = Thermobaculum terrenum
  REGION 1..383: note = tr|D1CFG3|D1CFG3_THET1 Uncharacterized protein; OS = Thermobaculum terrenum (strain ATCC BAA-798 / YNP1); OX = 525904 GN=Tter_0752 PE=4 SV=1
MQTSLVLTIEDIKKLATECSLDVVGVTSADSFDDVRQIYLERYAKGYFGEMRWITPERINLGCSPQDMLPGARSILVFAYSYLRDSNVPNENDGVIRGRVARYALGEDYHYFLKEKIELFLDKLKVITGKDFASRISVDSGPVIDRAVAARAGVGWYGKNTNILIPGYGSWVLLGTALVDIDLPLSSHIRKSCGSCTRCISACPTGALVAPGVLDSRRCISYLTIELKGPIPRDLRPLIGDWIFGCDICQEVCPVNIKGKKPNHPEFSDLPGWGHRPDLVSLMRMTEDEFRNKFRRSPVKRTKRRGLLRNVAVALGNSGDRRAVPVLVEALSDHEPLVRGHAAWALGRLGGSEAKYALESRLQIEEDSYVREEIQLALDEIEV

SEQ ID NO: 81650 - protein, 333 aa, Thermobrachium celere
  REGION 1..333: note = tr|R7RQH4|R7RQH4_9CLOT Epoxyqueuosine (OQ) reductase QueG OS=Thermobrachium celere DSM 8682 OX=941824; GN = TCEL_01500 PE=4 SV=1
MSIKEEIIDFARSIGIEYIGFCSANFSNDFINRLSHNLKMKYNCEFQINDIEKRINIKDYMEDAKTFISIALPYKTIEIDKSKPYFSKASLGKDYHIVLKQKLKLIEEFLQNNYNAKTISFVDTGPFHDREIAYMCGIGFYGKNSTIITEKYGSFVFLGEILTDLYIEPSTPKKSLCGSCTICIKSCPMGAIEEEYFINSNKCLSYITQKKGDLTAIEQEKMGLRIYGCDTCQDVCPFNIKAQKSNILDFLPEEWNININEEDFLKMSNSQFNKTFRSTSSGWRGKKILQRNLIIAMGNSKNKKYTSLLKNISMDNSFEGYIKNSLKKLEGEE

SEQ ID NO: 81651 - protein, 297 aa, unidentified
  source 1..297: note = Thermoclostridium caenicola
  REGION 1..297: note = tr|A0A1M6IM11|A0A1M6IM11_9FIRM Epoxyqueuosine reductase OS=Thermoclostridium caenicola OX=659425; GN = SAMN05444373_104510 PE=4 SV=1
MNETEELLTKNIDNLGGKVKTVSINILPFVREQLEKTDLNDGMLKDYFDFSLDPDIKSLVIIALPSPPCYIEIEWDFGILEADIPPVYIYRDQQLSMIKETVSNVFERYYLKSWPVVLPKKILAAMCGFGKYGRNNLLYIEGMGSCHRLTVFGTDMICTEELELAADLRMDRCSQCGVCINQCQTGAIDREKTQIAAERCLTFYNERKDAIPEWIHHDWHHSLIGCIRCQEKCPANKGLWNRKKVAEFSYDETRSLLKSTAFEDLDMALQNKLTELNLYRYFDVLSRNISLFIRANY

SEQ ID NO: 81652 - protein, 376 aa, unidentified
  source 1..376: note = Thermodesulfobacteriales bacterium
  REGION 1..376: note = tr|A0A524JTV4|A0A524JTV4_9BACT Epoxyqueuosine reductase OS=Thermodesulfobacteriales bacterium OX=2528040; GN = queG PE=3 SV=1
MDRAQFTSSIKEKARELGFNLIGISPVDSFPENQFYKEWLNKGFSGEMAYLERNPEKREDIQNVLPGAKSVISCAMNYNTDYPYSIEKTDKTKGWISRYAWGDDYHDTIKDGLKILMDYISSEFSDEVKSKLYVDTGPVLERTYGKYAGVGWVGKNTCLINQEIGSWIFLGEIITNIELEYDTPAPDRCGTCTRCIDACPTDAIIEPYVLDSRLCISYLTIELKDKIPSELREGVQNNIYGCDICQDVCPWNKRAHVSDKTEFQPREDLFNPDLSYISKLTVEEFRKQFKGSPIKRTKRRGLLRNAVVAMGNSGEKDFIPYIRECLGDEEPLIRAHAVWALWKIEGGQAKNILVSHMKTETDEMVNDEIDDILSSI

SEQ ID NO: 81653 - protein, 257 aa, Thermodesulforhabdus norvegica
  REGION 1..257: note = tr|A0A1I4R802|A0A1I4R802_9DELT Epoxyqueuosine reductase QueG (Queuosine biosynthesis); OS = Thermodesulforhabdus norvegica OX=39841; GN = SAMN05660836_00459 PE=4 SV=1
MKVTLLSIKDRVLGSIEAWLLERGYSSLWREPLVGAVDARDARLLELKKAVAPDHALPPDLLPSARSVVVYFLPFVEDVAKDNGKFHPFASRLWAFAYVETNALIARINQDLASFLGDQGYETAVTPATHNFDSRRLVSRWSHKHLAYYAGLGTFGLNHLLITASGCCGRFGSLVTSAPVETSAKPQEEFCLSKRGLPCEACLKRCPVGALSVNGLNRSLCYQRLLENNERFSDLPLTDVCGQCSCNVPCSFSIPRN

SEQ ID NO: 81654 - protein, 268 aa, Thermodesulfovibrio sp.
  REGION 1..268: note = tr|A0A1G3Y6F7|A0A1G3Y6F7_9BACT tRNA epoxyqueuosine(34) reductase QueG OS=Thermodesulfovibrio sp. RBG_19FT_COMBO_42_12 OX=1802373 GN=A2Z47_06390 PE=4; SV = 1
MTFLGRYPERRSNPFLVFPEVKSVVVVSMNYYPGGYHRECLDNPEKGYIANYALNADYHEVIKSKLIELLIQINAMTGGKAQGKIYTDTGPVLEKAFAVKSGIGWMGKNSLIISPDAGSWLLLGVILLDTELEPDESLSDSCGECTGCIDACPTGAIVAPYVIDARRCISYLLGELKGEIPDGLKSMIGNRIFGCDDCQWACPWNKMAKVSTEIGFVPRNELTSPLLAVLMELGEGNFKNVFHDNPVIRIKWERFLRNVVVAVGNQVS

SEQ ID NO: 81655 - protein, 315 aa, unidentified
  source 1..315: note = Thermoflavifilum aggregans
  REGION 1..315: note = tr|A0A2M9CVL7|A0A2M9CVL7_9BACT Epoxyqueuosine reductase OS=Thermoflavifilum aggregans OX=454188 GN=queG; PE = 3 SV=1
MNPAAARHTALVKQLARKLGFDYCGIARAAALDEDARRLEKWLNKGYQGTMAYMERYFDLRIDPRKLVPEAQSVITLLMNYFPARRQRTDSYRVSKYAYGRDYHRVIKKKLKQFLKSLQEQIGEIQGRGFVDSAPVLERAWAVRSGLGWVGKNGNLITRQQGSFLFIATLITDLELVYDDPFAKDYCGTCTRCIDACPTQAILPDKIIDASRCISYYTIELKAHIYPQEAEGKWKDWIFGCDICQDVCPWNRFSRVSQEADLEPVPEILDFSTQEWEQLTEEKFVELFGHTPLKRAGWEGLQRNIRLIKKNQTYS

SEQ ID NO: 81656 - protein, 372 aa, Thermoflavimicrobium dichotomicum
  REGION 1..372: note = tr|A0A1I3N048|A0A1I3N048_9BACL Epoxyqueuosine reductase OS=Thermoflavimicrobium dichotomicum OX=46223; GN = SAMN05421852_103267 PE=4 SV=1
MFGPTEPAAVALQQAAEERGFVVAWAPTDLPSFVVSRYRNWVEDMRQAGMGQLARNIEVRLNPSSRLAWARSALVLAAPHGFPDPGPPPGGVRIGRVGRIFWVREQDYIQRRVQPHLDELKEICHRLGGRCRDYVEQGPLSFRSYGVLAGLGWIGRNGMLINQHLGSYMTLAVLLTSFELADASEHPFRCGRCKLCVESCPTGALIGDGTLDANRCISYWTTQHLDLIPFKFRESLGDWLFGCDECQSVCPWSPEASRFWEGYEPDPDLAHPDLTDFLVLSNHAFAQKYAQSAFERVGRPRMARNALVVLANTRDSGYLPLVRLGCEDPSPLVRATAAWACVRLGGRKDAERLLSDPELLVRDEARRALELG

SEQ ID NO: 81657 - protein, 378 aa, Thermoflavimicrobium dichotomicum
  REGION 1..378: note = tr|A0A1I3LI18|A0A1I3LI18_9BACL Epoxyqueuosine reductase OS=Thermoflavimicrobium dichotomicum OX=46223; GN = queG PE=3 SV=1
MKPGELKQKLIDKAKQIGIDKIGFASADPFVELRERLREQQEKGYASGFEEPDIEKRVRPDLNLPEAKTIIAIALAYPSKLKNPPKSAPGAYRGIFCRASWGEDYHRVLRNKLDQLEAYLLELVPTAKTMSMVDTGALSDRAVAERAGIGWSGKNTSIITEEFGSWVYLGEMITDIYLPPDQPAEDGCGDCNLCIEACPTGALVQPGQLNARACIAYLTQTKGFLEEKYRDKMGNRLYGCDTCQTVCPKNRGIHFDHHQEFQPDPEKVKPLLKPILTMSNREFKETFGQMAGSWRGKKPIQRNAIIALAHFRDESAIADLSHLLEQDPRPVIRGTAAWALGKIGGIEAEKALKQAEIKEKDPEVQTEIMRALDRLKKQ

SEQ ID NO: 81658 - protein, 377 aa, Thermoflavimicrobium sp.
  REGION 1..377: note = tr|A0A364K9M7|A0A364K9M7_9BACL Epoxyqueuosine reductase OS=Thermoflavimicrobium sp. FBKL4.011 OX=2137476; GN = queG PE=3 SV=1
MSPNELKQKIIVKAKEIGIDKIGFASADPFVELRERLVEHQQKGYASGFEEPDIEKRVRPDLSLPEAKTIIAIALAYPSKLKNPPKSAPGANRGIFCRASWGEDYHHVLRDKLNQLQMYLHELIPEANIMSMVDTGALSDRAVAERAGIGWIGKNTSLITEEFGSWVYLGEMITDIYIPPDHPVEDGCGDCNICVDACPTGALVQPGQLNAQACIAYLTQTKGFLADKYREKIGNRLYGCDTCQTVCPKNRGLHFDHHPEFAPEPEKVKPLLKPLLTMSKREFNKEFGQMSGSWRGKKPIQRNAMIALAHFRDQTAIPELSRLLLEDPRPVIRGTAAWALGKIGGFEAEDALVQAKNIEHNTEVQIEIERALKKLES

SEQ ID NO: 81659 - protein, 324 aa, unidentified
  source 1..324: note = Thermoflexia bacterium
  REGION 1..324: note = tr|A0A3M1DQ04|A0A3M1DQ04_9CHLR tRNA epoxyqueuosine(34) reductase QueG OS=Thermoflexia bacterium OX=2420334 GN=queG PE=4 SV=1
MEIDSLRTLARSLGFDLLGVSPPTPPDWALRAYREWLARGFHGEMAYMARPDRVARREDPAQILPGVRAVVCVAVNYYPGPPPPETTDPSRGRISNYAWGRDYHDWMVPRLEELAAHLRAATGGVARYRVYADTGPILERALAAQAGLGFIGKNTCLIHPRIGSWLFLGEILVDADLPFTGPPIPPRCGTCTRCLDACPTGALVAPYVLDARRCISYLTIECRGEIPPDLRARMGNWIYGCDICQEVCPWNRFARRTSVTDFLPPSLDRIAPLRKALLALDEDSFQRQFGESPVVRAGRKRLREQILRPPPEETAGETTPPVMP

SEQ ID NO: 81660 - protein, 311 aa, unidentified
  source 1..311: note = Thermoflexibacter ruber
  REGION 1..311: note = tr|A0A1I2I055|A0A1I2I055_9BACT Epoxyqueuosine reductase OS=Thermoflexibacter ruber OX=1003 GN=queG PE=3; SV = 1
MLKKQDYTTFIKQKAKELGFDFCGISKAEFLEEEAPRLEKWLNQKMHGQMSYMENHFDKRLDPRLLVPDAKSVVSLLYNYYPSKKILHTDETLKISKYAYGADYHFVIKDKLKTFFKAIQDQIGEVSGRVFVDSAPVMDKVWAAKSGLGWIGKHTNLLNRERGSFFFVAELILDLELEVDAPTKDYCGTCTRCIDACPTEAIVSPYVVDGSKCISYFTIELKDEIPEDYKGKFENWIFGCDICQDVCPWNRFAKPHQEPQFEPSEDLAKMKKNDWKDITEEIFHNIFKKSAVHRTKLMGLKRNINFVTEQK

SEQ ID NO: 81661 - protein, 385 aa, unidentified
  source 1..385: note = Thermoflexus hugenholtzii
  REGION 1..385: note = tr|A0A2A9HDE6|A0A2A9HDE6_9CHLR Epoxyqueuosine reductase OS=Thermoflexus hugenholtzii OX=1495650; GN = A9A59_1255 PE=4 SV=1
MNGELKRRVLAVCREAGFPLAGVARAAPAGGARAAAERALAEGLFGEMRWMDADWVERATDPGRFLAGARSLVVVALPAHAPDPPRPADGRARGLVARYARGRDYHRVFEGRLRKAVRRLREEFGAEARATVDYGPLLERPYAAAAGLGWLGKSTMLLAPGFGPWVLLGVIATTLELEPDPPLRKSCGSCRRCIVACPTQAIAPDGGVVDARRCISYLTIEHRGVVPRDLRAAIGARVFGCDDCLDACPVGASRWEADPELQAASAERAWPELRAFVEMDQAEFEAAYRGTALMRAKREGMARNACIALGNVGSAEEAPVLARALEDGSAVVRGHAAWALGRLAARTGADVQELLTWRLTAEDDPWVREEIALALEEADARTRTG

SEQ ID NO: 81662 - protein, 355 aa, unidentified
  source 1..355: note = Thermoflexus hugenholtzii
  REGION 1..355: note = tr|A0A212QQU1|A0A212QQU1_9CHLR Epoxyqueuosine reductase OS=Thermoflexus hugenholtzii JAD2 OX=877466; GN = queG PE=3 SV=1
MVLKERLKAYARSLGFDLIGVAAAGPTPSADRYEEWVRAGRAATMAYLTRPEAIEKRRDVRHLWPEARSVIVGAMNYYAGDFPPPREDVPQGRVARYAWGEDYHEVLRERLEALLEFLNREAGRPVRGRIYVDTGPVLERAWAVQAGLGWIGKNSMLIHPRLGSYLFLGILLVDLELEPDPPFPTDHCGTCTRCIEACPTRCIRPDRTLEAERCLSYLTIERREEIPMERRAAIGDWIFGCDICQEVCPWNRRFARPTAEPAFQPREGIPRLALAEILGMDEAAFRARFRRSAIRRAKRRGLVRNALVVAGNLRARSLRPLLERWRADEDPILQEHAAWALERIEEAQVLLEGPG

SEQ ID NO: 81663 - protein, 420 aa, unidentified
  source 1..420: note = Thermogemmatispora argillosa
  REGION 1..420: note = tr|A0A455T0K9|A0A455T0K9_9CHLR Epoxyqueuosine reductase OS=Thermogemmatispora argillosa OX=2045280; GN = queG PE=4 SV=1
MDMLLDAAPIKAYGYELGFDLVRITGAEAFPETERVIKERIAAGLMDGLPWFTSERAEVSCHPDALLPEARSIIALAMCYLSEPPEEPQDDLPRGRISRYAWGEDYHEVIKPKLKQFAEWLREYARREAGQELEARLFVDTGRMVDRAVAQRAGIGWYGKNTTILTRGWGSWVFLAEIVTNLPLPADEPLQANCGKCERCLHACPTGALPAPYVLDNRRCISYLTIELRGSIPLELRPLMGNLIFGCDICQEVCPVNQVVEKRLGLRQADRTQEPAADTLAGREADGQKQRPRIWLRKRDEFRPRPQIGGAPELIPLLSLSEEEFRARFRHTPIWRAKRRGLLRNVCVALGNLGDRRAVPALIQALNDSEALVRGHAAWALGRLGGEEARQALLARRDQEEDPEVRQEILYALNMLGDHS

SEQ ID NO: 81664 - protein, 419 aa, unidentified
  source 1..419: note = Thermogemmatispora aurantia
  REGION 1..419: note = tr|A0A5J4KAD3|A0A5J4KAD3_9CHLR Epoxyqueuosine reductase OS=Thermogemmatispora aurantia OX=2045279; GN = queG PE=4 SV=1
MKMLDAAPIKAYGYELGFDLVRITGAEAFPETERVIKERIAAGLMDGLPWFTSERAEVSCHPDALLPEARSIIALAMSYLSEPPEEPEDDQPRGRISRYAWGEDYHEIIKPKLKQFADWLREYARREAGQELEARLFVDTGRMVDRAVAQRAGIGWYGKNTTILTRGWGSWVFLAEIVTNLPLPADEPLQANCGKCERCLYACPTGALPAPYVLDNRRCISYLTIELRGSIPLELRPLMGNLIFGCDICQEVCPVNQVVEKRLGLRQAGRTAEQAGDGKTEAAAVRSRQRPQMWLRRRDEFRPRPQVGGVPELIPLLALSEEEFRARFRHTPIWRAKRRGLLRNVCVALGNLGDRRAVPALIQALCDAEALVRGHAAWALGCIGGEEARRALRERLEQEEDPEVRQEILQALTMLDGKN

SEQ ID NO: 81665 - protein, 417 aa, unidentified
  source 1..417: note = Thermogemmatispora tikiterensis
  REGION 1..417: note = tr|A0A328VTJ3|A0A328VTJ3_9CHLR tRNA epoxyqueuosine(34) reductase QueG OS=Thermogemmatispora tikiterensis OX=1825093 GN=A4R35_17995 PE=4 SV=1
MLDAAPIKAYGYELGFDLVQITGAEAFPETERVIKERIAAGLMDGLPWFTSERAEVSCHPDALLPEARSIIALAMSYLSEPPEEPEDDQPRGRISRYAWGEDYHEIIKPKLKQFADWLREYARREAGQELEARLFVDTGRMVDRAVAQRAGIGWYGKNTTILTRGWGSWVFLAEIVTNLPLPADEPLQANCGKCERCLHACPTGALPAPYVLDNRRCISYLTIELRGSIPLELRPLMGNLIFGCDICQEVCPVNQVVEKRLGLRQAERAVEQAGDGKTEAATVRSKQRPQMWLRRRDEFRPRPQVGGVPELIPLLALSEEEFRARFRHTPIWRAKRRGLLRNVCVALGNLGDRRAVPALIQALWDAEALVRGHAAWALGCIGGEEARRALTERLEQEEDPEVRQEILQALTMLDGKN

SEQ ID NO: 81666 - protein, 367 aa, unidentified
  source 1..367: note = Thermogemmatispora tikiterensis
  REGION 1..367: note = tr|A0A328VBJ5|A0A328VBJ5_9CHLR Epoxyqueuosine reductase OS=Thermogemmatispora tikiterensis OX=1825093; GN = A4R35_01350 PE=4 SV=1
MAAEARGFLVAWAPIELPGEWKQSYQQWVAEGRHAGLGQLARALEVRLDPRLRFAWASSVMILAAPHTYPDPGPPSGGVRIGQVARKFWVREPDPFLLKRLLEPHIAALKEVASRLGVRVRDYVEQGPLPLNLYAVLSGRFWRGYNAMPNSTDFGTRVTLTCLLTDIALDRFPPPSHPDRCGECRRCLSSCPTGALLGDRRVDLRLCISYWTTSYQGVIPLAFRPAIGNWLLGCDVCQDVCPWNWKTERLPQWWKGFSVDPELAHPDLCDALLLSTRDFALKYRQSAFERLGRVQIARNALIVLANTGEQVYAPLVKQAAADPAPVIRATASWALLRLGQRGEAEKLLRDPSDLVRAETREALEHFQ

SEQ ID NO: 81667 - protein, 466 aa, unidentified
  source 1..466: note = Thermogutta terrifontis
  REGION 1..466: note = tr|A0A286RLX1|A0A286RLX1_9PLAN Epoxyqueuosine reductase OS=Thermogutta terrifontis OX=1331910 GN=queG; PE = 3 SV=1
MNNLPWYETLPPRYTTRAIEALRRNGCTARFFLGFTLSLFPKMEDGRNRRVFLSALSYHFSGCQPMAVDREEVTRQVRKAAEDLGFSPVGICSAVEPPHFSFFVEWLEKGYHGEMMYLERRREAYAHPRSVLEGVRTIVMLGFPYRTVEPSPGAAGKGRISRYAWGKDYHDLIRRRLKSLGQTVKELCPGSEVRGVVDTAPLLEREFAQLAGLGWIGKNTLLINPRLGSWLFLAALLTTADLVADRPFEANHCGTCTACLRACPTGALVAPYVLDARRCLSYLTIELRGPIPQEWRSSIGDWLFGCDICQEVCPWNRRAPVTGEPSLMPRWGTHIELTELFHWSDEQFRSAFRDMPLWRAKRRGLLRNAAIVLGNQRCTEAVPALIRGLEDVDPVVREACGWALVEIGTEHALSAARTRIEREPDAWVRDQLTRHLERIVQTTARHDGAEEPCPLGSGPSKIPEKR

SEQ ID NO: 81668 - protein, 191 aa, Thermohalobacter berrensis
  REGION 1..191: note = tr|A0A419T0Y6|A0A419T0Y6_9CLOT 4Fe-4S ferredoxin; OS = Thermohalobacter berrensis OX=99594 GN=BET03_03690 PE=4; SV = 1
MDTTDLQRYITKKALNNGALLVGYTKIRRTEPVIIMGFEYSDKWFFNFPITLTKKLGEVYFISKNVQDMIAKELKREGYITNYKTILSIYGDFRPLVVSAGLGEWGRNGLVVNKKYGSGLLYAAIFTNAPFKTENTLILQTSEKHCTECEECIKSCPANAFENNTFHLYRCMPYALKGCAQCLKVCKGNNC

SEQ ID NO: 81669 - protein, 378 aa, Thermohalobacter berrensis
  REGION 1..378: note = tr|A0A419SV38|A0A419SV38_9CLOT tRNA epoxyqueuosine(34) reductase QueG OS=Thermohalobacter berrensis OX=99594 GN=BET03_05875 PE=4 SV=1
MNIKDYIIKEAEKIGIDIIGFTGVKPFENMKKLLKERRDKGYETEFEENDIELRYNPKKVMPNSKSIIVIGVSYNLHYKSSKKFNARGRLSKSSWGRDYHTVLKNKLEELADAIKKVKEFDYKIFVDTGPLIDREIAKRAGIGWYGKNCSIINDKYGSFIFIGYMITNLDLEENSPLEEKCKTCDLCIRACPTNALEENYKINATRCISYLTQTKRKIPYDLRDKMGIKIYGCDTCQLVCPKNKGVNKGNCESFLPEKTRGYIEIEELFNLSNKEFKKKYGHMAGSWRGKNVLKRNCIIAIGNMKDKTYLDLLKQTLKDPSPMIREYTAWALLKIEPNEGKKVIKEHLKIEKDDNVKNEMKKLLEYFEGGIIENRYNV

SEQ ID NO: 81670 - protein, 383 aa, Thermohydrogenium kirishiense
  REGION 1..383: note = tr|A0A4R4A7G6|A0A4R4A7G6_9FIRM Epoxyqueuosine reductase OS=Thermohydrogenium kirishiense OX=937254; GN = EDC21_11614 PE=4 SV=1
MFNVTCVTKDEIREFAYKSGIDIVGFASPDCLFKYRDLLKNRYENGLSCNIEEKDIEKRINPYYFLKDVKSIVSIAVSYNIVYEADSPKSAYGTISRTAWGVDYHKVLINLLEKLRIFILSKCNDAKTVLLVDNNPLLERAIAYNAGIGFYGKNNMIINEKYGSYLFLGEMLLNIFFEPDKKIVSKCGSCTRCLKACPGKALVGEYKIDANKCLSYATIKKGYLSDDTIKKIGTRIYGCDTCQDVCPFNKTAKRVIKDEFIPRGLKPKHDLKEILSLDKKKFQEVFGPTSASWRGKNTMIRNAIIASINSNDKNAIEPLKSLLDGESSYLRGYSAYALSILDGENSLPYIEKAYFKETDVSAKMFMKKAIKKIRGEVFEDNER

SEQ ID NO: 81671 - protein, 344 aa, unidentified
  source 1..344: note = Thermoleophilia bacterium
  REGION 1..344: note = tr|A0A2G4H4X2|A0A2G4H4X2_9ACTN 4Fe-4S ferredoxin-type domain-containing protein; OS = Thermoleophilia bacterium OX=2026888 GN=CK540_03570; PE = 4 SV=1
MSPRPAGYALRMGMPTMDELAALVRDDGIVLGAAPASAYTEVEAALKDRVERGYWADMRFTAARTEVSCHPETAVRNAQTVVTAILPVWRPLPPKPDGPVGRLPRYAWSDPYATLREALGRVRDALKAEGFRCVVHVDANHHVDREGARRAGLTFPGKNTMAIAPGLGSFISIGTLITDAPLVTETPEPAREGCGSCTLCIDACPTGALDEEYVLNAEQCLSYWTQSRREIPDEIADALGDQVYGCDICQDVCPWNQGPEKRGADLLAEGEAWVRLDAWLDATDEDLVEHNQRLYIPGLDGRYLKRNALIALGNGPEEYRSLAEPFAATDDPIFGSAARRATNR

SEQ ID NO: 81672 - protein, 379 aa, unidentified
  source 1..379: note = Thermolongibacillus altinsuensis
  REGION 1..379: note = tr|A0A4R1QFI6|A0A4R1QFI6_9BACI Epoxyqueuosine reductase OS=Thermolongibacillus altinsuensis OX=575256; GN = queG PE=3 SV=1
MDVAALKKEIIEYSRTIGIDKIGFASADPFTELKERLYQQQQLGYQSGFEEPDIEKRTNPSLLLPHARSIIAIALAYPSKMKNAPRSTREERRGIFCRASWGQDYHRILRDCLEKLEQFILERVPNAKLKSMVDTGELVDRAVAERAGIGWSGKNCSIITPEFGSYVYLGEMITNIPFPPDTPIEDQCGTCNKCVEMCPTGALVQGGQLNAQRCIAFLTQTKGFIADEFREKIGNRLYGCDTCQLVCPKNKGKDFHLHPEMEPDPEIAKPKLKPLLHLSNREFKEKFGHLSGAWRGKKPIQRNAILALAHYKDETAIDDLLKLLKEDPRPVIRGTAAWALGKIGNKRVIDELKKAKQEEKDEEVIKEIEKGIHMLQEIK

SEQ ID NO: 81673 - protein, 385 aa, unidentified
  source 1..385: note = Thermomicrobiales bacterium
  REGION 1..385: note = tr|A0A5C7JMU7|A0A5C7JMU7_9CHLR tRNA epoxyqueuosine(34) reductase QueG OS=Thermomicrobiales bacterium OX=2482790 GN=queG PE=4 SV=1
MSGVGARGADSAWVRQLAQECGLQVAAITSPEPFDGLETHLRERIAHGHYDGFTWFTSERASVSANPVNLHDQVRSIVSVGLPYYQATPAIPGDGVLRGRIARYAWGRDYHDILKRRMSDLLGRIEERVGRPVEARRLVDTARIVDRAVAGRSGLGWYGKHTCIIVPGYGSWVLLGELLIDLELEPDAPLDRNCGRCHACIDRCPTGAIVAPYEVDSGRCISFHTIEQRDAIPHELRARFGNWVFGCDECQDVCPYTGAAQTVTDPDLEPVSLRNAAPELEWLLSMTESEFRCTYRGTAVLRTKRRGLARNAAIALGNSSDEQAVPLLANALVDHDEPLVRGHAAWALGRHAGRLALSALERARANESDDSVSREIIRALEEIEP

SEQ ID NO: 81674 - protein, 392 aa, Thermomicrobium roseum
  REGION 1..392: note = tr|B9L0J0|B9L0J0_THERP PBS lyase HEAT-like repeat domain protein OS=Thermomicrobium roseum (strain ATCC 27502 / DSM 5159 / P-2) OX=309801 GN=trd_1061 PE=4 SV=1
MCIAKDELRELAERSGLSLLAVTTADPFPGLTDLLLARIRAGYLDGMDWFDEERARIAGDPHNLHPTARSIVSVALPYWLPDIVPPNDGIVRGRIARYAWGHDYHRVLRDRMRRLHQSLQERCGRPIEARFLVDTARIVDREIAARAGLGWQGKNTMILVPRYGSWVLLGELLLDIDIEPDAPLRPRCGRCQRCLDACPTGALIHPYELFAPRCISYLTIEHRGPLPWEVRPLVANWVFGCDICQEVCPYTAAAQRADDPVVFPERLEHCFPSLEWLLTMSEDEFRSVYRDRPVLRAKRVGLARNAAVALGNVGDQRHLETLAWAVLAHDEPLVRSHAAWAMARIDYTASLPVLQRALAQESDSSARQEIERVLVSPPAPLNRSSATLLRSH

SEQ ID NO: 81675 - protein, 354 aa, Thermomonas haemolytica
  REGION 1..354: note = tr|A0A4R3NC85|A0A4R3NC85_9GAMM Epoxyqueuosine reductase OS=Thermomonas haemolytica OX=141949 GN=queG; PE = 3 SV=1
MSASDPATLADRIRALARAAGFQRVGISGIDLREDEAHLLDWLAQGLYGSMDWMARHGALRARPAELLPGTVRVISVGLDYGQDPDAAWQALADGERAYVARYALGRDYHKLLRNRLQKLAEQVQAEIGPFGYRAFTDSAPVLERALARNAGLGWIGKHTCLIDKDGGSWFFLGELFVDIPLPVDPPASAHCGSCTRCIDICPTQAIVAPYRLDARRCIAYLTIEHEGSIDEDLRPLIGNRIFGCDDCQLVCPWNKFARRTDEPDFRARNGLDRATLAELFAWDEDEFLRRTEGSAIRRSGHERWLRNIAIALGNAPTTPEVLTALERRRAHPSPVVREHVAWALARHAARPSP

SEQ ID NO: 81676 - protein, 354 aa, Thermomonas hydrothermalis
  REGION 1..354: note = tr|A0A1M4XIC1|A0A1M4XIC1_9GAMM Epoxyqueuosine reductase OS=Thermomonas hydrothermalis OX=213588 GN=queG; PE = 3 SV=1
MDTPTPAALADRIRTLARAAGFQRVGISGIELDDDEAHLRDWLAQGLYGSMDWMARHGTLRARPAELVPGTIRVISVGLDYGQDPDAAWRTLNDGERAYVARYALGRDYHKLLRNRLQKLAEQVQAEIGPFGYRAFTDSAPVLERALARNAGLGWIGKHTCLIDRHGGSWFFLGELFVDIPLPIDPPASAHCGTCTRCIDICPTRAITAPYRLDARRCISYLTIEHDGSIDEALRPLIGNRIFGCDDCQLVCPWNKFARRTDEPDFRARNNLDRASLVELFAWEEDEFLRRTEGSAIRRSGYERWLRNIAVALGNAPTTPEVLAALASRRDHPSPVVREHVAWALRQHAARSAP

SEQ ID NO: 81677 - protein, 353 aa, Thermomonas sp.
  REGION 1..353: note = tr|A0A5B7ZU47|A0A5B7ZU47_9GAMM Epoxyqueuosine reductase OS=Thermomonas sp. SY21 OX=2202149 GN=queG PE=3; SV = 1
MSAIAPDYAALAARIRALAQAAGFQRFGISGVELPEDEAFLRSWLQQGLHGSMAWMARHGDKRARPAELVPETLRVVSVGLDYGQDADAAWDNLRDGERAYVARYALGRDYHKLMRNRLQKLADDVAREIGPFGHRVFVDSAPVLERALARNAGLGWIGKHTCLIDKDGGSWFFLGELFVDLPLPIDPPASAHCGTCTRCIEVCPTQAIVAPYRLDARRCISYLTIEHEGSIDEDLRPLIGNRIFGCDDCQLVCPWNKFAQRTDEPDFRARNNLDQATLAELFAWDEDEFLRRTEGSAIRRSGHERWLRNIAVALGNAPKTDAVIDALQSRREHPSSVVREHVEWALAQHARI

SEQ ID NO: 81678 - protein, 311 aa, unidentified
  source 1..311: note = Thermophagus xiamenensis
  REGION 1..311: note = tr|A0A1I1Y485|A0A1I1Y485_9BACT Epoxyqueuosine reductase OS=Thermophagus xiamenensis OX=385682 GN=queG; PE = 3 SV=1
MDLVSLERGRLIREEALRLGFDEVGFTSVDELKEDSSFLQKWLEMGFHAGMEYMSRNVEKRINPQKLVEDAKSVIVVLQNYYPSKSDKLTSGLNLAKYAYGRDYHKVLKKRLKQLMNYINSDISAEAKGRFFVDSAPVLERSLAIRAGLGWRGKNTNLIHPRLGSFVFIGEIFLNIELPSNEPIKEACGGCTRCIEACPTNALVAPYHLDANKCISYLTIENKNEIPNRFRGQMNDWFFGCDICQDVCPWNWKARPHKEPDFRLRPVFREMSKDEWLMMDEKTFDEISKGSPIRRAGFKGLKRNLKFISGI

SEQ ID NO: 81679 - protein, 339 aa, Thermosediminibacter oceani
  REGION 1..339: note = tr|D9RXZ5|D9RXZ5_THEOJ 4Fe-4S ferredoxin-type domain-containing protein OS=Thermosediminibacter oceani (strain ATCC BAA-1034 / DSM 16646 / JW/IW-1228P) OX=555079; GN = Toce_1469 PE=4 SV=1
MVIFMGIKEKIINFAKSIGLDKVGFTTAEPFLSEREILLERKEKGLFSPFEENDVELRCDPNELLPGARTIICFAMGYLIEHSDDTKSNAEKPLGIISKYASIKDYHRVMGEKLRLVADYIFSNWGGNFRILVDTGGLMDRAAARRAGLGWIGQNTCLFTEEYGSWVFLGEIITDLEVEPDEPSANRCDNCGRCVRACPTGALEAPYRINPFRCLSYVTQMRGSIPEEFRPLLGVRLFGCDTCQEACPKNKNVGIPSHEEFIPDFSLERRLIRLINIDSREFEKIFKPTPIGWRGKNVLRRNAILALSNAGPGHKEHFEKLLEDPSPVIREHALWALKR

SEQ ID NO: 81680 - protein, 300 aa, Thermosinus carboxydivorans
  REGION 1..300: note = tr|A1HNV0|A1HNV0_9FIRM Uncharacterized protein; OS = Thermosinus carboxydivorans Nor1 OX=401526; GN = TcarDRAFT_2402 PE=4 SV=1
MKEKLKQFCRSLGLDLVGIAPPGPYHELAAILYDRMAKGQSTAFDEPDIAKRIDPRHTMPDVQSVIVCLFPYYTGEQRPTNLAKYTHGLDYHHIIRRKLDEIGHYLQANILDFAYQPFVDTGPLVDRYLAYLAGLGFYGINSHIITEKYGSYVFIGYLLTNYPFAPDQPLNRTCIQCGQCVRMCPGQIILGNFAIDPRGCRSYLTQKKGELSPAEISIIRKTSLVFGCDVCQDVCPHNQGVNLTPLAEFKDQLLPWLDENEVAALSNKEFTRRYGDRAFSWRGKKILLRNFAYTQGQQCR

SEQ ID NO: 81681 - protein, 410 aa, Thermosporothrix hazakensis
  REGION 1..410: note = tr|A0A326U3B7|A0A326U3B7_9CHLR Epoxyqueuosine reductase OS=Thermosporothrix hazakensis OX=644383; GN = EI42_04000 PE=4 SV=1
MLDTQTIKEQAYALGFDIARVTTAQPFPEAKKVIKERIGRGLMDGLSWFTAERADVSCHPEALLPTAQSIISLGMVYLTEMPENAHEGTPRGRIARYAWGDDYHDIIKPKLKQFAEWLREYARSEVSQEDFETRLFVDTGRMVDRAVAQRAGLGWYGKNTNILTHGWGSWLFLAEIVTNLPLTPDEPLKANCGNCEICLHACPTGALPNPYELDNTRCISFLTIELRGSIPLELRPLMGTWIFGCDICQEVCPVNKVAERRLGVRQEGQKQMIAVDSITRRKSGPFQPHQEYRVRPAVGSTPELLPLLELSEEEFRERFRRSPIRRTKRRGLLRNVCVALGNIRDPQAVPALIKALHDDDPLIRGHAAWALGQIGGEQATNALQERMQTEEDSEVQKEIRCALTELVASS

SEQ ID NO: 81682 - protein, 410 aa, Thermosporothrix sp.
  REGION 1..410: note = tr|A0A455SSX1|A0A455SSX1_9CHLR Epoxyqueuosine reductase OS=Thermosporothrix sp. COM3 OX=2490863 GN=queG; PE = 4 SV=1
MLDTQTIKEQAYALGFDIARVTTAQPFPEAKKVIKERIGRGLMDGLSWFTAERADVSCHPEALLPTAQSIISLGMVYLTEMPEDAHEGTPRGRIARYAWGDDYHDIIKPKLKQFAEWLREYARSEVSREDFETRLFVDTGRMVDRAVAQRAGLGWYGKNTNILTHGWGSWLFLAEIVTNLPLTPDEPLKANCGNCEICLHACPTGALPNPYELDNTRCISFLTIELRGSIPLELRPLMGTWIFGCDICQEVCPVNKVAERRLGVRQEGQKQMIAVDSITRRKSGPFQPHQEYRVRPTVGSTPELLPLLELSEEEFRERFRRSPIKRTKRRGLLRNVCVALGNIRDPQAVPALIKALHDDEPLIRGHAAWALGQIGGEQATNALQECMQTEEDSEVQKEIRCALTELVASS

SEQ ID NO: 81683 - protein, 312 aa, unidentified
  source 1..312: note = Thermosynechococcus elongatus
  REGION 1..312: note = sp|Q8DLA9|QUEG_THEEB Epoxyqueuosine reductase; OS = Thermosynechococcus elongatus (strain BP-1) OX=197221; GN = queG PE=3 SV=2
MVTAAAIKEFAHQLGFHRVGIVDLRTYTDDHPSGVAALQRWLAQGFQGEMAWMANPRRQKIQAVLPGAKSVISVALNYYQPDPQPPPKVKIARYAWGRDYHRVLGKRLQVLGQWLQSQVPEMDYRWYVDTGPVQDKVWAEQAGIGWIGKHSNVISRQYGSWILLGELITTLELTGDRPHTNHCGTCTRCLAACPTGAIVEPYVVDANRCIAYHTIESRAPELPAAIAAHLEGWVAGCDICQEVCPWNQRFAQPTDVEDFAARSPLLQTSLEELATLSDAAWDELTRGSALRRIKSAQWRRNAQAVLSSNPYD

SEQ ID NO: 81684 - protein, 229 aa, Thermotalea metallivorans
  REGION 1..229: note = tr|A0A140KZC2|A0A140KZC2_9CLOT Epoxyqueuosine reductase OS=Thermotalea metallivorans OX=520762 GN=queG_2; PE = 4 SV=1
MDQGWILKNKIMEWGASKVGYADLGDVLPEEYKHLKTGISIAVRLSDEIMSQIQEAPTHTYFHHYRTVNFFIDQITLKITMQLQEWGYLAMAIAASQSVNIDGRHYRGVFQHKTAATRSGMGWIGKNGCLVTEEYGPRVRLGTVLTNMDVVYDPPVVASKCGACKKCVQACPAMALRGGLWYPGMPREEMVDARACSMHMHAHYQHIGRGSVCGICIKTCPQGNKIIKR

SEQ ID NO: 81685 - protein, 374 aa, Thermotalea metallivorans
  REGION 1..374: note = tr|A0A140LEH6|A0A140LEH6_9CLOT Epoxyqueuosine reductase OS=Thermotalea metallivorans OX=520762 GN=queG_1; PE = 4 SV=1
MKLEDKIKHYAMEIGIDLIGFASAESFERIGKIQACRKKRGHLSGFEEQDIEKRKNPLLTMENTKTIIAAAVGYYMPEEPWTEAGDEPAGEIARVAWGRDYHQILREKLKMLMAYIEGIAGSFDYKIYVDTGPLSDREVAFRAGIGWFGKNNMLITEKYGSWVFLGYALTSLELEPDRPLEKQCLDCQACIRACPGGALAEGFAMNEKRCLSYITQAKEEIDEEMKRKLANRIYGCDVCQGVCPQNRSASMARNRDFMPENRSHRPNLARLIQMTKKEFQEIYGETAAGWRGRNYFRRNAIIAAGNSKDPRLLPSLAGALQDESTMIRKHAAWAIHQIGQGGHELLRRHLSIEKEKEVIDLIKGYIEEAKKIKG

SEQ ID NO: 81686 - protein, 346 aa, Thermovenabulum gondwanense
  REGION 1..346: note = tr|A0A161REG6|A0A161REG6_9FIRM Epoxyqueuosine reductase OS=Thermovenabulum gondwanense OX=520767 GN=queG; PE = 4 SV=1
MMNIQKIKNEIINYSKLIGFDLIGFAKADPFINEYNLLKERKQRGLISPFEETDLEKRCFPDKIMKGAKTIIVFALNYLNHYNSSIRFTKEYLEEKKKEGVFSKYACIVDYHTIIKDKLFKVAKFIKDRFNADSRFFVDSGAILERAAAQRAGIGYIGANTCLFTKEYGSYVFLGEIITNIDLPEDEPIESLCNRCEKCIFACPTGALYEPFKLNPFKCLSYLTQSKKAITDKKMIKAFANRLFGCDSCQDVCPNNQLKNVLIKNHREFLLDYKLPLDPFYIFKIGNKEYKEHFGSTPIEWRGKNILRRNALIVISNAGELDKLDKNVILKDTSEIVREQAKVLLI

SEQ ID NO: 81687 - protein, 408 aa, Thermus aquaticus
  REGION 1..408: note = tr|A0A0N0BL47|A0A0N0BL47_THEAQ Epoxyqueuosine reductase OS=Thermus aquaticus OX=271 GN=queG PE=4 SV=1
MKDLLEETAQAMGLIPAWAPLKPLEEAERRFRAWLEAGRHGGMAYLQRPEERFWPEKRFPWAKSALLLFAPYAYEDPGRPPGGLRVGRVARYAWSRDYHLVLGEALGALAALARSLGLEARGYVDHGPLPERALAVLSGAGWVGKSSMFLSQAFGVHAFIGVLLTPLEVEAPPRHPSRCGRCVRCLQACPTGALLGDGTLDARICISYLTVEERGFIPPGLWPRMGDWLLGCDLCQDTCPWGRFGGVFPALRPEPHLAHPDLLDFFRLSGRAFAKKYAGTAFARPDRVRMARNALIVLSNLGLGEALMAEAARDPNPLVRRTALHALHRAGKPLEGFLKDPDPLVRAEALALLGEAAGAVHPLQNGGEAPGLQVKEEGAQVVGDLEEAGLEGVGVQDEGVGPGLPGEA

SEQ ID NO: 81688 - protein, 408 aa, Thermus aquaticus
  REGION 1..408: note = tr|B7A6S0|B7A6S0_THEAQ 4Fe-4S ferredoxin-type domain-containing protein OS=Thermus aquaticus Y51MC23; OX = 498848 GN=TaqDRAFT_4519 PE=4 SV=1
MKDLLEEAARAMGLIPAWAPLKPLEEAERRFRAWLEAGRHGGMAYLRRPEERFWPEKRFPWAKSALLLFAPYAYEDPGRPPGGLRVGRVARYAWSRDYHLVLGEALGALAALARSLGLEARGYVDHGPLPERALAVLSGAGWVGKSGMFLSQAFGVHAFIGVLLTPLEVEAPPLHPSRCGRCVRCLQACPTGALLGDGTLDARICISYLTVEERGFIPPGLWPRMGDWLLGCDLCQNTCPWGRFGGVFPALRPEPHLAHPDLLDFFRLSGRAFAKKYAGTAFARPGRVRMARNALIVLSNLGLGEALMAEAARDPNPLVRRTALHALHRAGKPLEGFLKDPDPLVRAEALALLGEAAGAVHPLQNGGEAPGLQVKEDGAQVVGDLEEAGLEGVGVQDEGVGPGLPGEA

SEQ ID NO: 81689 - protein, 379 aa, Thermus arciformis
  REGION 1..379: note = tr|A0A1G7ETE6|A0A1G7ETE6_9DEIN Epoxyqueuosine reductase OS=Thermus arciformis OX=482827; GN = SAMN04488243_10675 PE=4 SV=1
MVKDLLEERARALGLLFAWAPLDLPPKAEARHRAWLEAGRHGGMAYLESPERFHPRRRFPWAKSALLLFAPYAYPDPGTPPGGLRVGRVARYAWTRDYHLVLGEALKALEEVARGLGLEAKGYVDHGPLPERTLAALSGAGWIGKSGYFLSQAFGVHAFIGVLLTSLEVEPAPLYPSRCGRCARCLMACPTEALLGDGTLDARRCVSYLTIEHKGFIPPSLWPGIGEWLFGCDLCGEACPWERFGKVWKALRPEPELAHPDLLDFFRLSGRAFGRKYAGTAFLRAGKPRLARNALIVLFNLGLGEALSLEAAKDPSPLVRRTALHALFRAGRGVEGFLQDPEPRVRAEALALLGEAPGAVDLLQDGGKPPGPEVKEEGA

SEQ ID NO: 81690 - protein, 410 aa, Thermus brockianus
  REGION 1..410: note = tr|A0A1J0LUT6|A0A1J0LUT6_THEBO Iron-sulfur protein; OS = Thermus brockianus OX=56956 GN=A0O31_01891 PE=4 SV=1
MDPKALLEEAARERGLGVAWAPLAPQEEAKARFQAWLGAGRHGGMAYLEGRVEERFDPRRRFPMAHSALLLFAPYAFPDPGKPPGGLRVGRVARYAWVRDYHLLLGEELRRLERVAEGLGVFAKGYVDHGPLSERTLAALSGAGWIGRNGYFLSQGFGVHAFIAVLLTSLEVAPSPLHPPRCGRCSRCLPACPTGALLGDGTLDARVCVSYLTVEHKGFIPPGLWPGIGAWLLGCDLCGEACPWGRFGKAWPGFAPEPELAHPDLRDFFRLSGHAFRKKYAGTAFLRPGRARMARNALIVLANLGLGESLMAEAAQDPNPLVRRTALHALFRAGKPIQGFLKDPDPTVRQDAQALLEAPGAVDLLQGGGQAPGPEVKEQGTEVVGYLEEAGLEGIRVQEEGVGPRLPGEA

SEQ ID NO: 81691 - protein, 376 aa, Thermus filiformis
  REGION 1..376: note = tr|A0A0A2X767|A0A0A2X767_THEFI (Fe-S)-binding protein OS=Thermus filiformis OX=276 GN=THFILI_08730 PE=4; SV = 2
MVKDLLEERARGLGFLVAWAPLALPEEVKARFLAWLRSGRHAGMAYLARHPEVRLDPALRFPARSALLLAAPHAYPDPGRPPGGVRLGRVARYAWARDYHLLLEPHLRALEEVARGLGLWARGYVDHGPLPERSLAALAGLGFIGRSGMLIRVGGGSYLSLAVLLTDLPPPPPAPVPGRCGRCVRCLAACPTNALLGDGTLDARRCVSYWTIEHRGAIPYPFWDGVGEWLFGCDLCQEACPWNRFGSVWTGFRPEPDLAHPDLQDFFQLSGRAFGRKYAGTAFLRPGRARMARNALIVLANLGEGLGLIRQGLSDPHPLVRLTALQAAHRVGRPDWGRRLLLDPDPRVAREARRLWRGEPPSPVDLFQDEGEAPGP

SEQ ID NO: 81692 - protein, 376 aa, Thermus oshimai
  REGION 1..376: note = tr|K7RKC2|K7RKC2_THEOS Uncharacterized Fe-S protein; OS = Thermus oshimai JL-2 OX=751945 GN=Theos_1820 PE=4 SV=1
MEGARRLLEEAAREEGLFFAWAPLELPEAAKARYRAWLEAGRQAGMAYLARGVEERLEPRRRFPEAHSALLLFAPYALEDPGAPKGGLRVGRVARYAWSRDYHLVLGESLARLEGVAQALGLWARGYVDHGPLPERSLAALSGAGWVGKSGMFLSPQLGVHAFIGVLLTSLEVAAPPPHPSRCGRCTRCLSACPTGALPGDGTLEAGRCVSYLTIEHKGPVPEALWEGIGDWLFGCDLCQEVCPWGRFGKAWERLRPEPELAHPDLLDFFRLSGRAFQRKYQGTAFLRAGRARMARNALIVLANLGLGERLMEEALKDPHPLVRRTALRALHRLGREVGAFLRSPDEALRAEALDLLGEAPGAVDGLQDGGQVPGP

SEQ ID NO: 81693 - protein, 377 aa, unidentified
  source 1..377: note = Thermus parvatiensis
  REGION 1..377: note = tr|A0A0X8D8C0|A0A0X8D8C0_9DEIN Epoxyqueuosine reductase OS=Thermus parvatiensis OX=456163 GN=AV541_08275; PE = 4 SV=1
MVKDLLEERARALGLLFAWAPLDLPPKAEARHRAWLEAGRHGGMAYLEAPERFHPRKRFPWAKSALLLFAPYAYPDPGTPPGGLRVGRVARYAWTRDYHLVLGEALKALEEVARGLGLEAKGYVDHGPLPERTLAALSGAGWIGKSGYFLSQAFGVHAFIGVLLTSLEVEPAPLHPSRCGRCTRCLSACPTEALLGDGTLDARRCVSYLTIEHKGPIPPSLWPGIGDWLFGCDLCGEACPWERFGKVWKALRPEPELAHPDLLDFFRLSGRAFQRKYAGTAFLRAGRARMARNALIVLFNLGLGEALFLEATRDPNPLVRRTALRALHLTGKPLDPFLQDPGLREEALALLGEAPEAVHLLQDGREAPGPEVKEQGA

SEQ ID NO: 81694 - protein, 377 aa, unidentified
  source 1..377: note = Thermus parvatiensis
  REGION 1..377: note = tr|H7GFA0|H7GFA0_9DEIN Iron-sulfur protein; OS = Thermus parvatiensis OX=456163 GN=RLTM_03951 PE=4 SV=1
MVKDLLEERARELGLLFAWAPLDLPQEAEARHRAWLEAGRHGGMAYLEAPERFHPRKRFPWAKSALLLFAPYAYPDPGTPPGGLRVGRVARYAWTRDYHLVLGEALKALEETARGLGLKAKGYVDHGPLPERTLAALSGAGWIGKSGYFLSQAFGVHAFIGVLLTPLEVEPAPLHPSRCGRCTRCLSACPTEALLGDGTLDARRCVSYLTIEHKGPIPPSLWPGIGDWLFGCDLCGEACPWERFGKVWKALRPEPELAHPDLLDFFRLSGRAFQRKYAGTAFLRAGRARMARNALIVLFNLGLGEALFLEATRDPNPLVRRTALRALHLTGKPLDPFLQDPGLREEALALLGEAPEAVHLLQDGREAPGPEVKEQGA

SEQ ID NO: 81695 - protein, 382 aa, Thermus scotoductus
  REGION 1..382: note = tr|A0A430S704|A0A430S704_THESC tRNA epoxyqueuosine(34) reductase QueG OS=Thermus scotoductus; OX = 37636 GN=queG PE=4 SV=1
MEARPLLEEALRERGLLYAWAPLAIPEEAEGRFRRFLAEGRHGGMAYLERGVEARFHLEHRFPWARSALVVFAPYAYPDPGIPKGGIRVGRVARYAWVRDYHLVLGEEVRALEGLARSLGVEAKGYVDHGPIPERTLAALTGMGWIGKSGMFLSQGFGVHAFIGVLLTSLEVEAPFPNPGRCGRCTRCLVSCPTGALLGDGTLDARVCVSYLTVEHKDFIPPALWPGMGDWLLGCDLCQEVCPWERFGKVWQGFRPEPELAHPNLEEFFRLSGRAFQRKFGDTAFARPGRTRMARNALIVLSNLGLGEDLLREAAKDPHPLVRRTALHALFLAGLGIERFLRDPDEGIRAEVSVLLGEAPRAVDLFEDGGKSPGPEVKDEGS

SEQ ID NO: 81696 - protein, 382 aa, Thermus scotoductus
  REGION 1..382: note = tr|E8PMV3|E8PMV3_THESS Iron-sulfur cluster-binding protein OS=Thermus scotoductus (strain ATCC 700910 / SA-01) OX=743525 GN=TSC_c19550 PE=4 SV=1
MEARPLLEEALRERGLLYAWAPLAIPEEAEGRFRRFLAEGRHGGMAYLERGVEARFHLEHRFPWARSALVVFAPYAYPDPGIPKGGIRVGRVARYAWVRDYHLVLGEEVRALEGLARSLGVEAKGYVDHGPIPERTLAALTGMGWIGKSGMFLSQGFGVHAFIGVLLTSLEVEAPFPNPGRCGRCTRCLVSCPTGALLGDGTLDARVCVSYLTVEHKDFIPPALWPGMGDWLLGCDLCQEVCPWERFGKVWQGFRPEPELAHPNLEEFFRLSGRAFQRKFGDTAFARPGRTRMARNALIVLSNLGLGEDLLREAAKDPHPLVRRTALHALFLAGLGIERFLRDPDEGIRAEASVLLGEAPRAVDLFEDGGKSPGPEVKDEGS

SEQ ID NO: 81697 - protein, 410 aa, Thermus sp.
  REGION 1..410: note = tr|A0A0B0SAJ1|A0A0B0SAJ1_9DEIN (Fe-S)-binding protein OS=Thermus sp. 2.9 OX=1577051 GN=QT17_08015 PE=4; SV = 1
MEAKALLEEAARARGLGVAWAPLSPSEAAKARFQAWLEGGRHGGMAYLERRVEERFDPRRRFPEARSALLLFAPYAYPDPGKPPGGLRVGRVARYAWTRDYHLALGEELGRLEAVAEDLGVWAKGYVDHGPLSERTLAACSGAGWIGRSGYFLSQAFGVHAFLAVLLTSLEVEPPPLHPNRCGRCARCLPACPTGALLGDGTLDARLCVSYLTIEHKGFIPPSLWPGIGDWLFGCDLCGEACPWERFGRAWPGFRPEPELAHPDLWDFFRLSHRAFQRKYAGTAFLRAGRPRLARNALIVLSNLGLGEDLMAEAALDPSPLVRRTALHALFRAGRPIEGFFKDPDPEVRRDAQALVEAPGAVDLFQGGGQAPGPEVKEDGAQVVGDLEEAGLEGVRVQEEGVGPGFPREA

SEQ ID NO: 81698 - protein, 382 aa, Thermus sp.
  REGION 1..382: note = tr|W2U848|W2U848_9DEIN (Fe-S)-binding protein; OS = Thermus sp. NMX2.A1 OX=570924 GN=TNMX_00960 PE=4 SV=1
MEARPLLEEALRERGLLYAWAPLAIPEEAEGRFRRFLAEGRHGGMAYLERGVEARFHLEHRFPWARSALVVFAPYAYPDPGIPKGGIRVGRVARYAWVRDYHLVLGEEVRALEGLARSLGVEAKGYVDHGPIPERTLAALTGMGWIGKSGMFLSQGFGVHAFIGVLLTSLEVEAPFPNPGRCGRCTRCLVSCPTGALLGDGTLDARVCVSYLTVEHKDFIPPALWPGMGDWLLGCDLCQEVCPWERFGKVWQGFRPEPELAHPNLEEFFRLSGRAFQRKFGDTAFARPGRTRMARNALIVLSNLGLGEDLLREAAKDPHPLVRRTALHVLFLTGLGIERFLRDPDEGIRAEASVLLGEAPRAVDLFEDGGKSPGPEVKDEGS

SEQ ID NO: 81699 - protein, 382 aa, unidentified
  source 1..382: note = Thermus tengchongensis
  REGION 1..382: note = tr|A0A4Y9EXP8|A0A4Y9EXP8_9DEIN tRNA epoxyqueuosine(34) reductase QueG OS=Thermus tengchongensis OX=1214928 GN=queG PE=4 SV=1
MDPKALLEEAARERGLEVAWAPLEPMAGAEARFRRWLAEGRHGGMAYLERGVAERFYPQSRFPWARSALLLLAPYAYPDPGVPKGGFRVGRVARYAWVRDYHLLLGEELRRLEALAQGLGLPAKGYVDHGPLPERTLAALTGVGWIGKSGMFLSPAFGVHAFIGVLLTPLEVEAPPPHPDRCGRCTRCLTACPTGALLGDGTLDARRCVSYLTVEHRGFIPPALWRGMGEWLLGCDGCTEVCPWGRFGKVWRGFRPEPELAHPDLTEFFRLSGHAFQRKYGGTAFARPGRARMARNALIVLSNLGLGEGLMREAAKDPNPLVRRTALHALHRAGLGVEAFRQDPDPQVRAEALVLLGEAPGAVDLFQNRRESPGPEVKDERA

SEQ ID NO: 81700 - protein, 382 aa, unidentified
  source 1..382: note = Thermus tengchongensis
  REGION 1..382: note = tr|A0A4Y9FEL9|A0A4Y9FEL9_9DEIN tRNA epoxyqueuosine(34) reductase QueG OS=Thermus tengchongensis OX=1214928 GN=queG PE=4 SV=1
MDPKALLEEAARERGLEVAWAPLEPMAGAEARFRRWLAEGRHGGMAYLERGVAERFHPQSRFPWARSALLLLAPYAYPDPGVPKGGFRVGRVARYAWVRDYHLLLGEELRRLEALVQGLGLPAKGYVDHGPLPERTLAALTGVGWIGKSGMFLSPAFGVHAFIGVLLTPLEVEAPPSHPDRCGRCTRCLTACPTGALLGDGTLDARRCVSYLTVEHRGFIPPALWRGMGEWLLGCDGCTEVCPWGRFGKVWRGFRPEPELAHPDLTEFFRLSGHAFQRKYGGTAFARPGRARMARNALIVLSNLGLGEGLMREAAKDPNPLVRRTALHALHRAGLGVEAFRQDPDPQVRAEALALLGEAPGAVDLFQNRRESPGPEVKDQRA

SEQ ID NO: 81701 - protein, 379 aa, Thermus thermophilus
  REGION 1..379: note = tr|A0A1J1EJX0|A0A1J1EJX0_THETH Iron-sulfur protein; OS = Thermus thermophilus OX=274 GN=TTMY_0958 PE=4 SV=1
MVKDLLEERARALGLLFAWAPLDLPPKAEARHRAWLEAGRHGGMAYLESPERFHPKRRFPWAKSALLLFAPYAYPDPGTPPGGLRVGRVARYAWARDYHLVLGEALKALEEVARGLGLEAKGYVDHGPLPERTLAALSGAGWIGKSGYFLSQAFGVHAFIGVLLTSLEVEPAPLHPSRCGRCARCLMACPTEALLGDGTLDARRCVSYLTIEHKGFIPPSLWPGIGEWLFGCDLCGEACPWERFGKVWKALRPEPELAHPDLLDFFRLSGRAFGRKYAGTAFLRAGRPRLARNALIVLFNLGLGEALFLEAAKDPSPLVRRTALHALFRAGRGVEGFLQDPEPAVRAEALALLGEAPGAVDLLQDGRKPPGPEVKEEGA

SEQ ID NO: 81702 - protein, 377 aa, Thermus thermophilus
  REGION 1..377: note = tr|H9ZT08|H9ZT08_THETH Uncharacterized Fe-S protein; OS = Thermus thermophilus JL-18 OX=798128 GN=TtJL18_1592; PE = 4 SV=1
MVKDLLEERARALGLLFAWAPLDLPQEAEARHRAWLEAGRHGGMAYLESPERFHPRKRFPWAKSALLLFAPYAYPDPGTPPGGLRVGRVARYAWTRDYHLVLGEALKALEETARGLGLKAKGYVDHGPLPERTLAALSGAGWIGKSGYFLSQAFGVHAFLGVLLTDLEVEASPVHPNRCGRCARCLAACPTHALLGDGTLDARACVSYLTIEHKGPIPPSLWPGIGDWLFGCDLCGEACPWERFGKVWKALRPEPELAHPDLLDFFRLSGRAFGRKYAGTAFLRAGRARMARNALIVLFNLGLGEALFLEATRDPNPLVRRTALRILHLTGKPLDPFLQDPGLREEALALLREAPEAVHLLQDGREAPGPEVKEQGA

SEQ ID NO: 81703 - protein, 369 aa, Thioalbus denitrificans
  REGION 1..369: note = tr|A0A369BWY6|A0A369BWY6_9GAMM Epoxyqueuosine reductase OS=Thioalbus denitrificans OX=547122 GN=queG; PE = 3 SV=1
MPPPAPDQLADLARAIRRWGVDLGFQQVGIGGVDLDRHEARFLHWLERGFHGEMEYMARHGTRRSRPAELEPGTVRVISARMDYWPPGRDAVAVLRDPARGYVSRYALGRDYHKLLRKRLARLVERVREAAGGFGARVFVDSAPVLEKALAEQAGLGWIGKHSNLIHPRAGSWFFLGEIYTDLPLPVDDAPTGNHCGTCAACIDACPTRAIVAPYQVDARLCISYLTIELHGPIPPALRPLLGNRIYGCDDCQLVCPWNRFARLTGEGDFAPRNDLDAPELTALLGWEETEFLRRTEGSPIRRIGHERWLRNVAVALGNGAATPAALAALRARLAHPSVLVREHVQWALERLDRAAAAAGPAGGGGPGP

SEQ ID NO: 81704 - protein, 358 aa, Thioalkalivibrio denitrificans
  REGION 1..358: note = tr|A0A1V3NRA7|A0A1V3NRA7_9GAMM Epoxyqueuosine reductase OS=Thioalkalivibrio denitrificans OX=108003; GN = queG PE=3 SV=1
MHMPRALSSTDARDLAEQVKAWGRELGFQQVGITDTDLQAHEARLLGWLEGGRHGEMDYMARHGTKRARPAELVPGTLRVISVRMDYQPPDARESWSVIGDPSLGFVSRYALGRDYHKLMRNRLQKLASRIEEVIGQFGYRAFVDSAPVLEKALAEKAGLGWIGKHTNLLSREAGSWYFLGELYTDLPLPADPPGDAHCGTCTACIDVCPTRAIVAPYQLDARLCISYLTIELKNAIPEPLRPLIGNRIYGCDDCQLVCPWNRFAGLAAEPDFRARHGLDAPDLVDLFNWDEKTFLNRTEGSAIRRIGHERWLRNVAVALGNGPSRPEAIAALSTRMDHPSGLVREHAGWALTRLGAR

SEQ ID NO: 81705 - protein, 416 aa, Thioalkalivibrio halophilus
  REGION 1..416: note = tr|A0A1V2ZWD7|A0A1V2ZWD7_9GAMM Epoxyqueuosine reductase OS=Thioalkalivibrio halophilus OX=252474 GN=queG; PE = 3 SV=1
MSVPLLAGLSIVPDHPDPRQCAELADRIRQWGRELGFAELRIGPARVPEADRRHLDAWLERGSHGDMQWMADRAALRHDPDALVPGVQRIISVRMDYFPPRTRRPAAQLADPEGAYVSRYALGRDYHKLLRKRLTELGRRIEAEAPHGYRAFTDSAPVLEKALAQQAGLGWIGKHTNLLARGTGSWFFLGELFTDLPLPLDPGPAEDHCGSCRACLDVCPTQAFRGPHDLDARRCISYLTIELKGSIPEDLRPLIGNRIYGCDDCQLVCPWNRFAEVAAEPDFIARHGLDSASLVELFGWDEASFLEHTTGMAIRRIGHEQWLRNLAVALGNGPATDAAREALAARAGHPSALVREHVAWARARLDERAAGRLAEPPAIPVKALTRAPVDPAARPASPPASKDGTAGEPEDPTTGS

SEQ ID NO: 81706 - protein, 369 aa, Thioalkalivibrio nitratireducens
  REGION 1..369: note = tr|L0E1C6|L0E1C6_THIND Epoxyqueuosine reductase; OS = Thioalkalivibrio nitratireducens (strain DSM 14787 / UNIQEM 213 / ALEN2) OX=1255043 GN=yjeS [H] PE=3 SV=1
MGCSPIVPQTLTPSQCLDLAGRIRDWGHELGFRAVGITRASVGIHAERLDAWLAQGSHGEMRWMADRAELRRDPARLVPGVQRIVSLRMDYLPPATARPEAILADPDRAYVSRYALGRDYHKLIRRRIQTLADWIETEVGPFGYRAFTDSAPVLEKALAERAGLGWIGKHTNLLAREAGSWFFLGELFTDLPLPIDDPSEAHCGSCRACLDICPTQAFRGPYDLDARRCISYLTIEHPGAIPESLRPMLGNRVYGCDDCQLVCPWNRFAGLSVEPDFAARHGLDAAGLIDLFAWDEARFLERTAGMAIRRIGHERWLRNLAVALGNGPATPEAIAALERRAGHPSALVREHVGWALERLRRGPGPRRRA

SEQ ID NO: 81707 - protein, 361 aa, Thioalkalivibrio paradoxus
  REGION 1..361: note = tr|W0DQE6|W0DQE6_9GAMM Epoxyqueuosine reductase; OS = Thioalkalivibrio paradoxus ARh 1 OX=713585 GN=queG PE=3; SV = 1
MPQTLTPSQCRELAARIREWGHALGFQAVGITDASVGVHAEHLDAWLAQGSHGAMRWMADRAELRRDPAQLLPGVQRIVSLRMDYLPPDCARPETILGDSTRAYVSRYALGRDYHKLIRRRIQTLANRIETAVGPFGYRAFTDSAPILEKALAERAGLGWIGKHTNLLAREAGSWFFLGELFTDLPLPVDAPTEAHCGSCRACLDICPTQAFRGPYDLDARRCISYLTIEHPGAIPEPLRPMLGNRVYGCDDCQLVCPWNRFASLSVEPDFAARHGLDSAGLIELLAWDEPTFLERTAGMAIRRIGHPRWLRNVAVALGNGPATPEAIAALERRAGHPSALVREHVGWALERLRLRKRPAR

SEQ ID NO: 81708 - protein, 380 aa, Thioalkalivibrio sp.
  REGION 1..380: note = tr|D3SEG0|D3SEG0_THISK Epoxyqueuosine reductase; OS = Thioalkalivibrio sp. (strain K90mix) OX=396595 GN=queG; PE = 3 SV=1
MIAEIVPEPLDPRQCAALAEQIRAWGRELGFQALRIAPATVPEADRQHLDRWLEKGSHGEMGWMAERAALRHDPAQLMAGVQRVISVRMDYFPPRTRRPAIQLAERDRAYVSRYALGRDYHKLIRKRLTELGRRIESEAGPHGYRAFTDSAPILEKALAARAGLGWIGKNTNLLARESGSWFFLGELFTDLPLPVDDPVGEHCGACTACLDICPTQAFRGPYDLDARRCISYLTIELKGSIPEDLRPLIGNRIYGCDDCQLVCPWNRFAEVSAEPDFVARHGLDAASLVELFGWDETIFLHRTKGMAIRRIGHEQWLRNLAVALGNGPPSAEAEAALRARADHPSPLVREHVGWALERLRSPSPSPAVDHLSRLTQAPGQ

SEQ ID NO: 81709 - protein, 405 aa, Thioalkalivibrio sp.
  REGION 1..405: note = tr|A0A318VY97|A0A318VY97_9GAMM Epoxyqueuosine reductase OS=Thioalkalivibrio sp. ALE21 OX=1158175 GN=queG; PE = 3 SV=1
MPDHPDPRQCAELADRIRQWGRELGFAELRIGPARVPEADRRHLDAWLERGSHGDMQWMADRAALRHDPDALVPGVQRIISVRMDYFPPRTRRPAAQLADPEGAYVSRYALGRDYHKLLRKRLTELGRRIEAEAPHGYRAFTDSAPVLEKALAQQAGLGWIGKHTNLLARGTGSWFFLGELFTDLPLPLDPGPAEDHCGSCRACLDVCPTQAFRGPHDLDARRCISYLTIELKGSIPEDLRPLIGNRIYGCDDCQLVCPWNRFAEVAAEPDFIARHGLDSASLVELFGWDEASFLEHTTGMAIRRIGHEQWLRNLAVALGNGPATDAAREALAARAEHPSPLVREHVAWARTRLDERAAGRLAEPPAIPVKALTRAPVDPAARPAGTPASKDGTAGEPKDPTTGS

SEQ ID NO: 81710 - protein, 363 aa, unidentified
  source 1..363: note = Thioalkalivibrio sulfidiphilus
  REGION 1..363: note = tr|B8GNC1|B8GNC1_THISH Epoxyqueuosine reductase; OS = Thioalkalivibrio sulfidiphilus (strain HL-EbGR7); OX = 396588 GN=queG PE=3 SV=1
MHKALNDTEAMELARRIKAWGLELGFQQVGISDTDLDEHESRLLAWLDAGRHGEMDYMARHGTRRSRPVELHPGTLRVISVRMDYQPPEARESWSVIHDPALGFVSRYALGRDYHKVLRNRLQQLATRIEAEIGPFGYRAFVDSAPVLEKALAEKAGLGWIGKHTNLLSREAGSWFFLGELYTDLPLPTDPPGEAHCGTCTACIEVCPTRAIVAPYELDARLCISYLTIELKGAIPEPLRPLMGNRIYGCDDCQLVCPWNRFARLSAEPDFRARHGLDGPALAELLAWDEATFLARTEGSAIRRIGHERWLRNVAVALGNGEALPGSIGVLESRTDHPSPLVREHAGWALARLRRRDTGVQHS

SEQ ID NO: 81711 - protein, 389 aa, Thioalkalivibrio versutus
  REGION 1..389: note = tr|A0A0G3G3Y1|A0A0G3G3Y1_9GAMM Epoxyqueuosine reductase OS=Thioalkalivibrio versutus OX=106634 GN=queG; PE = 3 SV=1
MIHAITSVAEAEIVPQRLDPRQSAELAERIRDWGRELGFQAVRIAPAEVPEADRRHLDDWLAQGSHGDMDWMADRAPLRHAPDALVPGVQRIISVRMDYFPPATRRPAIQLAERDHAYVSRYALGRDYHKLLRKRLTTLARRIEAEVGPFGYRAFTDSAPILEKALAARAGLGWIGKNTNLLARESGSWFFLGELFTDLPLPLDEPVDEHCGQCTACLDVCPTRAFRGPYDLDARRCISYLTIELKGAIPEDLRPLIGNRIYGCDDCQLVCPWNRFAEVTAEPDFIARHGLDSASLIELFAWDEATFLARTEGMAIRRIGHAQWLRNLAVALGNGPATPEADAALAARAEHPSELVREHAAWAREQLRNPPHSAPLSTENLSRLTQAPG

SEQ ID NO: 81712 - protein, 389 aa, Thioalkalivibrio versutus
  REGION 1..389: note = tr|A0A1V3BN95|A0A1V3BN95_9GAMM Epoxyqueuosine reductase OS=Thioalkalivibrio versutus OX=106634 GN=queG; PE = 3 SV=1
MIHAITSVAEAEIVPQRLDPRQSTELAERIRDWGRELGFQAVRIAPAEVPEADRRHLDDWLAQGSHGDMDWMADRAPLRHAPDALVPGVQRIISVRMDYFPPATRRPAIQLAERDHAYVSRYALGRDYHKLLRKRLTTLARRIEAEVGPFGYRAFTDSAPILEKALAARAGLGWIGKNTNLLARESGSWFFLGELFTDLPLPLDEPVDEHCGQCTACLDVCPTRAFRGPYDLDARRCISYLTIELKGAIPEDLRPLIGNRIYGCDDCQLVCPWNRFAEVTAEPDFIARHGLDSASLIELFAWDEATFLARTEGMAIRRIGHAQWLRNLAVALGNGPATPEADAALAARAEHPSELVREHAAWAREQLRNPPHSAPLSTENLSRLTQAPG

SEQ ID NO: 81713 - protein, 353 aa, Thiobacillus denitrificans
  REGION 1..353: note = tr|A0A106BKX2|A0A106BKX2_THIDE Epoxyqueuosine reductase OS=Thiobacillus denitrificans OX=36861 GN=queG; PE = 3 SV=1
MHERDLRRLAGQIKHWGRELGFAAVGIADGDLSAAEAGLQEWLDRGFHGEMDYMAAHGTKRSRPAELVPGTVRIISARLDYFPPASADPHEVLNDADAAYVSRYALGRDYHKVLRNRLQSLAEKIGTEVGAHHFRVFTDSAPVLEVELAAKSGLGWRGKHTLLLNRQHGSWFFLGEIYTDLPLPVDAPEAGHCGTCSACIDICPTQAIVAPYTLDARRCISYLTIELKGSIPTELRPLLGNRIYGCDDCQLVCPWNRFAQTAALPDFEVRNGLDSAQLVELFAWSETDFNDRLAGSPIRRIGHERWLRNIAVALGNAPPAPATQAALGARVDHPSELVREHVAWALARQQTTP

SEQ ID NO: 81714 - protein, 438 aa, Thiobacillus denitrificans
  REGION 1..438: note = tr|Q3SIQ2|Q3SIQ2_THIDA Epoxyqueuosine reductase; OS = Thiobacillus denitrificans (strain ATCC 25259); OX = 292415 GN=queG PE=3 SV=1
MIQIKRGKIVGFNERVGRAFHPAQVAEPAQHAPHQRRLARTEVAFQIEGHAGRQAGRKPRAERKRGGLVGKVATRRRGIIRGMHEQDSPRDFGRLAAQIKQWGRELGFAAIGITDADLSAAEAGLHTWLDKGFHGEMDYMAAHGTKRSRPAELVPGTLRIISARLDYFPPDAVDPDTILATPDAAYVSRYALGRDYHKVLRQRLQTLAERIGAAAGEHHFRVFSDSAPVMEVELATRAGLGWRGKHTLLLNRHHGSWFFLGEIYSDLPLPVDAPEAEHCGTCHACLDACPTQAIVAPYSVDARRCISYLTIELKGSIPLELRSLIGNRIYGCDDCQLVCPWNRFAGTAAVPDFAVRNGLDSAQLVDLFAWSEADFNDRLAGSPIRRIGHERWLRNIAVALGNARPAPAIEAALGTRLDHPSAMVREHVAWALARQQER

SEQ ID NO: 81715 - protein, 352 aa, Thiobacillus sp.
  REGION 1..352: note = tr|A0A5C7RNB0|A0A5C7RNB0_9PROT Epoxyqueuosine reductase OS=Thiobacillus sp. OX=924 GN=queG PE=3 SV=1
MHERDLTRLAQQIKQWGRELGFAAVGIADGELSTAEAGLQAWLDRGFHGEMDYMAAHGTKRSRPAELIPGTVRVISARLDYFPPDALDPHAVLDDAAAAYVSRYALGRDYHKVLRNRLQGLAEKISAEIGDHHFRVFTDSAPVLEVELATKSGLGWRGKHTLLLNRQHGSWFFLGEIYTDLQLPVDVPEAEHCGTCQACIDICPTQAIVTPYALDARRCISYLTIELKGSIPPELRPLIGNRIYGCDDCQLVCPWNRFAQTTALPDFEVRNGLDRVRLVELFAWSEADFNNRLAGSAIRRIGHVRWLRNIAVALGNAPPSPAIEAALNARLDHPSELVREHVAWALARQKAA

SEQ ID NO: 81716 - protein, 357 aa, Thiobacillus sp.
  REGION 1..357: note = tr|A0A1E4NDH1|A0A1E4NDH1_9PROT Epoxyqueuosine reductase OS=Thiobacillus sp. SCN 65-179 OX=1660144; GN = queG PE=3 SV=1
MIGSMHAQDSGRLAAQIKQWGRELGFAEVGIAGCELGDAEAGLLEWLAKGFHGEMNYMAAHGTKRSRPAELVPGTLRVISVRLDYLPPGAADPHAVMADSEAAYLSRYALGRDYHKVLRSRLQTLVERIAAKAGHGQFRVFTDSAPVLEVELATQSGLGWRGKHTLLLNRDRGSWFFLGEIYTDLPLPVDTPETGHCGTCRACLDICPTQAIVAPYQLDARRCISYLTIELKGSIPVELRPPIGNRIYGCDDCQLVCPWNRFAQTTALPDFAVRNGLDRARLAALFAWSETDFNDRLAGSAIRRIGYERWLRNIAVALGNAAPSEAAANALRTRRDHPSALVREHVEWALSQHGPSA

SEQ ID NO: 81717 - protein, 348 aa, Thiocapsa marina
  REGION 1..348: note = tr|F9UFS1|F9UFS1_9GAMM Epoxyqueuosine reductase; OS = Thiocapsa marina 5811 OX=768671 GN=queG PE=3 SV=1
MIPPAELVARIKHRGLELGFQQVGITDTDLASAESRLLAWLAEGRQGTMDYMARHGVKRSRPADLVPGTVRVISVRMDYLPESHRAMQTALEDPPRAFISRYALGRDYHKLLRRRLQRLAEHILAEIGPFGYRVFVDSAPVLEKPLAEKAGLGWIGKHTNLIHPKAGSWFFLGEIYTDLALPIDTPLTDHCGRCRACIDVCPTRAIVAPYELDARLCISYLTIEHAGTIPEPLRPLMGNRIYGCDDCQLVCPWNRFARLAVEPDFQARQGLDTASLVELFGWDETTFLDRTQGSAIRRIGHIRWLRNIAVALGNAPASPEVKQALVSRADHPQALVREHVGWALERVG

SEQ ID NO: 81718 - protein, 348 aa, Thiocapsa rosea
  REGION 1..348: note = tr|A0A495VE80|A0A495VE80_9GAMM Epoxyqueuosine reductase OS=Thiocapsa rosea OX=69360 GN=queG PE=3 SV=1
MIPTGELVARIKRRGSELGFQQVGITDTDLASAESRLLTWLAEGRHGTMDYMARHGLKRSRPADLVPGTVRVISVRMDYLPESHRAMQAALEDPPRAFISRYALGRDYHKLLRRRLQRLAEHILAEIGPFGYRVFVDSAPVLEKPLAAKAGLGWIGKHTNLIHPQAGSWFFLGEIYTDLALPIDTPIADHCGRCRACIEVCPTRAIIAPYRLDARLCISYLTIEHAGSIPQPLRPLMGNRIYGCDDCQLVCPWNRFAQLAAEPDFQARHGLDTASLVEVFGWDESTFLDRTQGSAIRRIGHLRWLRNIAVALGNAPASAEVKQALSTRADHPDALIREHVGWALRRIG

SEQ ID NO: 81719 - protein, 348 aa, Thiocapsa roseopersicina
  REGION 1..348: note = tr|A0A1H2Z0Z5|A0A1H2Z0Z5_THIRO Epoxyqueuosine reductase OS=Thiocapsa roseopersicina OX=1058 GN=queG PE=3; SV = 1
MIPPDEIVARIKRRGLELGFQQVGITDTDLASAEARLLSWLDEGRHGTMDYMARHGLKRSRPADLVPGTVRVISVRMDYLPESHRAMQAALDDPPRAFISRYALGRDYHKVLRARLQRLAENILAEIGPFGYRVFVDSAPVLEKPLAAKAGLGWIGKHTNLIHPKAGSWFFLGEIYTDLALPIDSPIADHCGRCRACIEVCPTRAIVAPYALDARLCISYLTIEHAGGIPEPLRPLMGNRIYGCDDCQLVCPWNRFARLAAEPDFQARHALDTASLVEVFGWDEPTFLDRTQGSAIRRIGHSRWLRNIAVALGNAPSSPAIKQALNARVDHPDALIREHVGWALGRIG

SEQ ID NO: 81720 - protein, 348 aa, Thiocapsa sp.
  REGION 1..348: note = tr|A0A0U5IP31|A0A0U5IP31_9GAMM Epoxyqueuosine reductase OS=Thiocapsa sp. KS1 OX=610332 GN=queG PE=3 SV=1
MIATGGLATRVKAWGRELGFQQVGITDTDLGAAEARLRDWLAEGRHGTMDYMARHGLKRSRPADLVPGTIRVISVRMDYLPESQRVMQARLEDPQGAFISRYALGRDYHKVLRQRLQRLAEHILAEIGPFGHRVFVDSAPVLEKPLAAKAGLGWIGKHTNLIHPKAGSWFFLGEIYTDLALPVDTPMADHCGRCRACIEVCPTRAIVAPYVLDARLCISYLTIEHAGSIPEELRALIGNRIYGCDDCQLVCPWNRFARLGTEPDFQARHGLDTVSLIEVFAWDEATFLDRTQGSAIRRIGHIRWLRNIAVALGNAPASPEVKQALSRRADHPDALIREHVGWALRRIG

SEQ ID NO: 81721 - protein, 344 aa, unidentified
  source 1..344: note = Thioclava arenosa
  REGION 1..344: note = tr|A0A2A4CUJ7|A0A2A4CUJ7_9RHOB Epoxyqueuosine reductase OS=Thioclava arenosa OX=1795308 GN=queG PE=3 SV=1
MQDLKSRLIDQALSEGFSKARICRPDAVPEIAARLQAFVAAGRHGQMGWMKERMSWRGAPDQLWPEARSVIMLAETYTPDEDPMAVVGLPDRGAISVYARGRDYHDIVKKRLKRVGRWLLDQAEGEAIKVFVDTAPVMEKPLGQASGLGWQGKHTNLLARDLGSWFFLGAIFTTIELPPDPPEDSHCGNCTACLDACPTGAFPAPYQLDARRCISYLTIEHKGPIAQDLRAAMGNRIYGCDDCLAACPWNKFAAEAREMRYADQVGHPPLAELAALDDAAFRARFSGSPIKRVGRDRMLRNVLYAIGNSGDPALTDAARPHLADPDPVVREAAQWALERLGAAP

SEQ ID NO: 81722 - protein, 346 aa, unidentified
  source 1..346: note = Thioclava atlantica
  REGION 1..346: note = tr|A0A085U1F2|A0A085U1F2_9RHOB Epoxyqueuosine reductase OS=Thioclava atlantica OX=1317124 GN=queG PE=3; SV = 1
MAVEDLKTRLVAKALEEGFSKARITTPDAIPEAAGRLEAFVGAGMHGQMGWMEERRNWRGDPAALWPEARSVVMLAESYTPDYDPLALLAQRDRGVISAYAQGRDYHDLVKKRLKRVGRWLLDQVENEEIKVFVDTAPVMEKPLGQASGLGWQGKHTNLLARDLGSWFFLGAIFTTVELAPDAPEISHCGSCRACLDICPTEAFPAPYRLDARRCISYLTIEHKGPIAPELREKLGNRIYGCDDCLAICPWNKFAAEAREASYHGGVGAPPLAELAALDDAAFRARFAGSPIKRIGRDRFLRNVLYAIGNSGDPALAAAARPHLGAEDPVVAEAARWALARLGAVS

SEQ ID NO: 81723 - protein, 345 aa, unidentified
  source 1..345: note = Thioclava dalianensis
  REGION 1..345: note = tr|A0A074TG49|A0A074TG49_9RHOB Epoxyqueuosine reductase OS=Thioclava dalianensis OX=1185766 GN=queG PE=3; SV = 1
MTDLKSRLIAQALEEGFSKARVTTPDAIPQAAGRLEAFVEAGLHGQMGWMAERMGWRGAPDALWPEAKSVLMLAESYSPDYDPLDLLQERDRGVVSAYAQGRDYHDLVKKRLKRVGRWLLEQAPEGEIKVFVDTAPVMEKPLAQAAGLGWQGKHTNLLARDLGNWFFLGAIFTTVELAPDAPEREHCGRCTACLDICPTQAFPAPFQLDARRCISYLTIEHKGPVPEELRAKMGNRIYGCDDCLAICPWNKFAATAREARYHGGVGAPPLAELAALDDAGFRARFAGSPIKRIGRERFLRNVLYAIGNSQDRALAEAARPHLSDPDPVVAEAARWALARLGAEPG

SEQ ID NO: 81724 - protein, 346 aa, unidentified
  source 1..346: note = Thioclava electrotropha
  REGION 1..346: note = tr|A0A1W9XP73|A0A1W9XP73_9RHOB tRNA epoxyqueuosine(34) reductase QueG OS=Thioclava electrotropha OX=1549850 GN=AKL02_11280 PE=4 SV=1
MSAELKARLIETALAEGFSKARITTPDAIPQAAERLAAFVGAGMHGQMGWMEERMGWRGDPAALWSEARSVVMLAETYTPDYDPLDLLKARDHGVISAYAQGKDYHDLVKKRLKRVGRWLLDQAPEGAEIKVFVDTAPVMEKPLGEASGLGWQGKHTNLLARDLGSWFFLGAIFTTVELPPDAPEMSHCGSCTACLDICPTEAFPAPYQLDARRCISYLTIEHKGPIDEELRAKMGNRIYGCDDCLAVCPWNKFAAEAREARYHGGVGAPPLAELAALDDAGFRARFSGSPIKRIGRDRFLRNVLYAIGNSGDPGLAEAARPHLDDPDPVVAEAAQWALSRLEQAA

SEQ ID NO: 81725 - protein, 370 aa, unidentified
  source 1..370: note = Thioclava indica
  REGION 1..370: note = tr|A0A074JY90|A0A074JY90_9RHOB Epoxyqueuosine reductase OS=Thioclava indica OX=1353528 GN=queG PE=3 SV=1
MASWISERALGVLHPQTPAGYFYQEEEAVDDLKSRLVGKALEEGFSKARVTTPDAIPQAATRLEAFVGAGMHGEMGWMEERRVWRGDPTALWPQARSVLMLAESYSPDYDPLKLLEQHDRGVISAYAQGRDYHDLVKKRLKRVGRWLLEQAPEGEIKVFVDTAPVMEKPLAQAAGLGWQGKHTNLLARDLGNWFFLGAIFTTLELAPDSPEVEHCGNCTACLDICPTQAFPAPFQLDARRCISYLTIEHSGPIDLELRAKMGNRIYGCDDCLAACPWNKFAAAARETRYHGGVGAPPLAELAALDDAAFRARFSGSPVKRIGRDRFLRNVLYAIGNSGDEALAQAARVHLTDPNPVVAEAASWALAQLGA

SEQ ID NO: 81726 - protein, 338 aa, Thioclava pacifica
  REGION 1..338: note = tr|A0A074K384|A0A074K384_9RHOB Uncharacterized protein OS=Thioclava pacifica DSM 10166 OX=1353537; GN = TP2_00475 PE=4 SV=1
MKTRLVEKALEEGFSKARVTTPDAIPQAAERLDAFVSAGMHGQMGWMEERQNWRGAPDALWPEARSVVMLAEAYTPDYDPLELLEQRDRGVISAYAQGRDYHDLVKKRLKRVGRWLLDQAEGAQIKVFVDTAPVMEKPLGQASGLGWQGKHTNLLARDLGNWFFLGAIFTTVELEPDAPEVSHCGSCTACLDICPTEAFPAPYQLDARRCISYLTIEHKGPIAPELRAKMGNRIYGCDDCLAVCPWNKFAAEARELRYHGGVGAPPLAELAGLDDAAFRARFAGSPIKRIGRDRFLRNVLYAIGNSGDPSLVEAARAHLEDPDPVVAEAASWARAQLA

SEQ ID NO: 81727 - protein, 346 aa, Thioclava sp.
  REGION 1..346: note = tr|A0A1T2AZ99|A0A1T2AZ99_9RHOB tRNA epoxyqueuosine(34) reductase QueG OS=Thioclava sp. DLFJ4-1; OX = 1915313 GN=BMI85_13950 PE=4 SV=1
MSAELKARLIETALAEGFSKARITTPDAIPQAAERLAAFVGAGMHGQMGWMEERMGWRGDPTALWSEARSVVMLAETYTPEYDPLDLLKARDHGVISAYAQGKDYHDLVKKRLKRVGRWLLDQAPEGEEIKVFVDTAPVMEKPLGEASGLGWQGKHTNLLARDLGSWFFLGAIFTTVELPPDAPEISHCGSCTACLDICPTEAFPAPYQLDARRCISYLTIEHKGPIDEELRAKMGNRIYGCDDCLAVCPWNKFAAEAREARYHGGVGAPPLAELAALDDAGFRARFAGSPIKRIGRDRFLRNVLYAIGNSGDPGLAEAARPHLDDPDPVVAEAAQWALSRLEQAA

SEQ ID NO: 81728 - protein, 344 aa, Thioclava sp.
  REGION 1..344: note = tr|A0A1C2HQF4|A0A1C2HQF4_9RHOB tRNA epoxyqueuosine(34) reductase QueG OS=Thioclava sp. SK-1; OX = 1889770 GN=BFP70_07460 PE=4 SV=1
MDLKAQLTQHALAEGFSAIRITRPDAIPEVAQRLAQFVDAGMHGQMAWMAERMHWRGAPDALWPEARSVIMLAETYTPDHDPLQVLTQPERGAVSVYAQGKDYHDLVKKRLKRVGRWLLDTVKDGAPQIKVFVDTAPVMEKPLAQAAGLGWQGKHTNLLSRDLGSWFFLGAIFTTIELTIDPPQHSHCGSCRACLDACPTDAFPAPYQLDARRCISYLTIEHKGPVDLDLRSKMGNRIYGCDDCLAACPWNKFAQAALELRYHGPHGAPDLADLATLDDAAFRARYSGSPIKRIGRDRMVRNVLYAIGNSGLAHLRPVAQTLCDDPDPTVADAAQWAARRLPHS

SEQ ID NO: 81729 - protein, 358 aa, Thiocystis violascens
  REGION 1..358: note = tr|I3YH89|I3YH89_THIV6 Epoxyqueuosine reductase; OS = Thiocystis violascens (strain ATCC 17096 / DSM 198 / 6111) OX=765911 GN=queG PE=3 SV=1
MHPQNSCVRRNPAQPLADRIKTWGRQLGFQQIGIADTDLGEAEARLLDWLAAGYQGTMEYLERHGSRRSRPAELVPGTLRVISARMDYLVGSPDAMRKALDDPASAFLSRYALGRDYHKVLRRRLQRLAERIEAEVGPFGYRVFVDSAPVLEKPLAAKAGLGWIGKHTNLIHPRAGSWFFIGEIYTDLPLTIDAPIRDHCGRCHACLDICPTQAIVAPYQLDARRCISYLTIELRDSIPETLRPLIGNRIYGCDDCQLVCPWNRFAHRTREPDFSPRHGLDTATLLELFAWDEATFLRRTEGSAIRRIGHVQWLRNLAVALGNAPASSEVTAALRARASHPSQLVREHVAWGMKRSLA

SEQ ID NO: 81730 - protein, 366 aa, Thioflavicoccus mobilis
  REGION 1..366: note = tr|L0GX77|L0GX77_9GAMM Epoxyqueuosine reductase; OS = Thioflavicoccus mobilis 8321 OX=765912 GN=queG PE=3 SV=1
MSTCESLLPPSGKVPSPAELAALIKHWGGELGFQQVGIADTDLRLAEARLIRWLEQDLHGTMDYMARHGTRRSRPAELVPGTLRIVSVRMDYLPEPLDRTQPVLADPTHAFVSRYALGRDYHKVLRRRLQRLAERIRTAVGDFGFRVFVDSAPVMEKPLAAKAGLGWIGKHTNLINARAGSWFFLGELYTDLPLPVDRPAADHCGDCQACLAACPTGAIVAPYRLDARRCISYLTIEHQGPIPEPLRASLGNRIYGCDDCQIACPWNRFARLSSEDDFQPRQGLDRATLIALFGWDEPEFVARTEGSAIRRIGHRRWLRNLAVALGNATPGAPVQAALNARAEHPDPLVREHVAWARGAQARKVCG

SEQ ID NO: 81731 - protein, 350 aa, unidentified
  source 1..350: note = Thioflexothrix psekupsii
  REGION 1..350: note = tr|A0A251X8G7|A0A251X8G7_9GAMM Epoxyqueuosine reductase OS=Thioflexothrix psekupsii OX=1570016 GN=queG; PE = 3 SV=1
MSNTPTVLLQHLQHWSKELGFQELGVSDVDLTQAEQRLHIWLARQYHGQMDYMARHGDKRSRPAELLPGTLRVISLRINYLTATREDLWSQLQDAEHGYISIYAQGRDYHKVLRQRLKQLAMRLEQAIGSYQWRVFVDSAPVLEKPLAEKAGLGWIGKNTNLIHPRAGSFFFLGEIYTDLPLPITEQRHSDHCGRCQACLPSCPTQAFVAPYLLDARRCISYLTIEYKGIIPENLRPLIGNRIYGCDDCQLVCPWNRFASRSVEVDFQARAPWKNTRLLDLWAWSEADFLRHTEGSAIRRVGYLCWLRNLAIALGNAPKSDTIRLALNARLDFPSDLLQEHVRWALARHE

SEQ ID NO: 81732 - protein, 368 aa, unidentified
  source 1..368: note = Thiogranum longum
  REGION 1..368: note = tr|A0A4R1HFP3|A0A4R1HFP3_9GAMM Epoxyqueuosine reductase OS=Thiogranum longum OX=1537524 GN=queG PE=3 SV=1
MTLSPKSNISPGRDSIDFVQLARDIKTWARDLGFQQAGVADTDLDKDEAHLLSWLGENLHGEMNYMAAHDGKRSRPQELVPGTLRVISVRMDYWPGQADQADTVLDDPARAYVSRYALGRDYHKVLRKRLQKLAERIAEQVGPFGFRAFTDSAPVLEKALAQKAGLGWIGKHTNLINRREGSWFFLGELFTDLPLPVDDPSENHCGSCQACIDICPTQAIIAPYRLDARRCISYLTIELHGSIPEALRKGIGNRIYGCDDCQLICPWNRFSRPSEESDFTPRHRLDSRTLIDLFKWDEAEFLRVTEGTAIRRIGHISWLRNIAVALGNSSRSEAVIEALQSRSNHPSELVREHVQWALGQHNPGDKTA

SEQ ID NO: 81733 - protein, 353 aa, Thiohalobacter thiocyanaticus
  REGION 1..353: note = tr|A0A426QLK3|A0A426QLK3_9GAMM Epoxyqueuosine reductase OS=Thiohalobacter thiocyanaticus OX=585455; GN = queG PE=3 SV=1
MSTSPAINDLDQLARDIKAWGAELGFDQIGITGTDLSDAETHLLNWLAAGRHGEMGYMARHGTRRSRPAELEPGTLRVISVRLNYWPDAADPDTVLQSPGQAFISRYALGRDYHKLLRKRLQQLARRIEQVTGPFGYRAFTDSAPVLEKALAEQAGLGWIGKHTNLIHKQTGSWFFLGELYTDLPLPVDSPAENHCGTCRSCIDACPTGAIVAPYELDARLCISYLTIELHGPIPVELRPLLGNRIYGCDDCQLVCPWNRFARITAEDDFQPRHGLDTAGLIECFGWDEPTFLARTEGSAIRRIGHERWLRNIAVALGNAPTSPGVIAALQARADHPSELVREHVAWALAQHT

SEQ ID NO: 81734 - protein, 362 aa, Thiohalobacter thiocyanaticus
  REGION 1..362: note = tr|A0A1Z4VTS0|A0A1Z4VTS0_9GAMM Epoxyqueuosine reductase OS=Thiohalobacter thiocyanaticus OX=585455; GN = queG PE=3 SV=1
MPANPVIDDLDQLARDIKSWGAELGFDQIGITGTDLSDAETHLLNWLAAGRHGEMDYMARHGTKRSRPAALEPGTLRVISARLNYWPEAADADSVLQSPAQAFISRYALGRDYHKLLRKRLQQLARRIEQAIGPFGYRAFTDSAPVLEKALAEQAGLGWIGKHTNLIHKQTGSWFFLGELYTDLPLPVDAPGDNHCGTCRSCLDACPTGAIVGPYELDARLCISYLTIELHGPIPVELRPLLGNRIYGCDDCQLVCPWNRFAQLTAEDDFQPRHGLDTAGLIECFGWDEATFLDRTEGSAIRRIGHERWLRNIAVALGNAPTSAEVITALQARSDHSSELVREHVAWALSRHGDNNAQDAAR

SEQ ID NO: 81735 - protein, 365 aa, Thiohalomonas denitrificans
  REGION 1..365: note = tr|A0A1G5PKG4|A0A1G5PKG4_9GAMM Epoxyqueuosine reductase OS=Thiohalomonas denitrificans OX=415747 GN=queG; PE = 3 SV=1
MAISYNMDRQNLEPNDLARHIRSWGRELGFQAVGITDIDLSAAERRFLDWLKAGFHGEMEYMARHGTRRSRPPELVEGTCRVISVRMDYRPAGAADADAVLADSRQGYISRYALGRDYHKLMRKRLANLAKRIEAAVGPFGHRVFVDSAPVLEKPLAEKAGLGWVGKHSNLLHREGSWFFLGEIYVDLPLPIDTATEPHCGSCRACIDACPTRAIVAPYVVDARLCISYLTIELHGSIPEELRPLIGNRIYGCDDCQLCCPWNRFTANTAEGDFEPRHELDSTSLVELFAWDEARFLQRTEGSAIRRLGHERWLRNIAVALGNAPAEPAIIEALQARREACSPLVREHVEWALGQHGIETPESAG

SEQ ID NO: 81736 - protein, 369 aa, Thiohalophilus thiocyanatoxydans
  REGION 1..369: note = tr|A0A4R8IGU9|A0A4R8IGU9_9GAMM Epoxyqueuosine reductase OS=Thiohalophilus thiocyanatoxydans OX=381308; GN = queG PE=3 SV=1
MIMSHSQNKQAAQNTDWSALAAQIKQWGAELGFQQTAITDTDLDDYETRLQQWLARDYHGDMQWMAEYGHKRSRPADLVSDTRRIISVRLDYLPEERIDLKALLDHPDKAYISRYALGRDYHKLMRKRLQQLADHIQQQIGPFGYRAFVDSAPVMEKALAEKAGLGWIGKHSNLLQRHTGSWFFLGELYTDLPLPVDEPASNHCGTCQACIDVCPTKAIVEPYVVDARRCISYLTIELKGSIPVALRKPMGNRIYGCDDCQLYCPWNRFADSSQEPDFDPRQRLDEAQLVELFQWDEETFNRNLEGSAIRRIGHERWLRNIAVALGNAATSSEVIAALQARTDHPSELVREHVHWALEQHQPVGKESSS

SEQ ID NO: 81737 - protein, 385 aa, Thiohalorhabdus denitrificans
  REGION 1..385: note = tr|A0A0P9CQG6|A0A0P9CQG6_9GAMM Epoxyqueuosine reductase OS=Thiohalorhabdus denitrificans OX=381306; GN = queG PE=3 SV=1
MRDPKESIRAKALEVGFDAVGFARAELSAEARANLAEFLGRGRHGDMGWLARNTDRRGDPRTLWPEAATVIVLGMNYGPDHDPLEDLEHRDTGTVSVYARGRDYHDVVKKRLKQLGRWLIDQWGGEIKVFVDTAPVMEKPLGQAAGVGWQGKHTNLVSRAFGSWLFLGEVFTTLELAPDDPEGDFCGSCHRCLDACPTNAFPAPYQLDATRCISYLTIEHPGHIPREFRAALGNRIYGCDDCLAVCPWNKFASRARNEWLQARESLNRPALAELARLDDPAFRARFSGSPVKRLGRDRFVRNVLIALGNSGDPGLAEVAAGLLADGSALVRAMAVWALGELDPARLAREAARHRGGEGDPDVRAEWDAALAGQEGPGPGSPQKDS

SEQ ID NO: 81738 - protein, 361 aa, Thiohalospira halophila
  REGION 1..361: note = tr|A0A1I1NAW5|A0A1I1NAW5_9GAMM Epoxyqueuosine reductase OS=Thiohalospira halophila DSM 15071 OX=1123397; GN = queG PE=3 SV=1
MAARQNHPDATTADTDALLHRLRARARELGFAAVGVTDTDLTAAETYLFDWLADGRHGEMEWMARHGTLRSRPAELEPGTVRVISARMDYLPEPAAEPWSVLADGALGYVSRYALGRDYHRLMRRRLQHLARWLEAEAGPLGYRVFTDSAPVMEKPLAEKAGLGWIGKHTNLLSREGGSWFFLGEIYTDLPLPVDEPATAHCGSCRACIDACPTGAITAEGELDARLCISYLTIEHPGPIPEELRALMGNRIYGCDDCQLVCPFNREANATAEADFHPRQGLDAPRLVELFAWDEDEFLARTEGSAIRRIGHARWLRNLAVALGNAPTTGEVVAALRARADHPEPLVREHVAWALARHDPG

SEQ ID NO: 81739 - protein, 356 aa, unidentified
  source 1..356: note = Thiolapillus brandeum
  REGION 1..356: note = tr|W0TN20|W0TN20_9GAMM Epoxyqueuosine reductase; OS = Thiolapillus brandeum OX=1076588 GN=queG PE=3 SV=1
MPCTVQQRDGKQLAQQIKQWAGELGFQQTGIADTDLELAGERLNRWLELGRHGDMDYMWKHGSKRYRPGELVPGTLRVISVRMDYLPPDDDPVSVLQDPAAAFISRYALGRDYHKLMRKRLQKLAGRIREAVGDFGYRVFVDSAPVLEKPLAVKAGLGWMGKHTCIINREAGSWFFLGELYTDLPLPLDEPVEEHCGRCSACMDICPTRAIVAPYELDARRCISWLTIERHGPIPVALRPLMGNHIYGCDDCLMACPWNRFSTPTPEVDFLPRQGLDKSTLLELFSWDEASFLKRTEGSPIRRIGHERWLRNIAVALGNSNGGSAVMEALKKRLENSSALVAEHIRWALEQLDRNA

SEQ ID NO: 81740 - protein, 408 aa, unidentified
  source 1..408: note = Thiomicrorhabdus sp.
  REGION 1..408: note = tr|A0A4P9K5V0|A0A4P9K5V0_9GAMM Epoxyqueuosine reductase OS=Thiomicrorhabdus sp. G1 OX=2580412 GN=queG; PE = 3 SV=1
MTDTVSAQPTLVLSSEQFAQIKGWAAQLGFADISVCDIDLSDYEKGYFDWLAQDYHGDMEYMSRHGIKRSRPEELEPGTLSILSVRLNYFDCSAEHAARQIQQTDKAYISRYALQKDYHKLMRKRLQQLADKIGQHFNGFQYRAFCDSAPVLERSIAHKAGLGFIGKNSLIIHPRAGSWFFLGELYTNLTISTDLSEKTHPQGCGPCNACIVECPTQAIIDNGIVDSRRCISYLTIEYKGAIPLELRALMGNRIYGCDDCQLVCPWNKFTADTNEDVFRAQQNRLDKATLLELWQWDENQFLQNFAGSPIRRIGYPQWCRNLAVALGNIKASNHEKSAIIQALISKKTIINDLVDEHIDWAISHLGKTPESENHALPHKQIFAIDPKNIRPFKAKKYYLPKMPDNIDK

SEQ ID NO: 81741 - protein, 399 aa, unidentified
  source 1..399: note = Thiomicrospira aerophila
  REGION 1..399: note = tr|W0DWA1|W0DWA1_9GAMM Epoxyqueuosine reductase; OS = Thiomicrospira aerophila AL3 OX=717772 GN=queG PE=3 SV=1
MSNASENADDLNQLSRLISQHAYSLGFSHCGISNTDLSAHEADYFNWIGLGYHGTMDYMEKHGTKRTRPTELIPGTQSVISVLMPYFEYEQHHPITQLQSSQQAYISRYALGRDYHKVLRKKLAKLAEYILTLEPQAALRGFVDSAPVLERQLAHKAGLGFLGKNSLLIHPKAGSWFFIGEIYTNLILPTHTRSVKDGCGSCQACIQECPTQAIVADGVVDARRCISYLTIEHPGPIDEVLRPLMGNRIYGCDDCQLVCPWNHFTPPNQQVDFKVRHQLDQASLIELFSWTEAEFEQNTAGSPIRRIGYEKWQRNIATALGNAQFDVDIVTLLEKNLGKVSEMVDQHINWALQQQLNKQKPEVKDQNLQKPGRPFHAAKYYLPKAIKTTTQTGFLDRPE

SEQ ID NO: 81742 - protein, 395 aa, unidentified
  source 1..395: note = Thiomicrospira cyclica
  REGION 1..395: note = tr|F6DBP3|F6DBP3_THICA Epoxyqueuosine reductase; OS = Thiomicrospira cyclica (strain DSM 14477 / JCM 11371 / ALM1) OX=717773 GN=queG PE=3 SV=1
MIKDHAYQLGFSHCGFSHTDLSAYEADYFNWLGLNYHGTMSYMAAHGTKRTRPSELIPGTQSVISVLMPYFEYDQYDPIIQLQSKQHAYVSRYALGRDYHKVLRKKLAKLAEFILSQVPDAALRGFVDSAPVLERQLAYQAGLGFLGKNSLLIHPKAGSWFFIGEIYTNLTLASDSTPVRDGCGQCQACIQECPTQAIVADGVVDARRCISYLTIEHQGAIDEELRPLMGNRIYGCDDCQLVCPWNHFTPPNQQDDFKARHELDQALLIDLFSWSQQEFEVQMAGSPIRRIGYEKWQRNIAIALGNADFDEDIITQLKSRLGQVSDMVDEHIYWAITQQQQAGTLTNAVEKSNYPTSPIGLPSSAAKYYLPKSAKAQFKTKRVLPVRTDSQDSLD

SEQ ID NO: 81743 - protein, 247 aa, Thiomicrospira sp.
  REGION 1..247: note = tr|A0A356VTC1|A0A356VTC1_9GAMM tRNA epoxyqueuosine(34) reductase QueG (Fragment); OS = Thiomicrospira sp. OX=935 GN=queG PE=4 SV=1
MSKNPTNSPLYSLSLLIKKWGQELGFADVGITHTDLSAYETDYFNWVGDNYHGDMDYMTKHGTKRTRPNELVPGTQSIISVRMNYFDTLAENPVQQLKGENKAYVSRYALNKDYHKIMRKRLQQLANKISEHSTKLEQDFNYRAFADSAPVLERPIAQQAGLGFIGKNSLIIHPRAGSWFFLGELYCNIKLPADPPFTKQGCGPCTACIVECPTQAILDNNKIDARRCISYLTIEYKGIISDELKEK

SEQ ID NO: 81744 - protein, 395 aa, Thiomicrospira sp.
  REGION 1..395: note = tr|A0A0X3THB3|A0A0X3THB3_9GAMM Epoxyqueuosine reductase OS=Thiomicrospira sp. XS5 OX=1775636 GN=queG; PE = 3 SV=1
MPEAPLYQLAEKIKHWGQALGFADVGITDTDLSAYEADYFNWLGEHYHGDMEYMARHGTKRTRPAELEPGTVSVISVRLNYFDPDAHSPVEQLHANGQAYVSRYALHKDYHKLMRKRLQQLAAKIEAELVKKAESFHYRAFVDSAPVLERPLAEKAGLGFIGKNSLIIHPRAGSWFFLGELYTNLPLPNDPPFDKQGCGPCTACIDECPTQAIVDNAVVDARRCISYLTIEYKGVIAPELREKMGNRIYGCDDCQLVCPWNKFTEATEETAFKPKHALDAASLLELLDWNETQFLTQFEGSPIRRIGFEQWQRNLCIALGNALEDTDLSQRIVQALETLSSDSELVLEHRDWALKRQTDALTASDKTARPLYPLGCGRFPKPLKPAVAKKYYLPK

SEQ ID NO: 81745 - protein, 375 aa, Thiomonas arsenitoxydans
  REGION 1..375: note = tr|D6CUA2|D6CUA2_THIA3 Epoxyqueuosine reductase; OS = Thiomonas arsenitoxydans (strain DSM 22701 / CIP 110005 / 3As) OX=426114 GN=queG PE=3 SV=1
MEQLSTSPERLRALAQDIKQQGRALGFSQIGITGVDLRSAEAPLLDWLAAGHHGSMDYMQRHGLKRARPAELVPGTLRVITARLDYLPRASPADWRDAEWQRLAQPEAATISVYARGRDYHKVLRRKLQQLADYIAAQIDPGVVRVFTDSAPVLEVELAARAGLGWRGKHTLLLQRDSGSMFFLGEIFIGLPLPVDAPASAHCGTCRKCIVICPTQAILGPEQLDARRCISYLTIEHAGPIPLELRPLIGNRIYGCDDCQLICPWNRYAQRSSLPDFDPRHGFDQAQLLDLWNWSEAQFEQRTEGSPIRRIGFERWQRNLAVALGNGLRGNHETAWRQAAIQALHSALPHARALLQEHVRWALAQAETDPREITR

SEQ ID NO: 81746 - protein, 375 aa, Thiomonas bhubaneswarensis
  REGION 1..375: note = tr|A0A0K6I9C3|A0A0K6I9C3_9BURK Epoxyqueuosine reductase OS=Thiomonas bhubaneswarensis OX=339866 GN=queG; PE = 3 SV=1
MEPISASPEDLRLLAQDIKQQGRALGFSQIGITGVDLREAEAPLLDWLAAGHHGGMDYMQRHGLKRARPAELVPGTLRVITARMDYLPRNAPGNWRGVEWQRLEQPEAATVSLYARGRDYHKVLRRKLKQLADHIAARVDPGVVRVFTDSAPVLEVELAARAGLGWRGKHTLLLQRDGGSMFFLGEIFVGLPLPVDAPTSAHCGSCRKCIDICPTRAIIGPQQLDARRCISYLTIEHEGAIPVELRPLIGNRIYGCDDCQLICPWNRHAQRSPLPDFEVRNDLDRVMLLDLWAWTEAEFSQRTEGSAIHRIGYIRWRRNLAVAIGNGLREHPDAAWREAAIKALREARAMEPPLVQDHLDWALAQAHTRRLGTAR

SEQ ID NO: 81747 - protein, 386 aa, Thiomonas delicata
  REGION 1..386: note = tr|A0A238D7J6|A0A238D7J6_THIDL Epoxyqueuosine reductase OS=Thiomonas delicata OX=364030 GN=yjeS PE=3 SV=1
MQERSEPSNSRPAPHAEALRVLVGEIRAEARQLGFSQIAISDVHLAEAEAALQRWLDAGYHGEMGYMAHHGTKRARPAELVPGTLRVITARMDYLPGDASAGAGWQEIEWARLHDPKAATVSLYARGRDYHKVLRSRLQKLADFIAARVDPGVVRVFTDSAPVLEVALASRAGLGWRGKHTLLLNREAGSMFFLGEIFIGIPLPVDAPQGGHCGSCTRCIDVCPTRAIVAPYVLDARRCISYLTIELAGPIPEPLRPLMGNRVYGCDDCQLACPWNKYAQLAPLPDFAARHGLDQATLLDLWSWTEEQFLARTEGSAIRRIGFARLRRNLAVALGNARRGLPASDAAQAGIETALRAALPTASPLVAEHIAWALAQSPGAGAGQAA

SEQ ID NO: 81748 - protein, 378 aa, Thiomonas intermedia
  REGION 1..378: note = tr|D5X220|D5X220_THIK1 Epoxyqueuosine reductase; OS = Thiomonas intermedia (strain K12) OX=75379 GN=queG PE=3; SV = 1
MARMEQLSTSPERLRALAQDIKQQGRALGFSQIGITGVDLRSAEAPLLDWLAAGHHGSMDYMQRHGLKRARPTELVPGTLRVITARLDYLPRASPADWRDAEWQRLAQPAAATISVYARGRDYHKVLRRKLQQLADHIAAQIDPGVVRVFTDSAPVLEVELAARAGLGWRGKHTLLLQRDSGSMFFLGEIFIGLPLPVDAHASAHCGSCRKCIDICPTQAILGPEQLDARRCISYLTIEHAGPIPLELRPLIGNRIYGCDDCQLICPWNRYAQRSSLPDFDPRHGFDQAQLLDLWNWSEAQFEQRTEGSPIRRIGFERWQRNLAVALGNGLRGNHETAWRQAATQALHSALPHARALLQEHVRWALAQAETDPREITR

SEQ ID NO: 81749 - protein, 386 aa, Thiomonas sp.
  REGION 1..386: note = tr|A0A259QQ19|A0A259QQ19_9BURK Epoxyqueuosine reductase OS=Thiomonas sp. 13-66-29 OX=1970448 GN=queG; PE = 3 SV=1
MQERSEPSNSRPAPHAEALRVLVGEIRAEARQLGFSQIAISDVHLAEAEAALQRWLDAGYHGEMGYMAHHGTKRARPAELVPGTLRVITARMDYLPGDASAGAGWQEIEWARLHDPKAATVSLYARGRDYHKVLRSRLQKLADFIAARVDPGVVRVFTDSAPVLEVALASRAGLGWRGKHTLLLNREAGSMFFLGEIFIGIPLPVDAPQGGHCGSCTRCIDVCPTRAIVAPYVLDARRCISYLTIELAGPIPEPLRPLMGNRVYGCDDCQLACPWNKYAQLAPLPDFAARHGLDQATLLDLWSWTEEQFLARTEGSAIRRIGFARLRRNLAVALGNARRGLPASDAAQAGIEAALRAALPTASPLVAEHIAWALAQSPGAGAGQAA

SEQ ID NO: 81750 - protein, 414 aa, Thiomonas sp.
  REGION 1..414: note = tr|A0A238DSA7|A0A238DSA7_9BURK Epoxyqueuosine reductase OS=Thiomonas sp. X19 OX=1050370 GN=yjeS PE=3 SV=1
MDDRREQMEVNPAPDEAALAALAVDIRTEAKRLGFSQIAISDVHLGAAEAELQRWLDAGFHGEMGYMARHGSKRARPAELVPGTLRVITARMDYLPAHLSTSLATEPPTASPPETPTAAADWRDAEWARIADPQAAVVSVYARGRDYHKVLRARLQKLADFIAARTDPGVVRVFTDSAPVLEVALAARAGLGWRGKHTLLLNREAGSTFFLGELFIGLPLPVDAPQQEHCGSCSRCIDICPTRAIVAPYTLDARRCISYLTIELAGPIPEDLRPLMGNRVYGCDDCQLICPWNKYAQTSPLPDFAPRHGLDSASLLQLWAWSEADILQRTEGSAMRRIGFERLRRNVAVALGNARRSLPAAHALQRDIETALRAALPAATPLVAEHIVWALAQQAGSSRVEASAKVHQAEEHGQ

SEQ ID NO: 81751 - protein, 354 aa, unidentified
  source 1..354: note = Thiopseudomonas denitrificans
  REGION 1..354: note = tr|A0A4R6U377|A0A4R6U377_9GAMM Epoxyqueuosine reductase OS=Thiopseudomonas denitrificans OX=1501432; GN = queG PE=3 SV=1
MPLKNIDPEQLLDSIAGWAHELGFAQTGISSIDLSAEEDYLQKWLDAGYHGGMDYLHKHGMLRARPGELVPGTLSVISVRMDYLPGDTAAIQRLADGEAAYISRYALGRDYHKMMRKRLQKLAERIAEAIGPYGYRVFVDSAPLLEKALARNAGLGWVGKNTLILNRKAGSFFFLGEILIDFPLPANQEQARNHCGSCTACLDLCPTSAFVDANTLDARRCISYLTIEYKGSIDPELRPLMGNRVFGCDDCQLVCPWNRFAKPTAETDFLPRHGLDNVNLAELFMWTEEEFLQRTEGSPIRRAGYESWLRNLAIGLGNAPSTIPVLEALQARRDHPSELVREHVEWALKRHGVL

SEQ ID NO: 81752 - protein, 352 aa, unidentified
  source 1..352: note = Thiorhodococcus drewsii
  REGION 1..352: note = tr|G2E5J4|G2E5J4_9GAMM Epoxyqueuosine reductase; OS = Thiorhodococcus drewsii AZ1 OX=765913 GN=queG PE=3 SV=1
MDTHPNQWLSERIKAWGHELGFQQVGITDTDLTTAEGRLMEWIASGRHGDMEYMARHGTKRSRPAELVPGTLRVISVRMDYLPETPETTRQILADSATAFISRYALGRDYHKLIRRRLQHLAERIQDAIAPTACRVFVDSAPVLEKPLAEKAGLGWMGKHTNLINSQAGSWFFLGEIYTDLALPIDHSQGSHCGRCQACIDICPTQAIIAPYQLDARRCVSYLTIEHQGGIPEALRPLIGNRIYGCDDCQLVCPWNRFAQPTRETDFLPRAGLDTVTLIELFGWDEATFLKRTEGSAIRRIGHLRWLRNIAVALGNAGSAPEVSATLRVHASHPSALVREHVAWALDRQGLT

SEQ ID NO: 81753 - protein, 364 aa, Thiorhodospira sibirica
  REGION 1..364: note = tr|G4E1L2|G4E1L2_9GAMM Epoxyqueuosine reductase; OS = Thiorhodospira sibirica ATCC 700588 OX=765914 GN=queG; PE = 3 SV=1
MRPCLPPSPANCTPGPLDLNTLWHEIERWANGLGFAKVGVADIDLKAHEPHLQRWLEAGYHGEMEYMARHGLRRARPTELLPGTVRVLCARMAYHPPQARPAAEVLADPQRAYLSRYALGRDYHKVMRTRLQHLARQIETASGPFGYRVFCDSAPVLEKALAQQAGLGWVGKHSNLLAADAGSWFFLGEIYTDLPFPCSRPVAAQCGACAACMHACPTQAIIAPYIVDARRCISYLTIEHPGSIPIRLRPLLGNRIYGCDSCQLACPWNRLASPTPLADFHIRHALDNPALLELFAWDEATFLARTEGSVIRRIGYPRWQRNLAVALGNAPPSPAIHRALQIRYPHADELVREHIRWALTRHGD

SEQ ID NO: 81754 - protein, 371 aa, Thiorhodovibrio sp.
  REGION 1..371: note = tr|H8Z510|H8Z510_9GAMM Epoxyqueuosine reductase; OS = Thiorhodovibrio sp. 970 OX=631362 GN=queG PE=3 SV=1
MTPTTLAAHIKTWGRELGFQQVGIAGCELSGPESYLHDWLARGWHGEMDYMARHGSKRSRPAELLPGTKRVICARMDYMPEALEDTRAACDHPIEAFISRYALGRDYHKLLRARLKQLALRIEAESGPFQWRPLVDSAPVMEKPLAQAAGLGWIGKHTNLINPGAGSWFFLGELYVDLLLPIDEPLPSHCGRCRACMDICPTGAIVKPYELDARLCISYLTIELAGAIPAPLRPLLGNRIYGCDDCQLVCPWNRFAHVTKEADFCPRHGLDGASLIALFSWDEAEFLKRTEGSAIRRIGHQRWLRNIAVALGNAAPSPVARQALEARSDHPSDLIREHVHWALARQCQRRENDDLSEKAPGTPSSQQEPRA

SEQ ID NO: 81755 - protein, 348 aa, Thiothrix caldifontis
  REGION 1..348: note = tr|A0A1H3W9G2|A0A1H3W9G2_9GAMM Epoxyqueuosine reductase OS=Thiothrix caldifontis OX=525918 GN=queG PE=3; SV = 1
MKIAQIQAIGQALGFNAVGVSNIDLSFAEQRLLDWLAQGYHGDMAWMAHHGTKRSRPAELVSGTLSVISVRMDYLPPDSMDAVSILNHPERAYISRYALGRDYHKVIRQRLEKFAQQLQTEIGAFGYRAFTDSAPVLEKPLAVKAGLGWMGKHTNVLSRDAGSWFFLGEIYTDLPLDETGSVSEHCGQCTACIDVCPTQAILAPYVLDARRCISYLTIEYQGSIPLELRPLMGNRIYGCDDCQLICPWNRFAQTSPEADFAVRNGLDSARLSELFQWSESEFMRKLEGSPIRRIGYERWLRNIAVALGNAPVSVSVMALLQHRKMAISSELVREHIDWALEQQKQSDS

SEQ ID NO: 81756 - protein, 349 aa, Thiothrix eikelboomii
  REGION 1..349: note = tr|A0A1T4XDM7|A0A1T4XDM7_9GAMM Epoxyqueuosine reductase OS=Thiothrix eikelboomii OX=92487 GN=queG PE=3; SV = 1
MALMADISAKLPEWGAELGFDALGISSIDLSSAEQSLWAWLAQGYQGDMEWMQRHGTKRSRPAELVEGTLSIISVRMNYWPEPSTPAEMVLNHPELAYISRYALGRDYHKVLRQRLEKLAERLQTEIGFLRYRVFVDSAPVLEKPIAVKAGLGWLGKHTNLIHRSAGSYFFLGELYTDLPLPETGASTEHCGSCTACLDICPTQAIIQPYLLDANRCISYLSIEYAGSIPLEFRPLMGNRIYGCDDCQLICPWNRFAQVSTEYDFQIRHQLDRASLLELFAWDETTFLAKLAGTAIRRIGHERWLRNLAIALGNAPPSHHIRDALLAKLDTALSPLVREHVEWALQRQT

SEQ ID NO: 81757 - protein, 349 aa, Thiothrix lacustris
  REGION 1..349: note = tr|A0A1Y1QW40|A0A1Y1QW40_9GAMM Epoxyqueuosine reductase OS=Thiothrix lacustris OX=525917 GN=queG PE=3; SV = 1
MKIERIQAIGRVLGFNAVGVSNVDLSLAEQRLLDWLAQGYHGDMAWMAHHGTKRSRPTELVSGTLSVISVRMDYLPPDSMDAVMILNHPERAYISRYALGRDYHKVLRQRLEKFAQRLQAEIGAFGYRVFTDSAPVLEKPIAVKAGLGWMGKHTNILSRDAGSWFFLGEIYTDLPLAETGAVSEHCGQCSACLAVCPTQAILAPYVLDARRCISYLTIEYKGSIPLELRPLMGNRIYGCDDCQLICPWNRFAQTSPEADFAVRNGLDSARLSALFQWSESEFMRKLEGSPLRRIGYERWLRNIAVALGNAPPSRSTLKLLQHTYGVLESALVKEHVQWAIAQQKQGISG

SEQ ID NO: 81758 - protein, 355 aa, Thiothrix lacustris
  REGION 1..355: note = tr|A0A1Y1QHB5|A0A1Y1QHB5_9GAMM Epoxyqueuosine reductase OS=Thiothrix lacustris OX=525917 GN=queG PE=3; SV = 1
MNNAVPTPDHWLQTLQTLSKNLGFNAVGVSGIALEAAEQRLLDWLDKGYHGDMAWMASHGTKRSRPAELVAGTLSVISVRMDYFPPDTVDAVMLLNHPERAYISRYALGRDYHKLLRQRLEKLAQQLQPLLGQFNYRVFTDSAPVLEKPLAVNAGLGWMGKHTNLLSREAGSWFFLGEIYTDLPLPETGAVTEHCGQCQACITVCPTQAIIAQYELDARRCISYLTIEHQGSIPLELRPLLGNRIYGCDDCQLICPWNRFAQTSPEADFAARHGLDSARLGELLQWTQAEFLQRFEGSPIRRIGYARWSRNLAVALGNSPASAATLALLLQRRGDCGDEMVLEHLDWAIAQQQKV

SEQ ID NO: 81759 - protein, 356 aa, Thiothrix sp.
  REGION 1..356: note = tr|A0A432URN2|A0A432URN2_9GAMM Epoxyqueuosine reductase OS=Thiothrix sp. OX=1032 GN=queG PE=3 SV=1
MNNKSVSLAMPALAQRIKTWGMALGFQQIGITDIDLQEAETRLLNWLDKGYHGNMEYMSRHGSKRSRPAELVPGTLRVISARMDYFPPKSSDEWQVLSSKKLAYISRYALGRDYHKLIRKRLQQLAQHIETETGPFGYRVFTDSAPVLEKPLAQKAGLGWIGKHTNLLNRRAGSWFFLGEIYTDLPLTIDAQESSHCGQCTACIDICPTQAIVAPYELDARRCISYLTIELQGSIPEALRSLIGNRIYGCDDCQLVCPWNRFAQRSVETDFSIRNELDTPELVSLFSWTEQVFLSRMEGSPIRRIGHTRWLRNIAVALGNARPDPEALHALQQRIDHPSGLVREHVRWAIKQHSSS

SEQ ID NO: 81760 - protein, 355 aa, Thiothrix sp.
  REGION 1..355: note = tr|A0A5C7S3M2|A0A5C7S3M2_9GAMM Epoxyqueuosine reductase OS=Thiothrix sp. OX=1032 GN=queG PE=3 SV=1
MDHPKKAALIADISAKLPRWGAELGLDAVGVSSIDLSNAEQKLWTWLEQGYHGDMDWMQRHGTKRSRPNELVEGTLSIISVRMNYWPEASAPAEMVLNHPELAYISRYALGRDYHKVLRQRLEKLAQRLQAELGRLRYRVFVDSAPVLEKPLAVKAGLGWLGKHTNVLNRSSGSYFFLGEIYTDLPLIETGAVAEHCGSCNACISICPTQAIIQPYVLDANRCISYLTIEYAGSIPLEFRPLIGNRIYGCDDCQLICPWNRFATTSQEVDFKIRHQLDSAYLIELFAWDEAEFLEKMAGSPIRRIGYERWLRNLAVALGNAPRQARTQRALLAKLEQTISPLVREHIEWALEQYV

SEQ ID NO: 81761 - protein, 359 aa, unidentified
  source 1..359: note = Thiotrichaceae bacterium
  REGION 1..359: note = tr|A0A2A5FVQ9|A0A2A5FVQ9_9GAMM Epoxyqueuosine reductase OS=Thiotrichaceae bacterium OX=2030882 GN=queG; PE = 3 SV=1
  VARIANT 348: note = Xaa can be any naturally occurring amino acid
MSDTQSNIDYTRLLQQITKWSEDLGFQQLGVSDIDLTKHEAHLNDWLQAGFHGEMDYMQKHGSKRSHPEQLVEKTCRVISVRMDYMPPDCALSDAVLANPEMGFISRYALGRDYHKVMRKRLQKLADKIKNYIGEFGYRAFVDSAPVLEKALAEKSGLGWIGKHSNLINQKAGSWFFLGEIYTDLPLPVSLEATQETTQDHCGSCTACIDICPTQAIIAPYKVDARRCISYLTIELHGSIPIEFRKDMGNRIYGCDDCQLCCPWNRFSQPTTEQDFFTRHPLDAPDLIELFNWSEATFLKNTEGSAIRRIGYQRWLRNIAVAMGNAPTSKDMIKALEQRKLDATEMVXEHIDWALEQHT

SEQ ID NO: 81762 - protein, 361 aa, unidentified
  source 1..361: note = Thiotrichales bacterium
  REGION 1..361: note = tr|A0A2E2BE26|A0A2E2BE26_9GAMM Epoxyqueuosine reductase OS=Thiotrichales bacterium OX=2026796 GN=queG; PE = 3 SV=1
MILDSSKILNDLKIWSHELGFQDLGVAGLNVKDDFSQLENWIQNGYHGSMSYLEKNKDKRLDPSKLVPDTTCVITVRANYLPEPLDHAVSTLKDPRLAYVSRYALGRDYHKVLRGKLRQLARKLNDKIGDFGYRAFTDSAPILERALARNSGLGWVGKHTNLINKADGSMFFLGEIFTDLPLDITARLKKNHCGTCVSCIDVCPTKAIVSPYKLDARKCISYLTIESKDSIPTELRASIGNRIFGCDDCQLFCPWNKYAKVTPIKDFMPRSRLNNRTLLELFSMNRDEFELLTRGSAIRRISYEQWVRNLAVAMGNSRYSRKTLSALYKRRFFPDQMVREHIEWAITRLENNSLNPDAIDK

SEQ ID NO: 81763 - protein, 356 aa, unidentified
  source 1..356: note = Thiotrichales bacterium
  REGION 1..356: note = tr|A0A0S8EIW6|A0A0S8EIW6_9GAMM Epoxyqueuosine reductase OS=Thiotrichales bacterium SG8_50 OX=1703416; GN = queG PE=3 SV=1
MCSERNYSVDFTELGERIKHWGESLGFQQVGVSDVNLGEAESRLQHWLENKFHGAMDYMAEHGTRRSRPAELVPGTIRVISARMDYLPPDAADSDAVMRNPALAMISRYALGRDYHKLVRKRLQKLADRIEREVGEFGYRVFSDSAPVLEKALAEKAGLGWIGKHTNLIARDAGSWFFLGEIYTDLPLPVDSQQDNHCGTCQACIDVCPTNAIVAPYELDARRCISYLTIELKESIPEEFRPLIGNRIYGCDDCQLVCPWNRFAKKSNEADFHVRHGLDRAGLIEMFGWSEQTFLQMTEGSAIRRIGHERWLRNIAVALGNMPSSPEVIDALRHRERHDSAIVREHVAWALARQSA

SEQ ID NO: 81764 - protein, 410 aa, Thorsellia anophelis
  REGION 1..410: note = tr|A0A1I0BCF0|A0A1I0BCF0_9GAMM Epoxyqueuosine reductase OS=Thorsellia anophelis DSM 18579 OX=1123402; GN = queG PE=3 SV=1
MPISSEPIQCNRSESISESSLIPKEILFSLRNQIETLSLEFGFSEIGFCDLDLNDHAQALQSWLDKQYHGEMSWMENHQLFRTSPDKMVPGALSAITVRLDYLPPNAQFAKVLGTPTLGYVSRYALGKDYHKILRKQLKAFATAINDLLVKEALDFSFEYRPFVDSAPILERPLAAKSGLGFVGKHSLLINHEAGSWFFIGELLTNLPLHLTNPPNQSLEHQSDCGKCQACRTICPTGAIVDDYIVDARRCISYLTIEHKSAIAVELRPLMGNRIYGCDDCQLICPYNKVAPLTKEPAFIKHSQLSAPELLTLLNWSESVFLKETEGSAIRRIGFDSWQRNIAVALGNVPPSAPLSTEIIDALTAQLGRSTLVDEHLNWAIERHLSLSAEVTMQQKRLVRSIEKGLPRDA

SEQ ID NO: 81765 - protein, 387 aa, unidentified
  source 1..387: note = Tibeticola sediminis
  REGION 1..387: note = tr|A0A3N4V6U9|A0A3N4V6U9_9BURK Epoxyqueuosine reductase OS=Tibeticola sediminis OX=1917811 GN=queG PE=3; SV = 1
MGFSGTQIDPHRLLEQIRAWARALGLSQIGVSDVDLRHAEPGLSAWLAAGFHGGMHYMAAHGLKRARPAELVPGTVRVLTARLDYLPRGTTAGWAAAERARLAQPQEAVVSVYARGRDYHKVLRARLQALATRIGEVIGPFGYRVFCDSAPVLEVELATRSGLGWRGKHTLALSRDAGSMFFLGEIYLDLALPVTEPVRAHCGRCRACIDVCPTQAILAPGRLDARRCISYLTIEHDGPIPPELRVQMGNRIYGCDDCQLVCPWNKFAQPSMLADFDPRPGFAGASITTLLGWDEAEFLRRTEGSAIRRIGHVRWLRNLAVAAGNALRAQPRAPEAEALRLALQRWQSHPSALVREHVVWALGNAEQVPRASRIPGAGGLLRCKSSP

SEQ ID NO: 81766 - protein, 232 aa, Tindallia californiensis
  REGION 1..232: note = tr|A0A1H3JVB9|A0A1H3JVB9_9CLOT Epoxyqueuosine reductase QueG (Queuosine biosynthesis) OS=Tindallia californiensis OX=159292 GN=SAMN05192546_102112 PE=4 SV=1
MSEKNQEIREILQDLGADVIGFGDVENYLPASLRDMPRAISYAVRLSNRIIEEIDPVIGPSQTYFHHYRTVNTLIDQISLKIMLKIQKMGYSAYAIPASQSINEKPPQYRGRISHRMAATRSGLGWIGKSGNLITEAFGPEVRLGTVLTSLPLTVHSPIETSRCGSCNICVKACPGYALPGNHDWKPGIERELIVDPVRCSQHMKKAYQHIGRGAVCGICMRVCPYGKEKKR

SEQ ID NO: 81767 - protein, 345 aa, Tindallia californiensis
  REGION 1..345: note = tr|A0A1H3IAI0|A0A1H3IAI0_9CLOT Epoxyqueuosine reductase OS=Tindallia californiensis OX=159292; GN = SAMN05192546_10180 PE=4 SV=1
MLLSVKELKQEAKKKNIIDIGVIRPNKSPLLKKLIEDRHANQYLTNFEEISIDKRIDASLIMPEAKSVIVAAMSYFNKEETDVSYRPLFCGSLARFSRGTDYHRVLKMRLSQLMESIPFKEEPYHWLVYADTGPLVDRHLAAEAGLGYFGRNNCFFHSEYGSYIVIGYVVTSLEFFEEDYRSMPYLKCNECGKCQRACPVNAITTPFVINNQRCLANQLQQKGVMDSVSMKKSGTMLYGCDICQDVCPNNKGIRETSEKMFYNNFELAWINLEELLNMNNKEFKKRYESMAFAWRGLRVMKRNALKSLGNMGNPMAIPIIEPFVDDEREDINNAAKWALKQLTLA

SEQ ID NO: 81768 - protein, 232 aa, Tindallia magadiensis
  REGION 1..232: note = tr|A0A1I3FU55|A0A1I3FU55_9CLOT Epoxyqueuosine reductase QueG (Queuosine biosynthesis) OS=Tindallia magadiensis OX=69895 GN=SAMN05192551_10737 PE=4 SV=1
MSEKNQEIREMLLDLGADVIGFGDVENHLPASLRDMPRAISYAVRLSSRIIEEIDPAVGPSQTYFHHYRTVNTLIDQISLKTMLKIQQMGYSAYAIPASQSINEKPPQYRGRISHRMAATRSGLGWIGKSGNLITEAFGPEVRLGTVLTSLPLTVHSPIEISRCGSCNICVKACPGYALPGNHEWKPGIERELIVDPVRCSQHMKKAYQHIGRGAVCGICMRVCPYGKAKKR

SEQ ID NO: 81769 - protein, 345 aa, Tindallia magadiensis
  REGION 1..345: note = tr|A0A1I3AT05|A0A1I3AT05_9CLOT Epoxyqueuosine reductase OS=Tindallia magadiensis OX=69895; GN = SAMN05192551_101391 PE=4 SV=1
MVLSVEALKMEAKKKNIIDIGVIRPNKSPLLKKLIKNRHANQYMTNFEEISVDKRTDASLIMPEVKSIIVALMSYFKKENLETSHRPMLYGTLARFSRGIDYHRVLNVRLNQLMESITCKEKPHSWRVYADTGPLVDRHLAAEAGLGYFGRNNCFFHSEYGSYIVIGYIVTSLEFFEKDYRSMPYLKCDECGKCQRACPVNAITTPFIINNQRCLSNQLQQKGIMDNNSMKQSSTMLYGCDICQDVCPNNKEIKETPEKMFYDKVESTWINLEELLNMSNKEFKQRYESTGFAWRGLRVMKRNALKSLGNSRNPIAIPIIESFVNDKREDISSAAKWALEQITFV

SEQ ID NO: 81770 - protein, 347 aa, Tindallia sp.
  REGION 1..347: note = tr|A0A424Y4K2|A0A424Y4K2_9CLOT tRNA epoxyqueuosine(34) reductase QueG OS=Tindallia sp. MSAO_Bac2 OX=2293856 GN=queG PE=4 SV=1
MKCSIEKLRQLAFANNIIDIAVIKPERSVELKKILVSRHQNKRLTDFEESIIEKRINPKLIMPEAKSIIVGLMSYHMDKPPDNSKRPQFYGTLARCARGKDYHRIVHIRMKELMESLTHSQSGAEWKIFVDTGPLVDRHLAAKAGLGFFGRNNCFIHPQYGSFIVIGYILTTLEFKENDYVSKTYDKCSECGECQQSCPAKAINTPFQIDNQVCLSHALQQKGIMDKETMLQSGVMMYGCDICQDVCPHNYFARNTPEPLFHYKDEEAWLNLPEILQVSNREFNRRYRSASFGWRGRRIMQRNALKSLGNTGNTMVTDHVKPFLEDQREDIRKAAEWAMDRLSKADE

SEQ ID NO: 81771 - protein, 308 aa, Tissierella creatinini
  REGION 1..308: note = tr|A0A4T9WE81|A0A4T9WE81_9FIRM tRNA epoxyqueuosine(34) reductase QueG OS=Tissierella creatinini OX=43143 GN=queG PE=4 SV=1
MLMKKYIIEKAKELKIDMIGFTDGNPLTTIKDYLEYRRLNNIETEFEEENILLRIDPKLTLETCKSIIVIALSYNVVFDEKSEIKYSGNLSKSSWGIDYHRVLKNKLEALIEEIKKITPFEYKYFVDTGPLVDRELAHKAGIGYYGKNCNIINEEYGSFIFIGYILTDLDIEPNEGLLESQCGVCEICLKACPDKALEEGYRLNAKKCISYHTQTKDMDLEIMKKIGNNIYGCDTCQNVCPKNKNIRFSIHDEFLPHVTKGVIDIEELLIMSNKQFKEKYGSMSGSWRGRNILRRNALIALENIKTSI

SEQ ID NO: 81772 - protein, 342 aa, Tissierella creatinophila
  REGION 1..342: note = tr|A0A1U7M970|A0A1U7M970_TISCR Epoxyqueuosine reductase OS=Tissierella creatinophila DSM 6911 OX=1123403; GN = queG PE=4 SV=1
MNIEKYIRDISKEIGIDIIGFTSSSPLNVKRFILEKRNSGKYTEFEEKDIEKRIDPKLTMENCKSIIIIGVSYNMDFKPKKSYDLNGNISMSSWGTDYHKVLKTKLESLIEKIKEKRDFEYKSFVDTGPLVDRELAKRAGIGFYGKNCSIINKDYGSFIFLGYILTDIEITPDNPLEDGCGDCDLCLRACPTGALESSYDLNPKKCISYLTQTKETISRELRKKMGTKIYGCDTCQRVCPKNKGVKLSSHEEFIPTITGGVMDLEKLLFMSNKEFKREFGSMAGSWRGKNILKRNAIIAIGNIGDEKNIPLLLEVKKDSNLLLEEYIDWAIENILTNSKQSK

SEQ ID NO: 81773 - protein, 344 aa, Tissierella praeacuta
  REGION 1..344: note = tr|A0A3F3S1I2|A0A3F3S1I2_9FIRM Epoxyqueuosine reductase OS=Tissierella praeacuta OX=43131 GN=queG PE=4; SV = 1
MNLLNQYIIDKSKELNIDICGFTDSLPLYNLSDYLIYREKNNIKTEFEEKDLNKRIDPKITMPNCRTIIVVGVSYNVDYNEKPNYNLKGKLSKSSWGIDYHKVLKEKIELLINEIKRKVDFDYKYFVDTGPLIDRELARKAGIGYYGKNCSIINDEYGSFIFLGYILTDLELEFSEEVSNKCGDCDLCLRACPTGALEGEYSFNPKKCISYLTQTKDNIPIELRRKMGIKIYGCDTCQLVCPQNKGIKKANHKEFIPKTTKGYMDLNELLYISNKEFKKKYGEMAGSWRGKNILKRNAIIALGNMKKEANIEILIPMLRDSNPMIREYAEWAIVNIFLTMVSTK

SEQ ID NO: 81774 - protein, 344 aa, Tissierella praeacuta; identical to SEQ ID NO: 81773
  REGION 1..344: note = tr|A0A1M4VZX8|A0A1M4VZX8_9FIRM Epoxyqueuosine reductase OS=Tissierella praeacuta DSM 18095 OX=1123404; GN = SAMN02745784_01646 PE=4 SV=1

SEQ ID NO: 81775 - protein, 343 aa, Tissierella sp.
  REGION 1..343: note = tr|A0A265Q8J6|A0A265Q8J6_9FIRM tRNA epoxyqueuosine(34) reductase QueG OS=Tissierella sp. P1; OX = 1280483 GN=queG PE=4 SV=1
MNSLNQYIIDKSKELNIDICGFTDSLPLDKLQDYLIYREKINIKTEFEENDIDKRIDPKLTMPNCRSIIVVGLSYNVDYTEKPDYLLKGKLSKSTYGIDYHKVLKQKIEELIQEIKKVVEFEYKYFVDTGPLIDRELAKKAGVGYYGKNSSIINDEYGSFVFLGYILTNLDLEFSKEASNKCGDCDLCLRACPTGALEGPYKFNPKKCISYLTQTKNDIPVSLREKMGIKIYGCDTCQLVCPKNKDIKKSNHKEFIPEITRGYMDIEELLSISNREFNKKYGDMAGSWRGKNILKRNAIIALGNMKKEENIHLLIPMLKDSNPMIREYAEWAIVNIFFNNCIH

SEQ ID NO: 81776 - protein, 343 aa, unidentified
  source 1..343: note = Tissierellales bacterium
  REGION 1..343: note = tr|A0A3D3QRI0|A0A3D3QRI0_9FIRM tRNA epoxyqueuosine(34) reductase QueG OS=Tissierellales bacterium OX=2053631 GN=queG PE=4 SV=1
MLKQICYNHLRGRFGMIKTISDIAKGLDIDIVGFAGNEVLSGLQGVLESRISKGLATEFEPKSVKDRIDPTMTLRECKGIITIAVPYNTACETSSRVTIKGSLSRSSWGLDYHIVVKKLLKELSGRLESVLGGSYLTFADTGPLVDRELAYRSGLGYYGKNCCIINPIYGSYVFIGYILTSLELSSDAIPIESQCGDCRLCLDACPTGALEAPGVLNPHKCISYLTQTKEYIPEELQKRMGVKIYGCDTCQAVCPKNKGVRSSRYKEFQPLKTGGCVDIKELLEMSKRDYTDKYGDMAGNWRGRSVLIRNALIAIKNMGIESELEDQLENLRKREVELWKPYL

SEQ ID NO: 81777 - protein, 371 aa, Tistlia consotensis
  REGION 1..371: note = tr|A0A1Y6CEW5|A0A1Y6CEW5_9PROT Epoxyqueuosine reductase OS=Tistlia consotensis USBA 355 OX=560819; GN = queG PE=3 SV=1
MSELKAAIRERALAEGFDAVGFAPATSSESARAAFRDFLEAGFHGDMGWLAETAERRCDPRALWPEARSVVVLGQNYGPESDPLALLGEPELASVSVYARNRDYHDTVKKRLKRVARWLAAEAGCQVKVFIDTAPVLEKPLAQAGGLGWQGKHSNLLSRDWGNWLFLGEIFTDLALPPDPPEADHCGRCRRCLDACPTDAFPAPYRLDARRCISYLTIEHRGPIPREFRRAIGNRIYGCDDCLAVCPWNKFARTAAEADFRPRAALEAPRLAALAGLDDAAFRQLFSGSPIKRIGLARFLRNVLIAIGNSGAPGLLPSVRARLDDPQPLVRGAAAWALRRLAPEAEATAEARRRLAVESDAEARAEWAGPP

SEQ ID NO: 81778 - protein, 404 aa, Tistrella mobilis
  REGION 1..404: note = tr|A0A3B9IU17|A0A3B9IU17_9PROT Epoxyqueuosine reductase OS=Tistrella mobilis OX=171437 GN=queG PE=3 SV=1
MATSISDRRPPAPPPPRRKGPPLDLDPAGWTAAIRARAREIGFDAVGFAPARLPPATGEALDRFVELGRHGDMRWIEDRIDWRRSPDALWPEARSAIVLAQNYGPATDPLANLSCPETGSLSVYARGDDYHEVIKAKLRRLARWLWDESAVELKFFVDTAPVMEKPLAALAGLGWQGRHTNLVSRDFGSWTFLAVMLTGLDLVHDRPHGDRCGSCHACLDACPTDAFPAPYELDARRCISYLTIELDGPVPAELRAAMGNRIYGCDDCLAVCPWNKFARGAAEMKLAGREALTAPALADLAGLDDGAFRTMFAKTAVKRIGRDRFVRNVAIAIGNSGRPDLVPALRPLLADGAAQVRAMAVWAASRLMSPAEFAGAAAGRLPGETDPVVLSEWRAAGVLSEEGP

SEQ ID NO: 81779 - protein, 404 aa, Tistrella mobilis
  REGION 1..404: note = tr|I3TGZ0|I3TGZ0_TISMK Epoxyqueuosine reductase; OS = Tistrella mobilis (strain KA081020-065) OX=1110502; GN = yjeS PE=3 SV=1
MATSISDRRPPAPPPPRRKGPPLDLDPAGWTAAIRARAREIGFDAVGFAPARLPPATGEALDRFVELGRHGDMRWIEDRIDWRRSPDALWPEARSAIVLAQNYGPDIDPLANLSHPETGSLSVYARGDDYHEVIKAKLRRLARWLWDESAVELKFFVDTAPVMEKPLAALAGLGWQGRHTNLVSRDFGSWTFLAVMLTGLDLVHDRPHGDRCGSCQACLDACPTDAFPAPYELDARRCISYLTIELDGPVPAEFRAAMGNRIYGCDDCLAVCPWNKFARGAAETKLAGREALTAPALADLAGLDDGAFRTMFAKTAVKRIGRDRFVRNVAIAIGNSGRPDLVPALRPLLADGAAQVRAMAVWAASRLMSPAEFAGAAAGRLPGETDPVVLTEWRAAGVLSEEGP

SEQ ID NO: 81780 - protein, 404 aa, Tistrella sp.; identical to SEQ ID NO: 81778
  REGION 1..404: note = tr|A0A2E3EPZ5|A0A2E3EPZ5_9PROT Epoxyqueuosine reductase OS=Tistrella sp. OX=2024861 GN=queG PE=3 SV=1

SEQ ID NO: 81781 - protein, 404 aa, Tistrella sp.
  REGION 1..404: note = tr|A0A2D8Q7Y0|A0A2D8Q7Y0_9PROT Epoxyqueuosine reductase OS=Tistrella sp. OX=2024861 GN=queG PE=3 SV=1
MATSISDRRPPAPPPPRRKGPPLDLDPAGWTAAIRARAREIGFDAVGFAPARLPLATGEALDRFVELGRHGDMRWIEDRIDWRRSPDVLWPEARSAIVLAQNYGPDIDPLANLSHPETGSLSVYARGDDYHEVIKAKLRRLARWLWDESAVELKFFVDTAPVMEKPLAALAGLGWQGRHTNLVSRDFGSWTFLAVLLTGLDLVHDRPHGDRCGSCQACLDACPTDAFPAPYELDARRCISYLTIELDGPVPAEFRAAMGNRIYGCDDCLAVCPWNKFARGAAETKLAGREALTAPALADLAGLDDGAFRTMFAKTAVKRIGRDRFVRNVAIAIGNSGRPDLVPALRPLLADGAAQVRAMAVWAASRLMSPAEFAGAAARRLPGETDPVVLSEWRAAGVLSEEGP

SEQ ID NO: 81782 - protein, 375 aa, Tolumonas auensis
  REGION 1..375: note = tr|C4L9N5|C4L9N5_TOLAT Epoxyqueuosine reductase; OS = Tolumonas auensis (strain DSM 9187 / TA4) OX=595494; GN = queG PE=3 SV=1
MTFTLDLQKLAHDIKLWGLELGFDQVGITDCDLTHEETRLESWLAKGYHGEMEYMARHGLMRARPSELQPGTRSVISVRMNYLPPVAKVAETLDNPAHAYISRYALGRDYHKVLRNRLKQLGERIQQACGELQFRPFVDSAPVMERPLADKAGLGWTGKHTLLLNQQAGSFFFLGELLIDLPLPADQPVEPACGNCSACLQICPTNAIVAPYELDARRCISYLTIELNGPIPEEFRPLIGNRIYGCDDCQLICPWNRYAVSSPEADFSPRHQLHTPELLTLWSWDENTFLKATEGSPIRRIGFEKWQRNIAVALGNGPASESVLHALLEKRSHTTELVQEHIDWALQQLQTKQIADNKKHARLIRCIYKGLPEHS

SEQ ID NO: 81783 - protein, 376 aa, Tolumonas sp.
  REGION 1..376: note = tr|A0A5C7QVT4|A0A5C7QVT4_9GAMM Epoxyqueuosine reductase OS=Tolumonas sp. OX=1978237 GN=queG PE=3 SV=1
MTSTPDLQKLAHDIKQWGLELGFDQVGITDCDLTSEESKLEAWLASGYHGEMEYMARYGLMRARPAELQPGTLRVISVRMNYLPSGAQIAKTLADPTRGYVSRYALGRDYHKTLRNRLKQLGERIQQASQDMLQFRPFVDSAPIMERPLADKAGLGWTGKHTLLLNKNAGSFFFLGELLVDLPLPIDHPIEPACGNCSACIQICPTGAIVAPYQVDARRCISYLTIELNGPIPEELRPLIGNRIYGCDDCQLICPWNRYAVTSPEPDFSPRQSLHTPDLLTLWAWDEAMFLKTTEGSAIRRIGFEKWQRNIAIALGNGPASDDVIHALEYKRAQASPLVQEHIDWALCQLRSLVSSENRKHDKLIRCIYKGLADHA

SEQ ID NO: 81784 - protein, 235 aa, unidentified
  source 1..235: note = Tolypothrix bouteillei
  REGION 1..235: note = tr|A0A0C1N6K3|A0A0C1N6K3_9CYAN Epoxyqueuosine reductase (Fragment) OS=Tolypothrix bouteillei VB521301; OX = 1479485 GN=DA73_0217140 PE=4 SV=1
QRPEGQEYAKISRYAWGRDYHKVMHKKLKALTMWLQEGSETVQARYYADTGPIQDKVWAQQAGIGWIAKNGNVITREYGSWVFLGEVLTNLELECDRPHTQHCGNCTRCIDACPTSAITKPFVLDANLCIAYHTIENRNEELPEEVKSNFHGWVAGCDICQDVCPWNQRFAKETDVSEFQPYPGNVAPKLVELAEISDRDWDQRFPASALRRIKPEMLRRNSRVNLDALKNKDEG

SEQ ID NO: 81785 - protein, 86 aa, unidentified
  source 1..86: note = Tolypothrix bouteillei
  REGION 1..86: note = tr|A0A0C1QXQ6|A0A0C1QXQ6_9CYAN Uncharacterized protein OS=Tolypothrix bouteillei VB521301 OX=1479485; GN = DA73_0217150 PE=4 SV=1
MNRSPGTSSSSIKEKALSLGFHKVGIAAVTGVESTEIQRLRAWLALGYHADMEWMTNPKRQDIFSVMPEVRSVICVALNYLSLIHI

SEQ ID NO: 81786 - protein, 318 aa, unidentified
  source 1..318: note = Tolypothrix campylonemoides
  REGION 1..318: note = tr|A0A0C2LG18|A0A0C2LG18_9CYAN Epoxyqueuosine reductase OS=Tolypothrix campylonemoides VB511288; OX = 1245935 GN=queG PE=3 SV=1
MNRSPGTNSTEVKKKALELGFHKVGIAAVDGEDVTQTERLQAWLALGYGADMEWMANPKRQDIRQVMPEVQTIISVALNYYTPQKRPEGTEYAKISRYAWGRDYHKVMHKKLKALTTWLQGLHEGIQARYYADTGPVQDKVWAQKAGIGWIAKNGNVITREYGSWVFLGEVLTNLQLESDRPHTEHCGSCTRCIEACPTGAITQPFVVDANRCIAYHTIENRDEELPQTVTPHLQGWVAGCDICQEVCPWNQRFAKETDVAEFEPYSGNVAPKLVELAQISDQEWDRQFPASALRRIKPQMLRRNARANLNALHKAKE

SEQ ID NO: 81787 - protein, 316 aa, Tolypothrix sp.
  REGION 1..316: note = tr|A0A218QBI5|A0A218QBI5_9CYAN Epoxyqueuosine reductase OS=Tolypothrix sp. NIES-4075 OX=2005459 GN=queG; PE = 3 SV=1
MNQFPATSSSVVKEKALELGFHKVGIAAVDEADTTHAQRLQAWLELGYHADMKWMASQKRQDIRLVMPEARSLICVALNYYTPHERPEGEEYAKMSRYGWGRDYHKVMHKKLKALTTWLQEQGEEIQALGYADTGPVQDKVWAQQAGIGWIAKNGNVITREYGSWVFLGEVLTNLELESDRPHTQHCGTCTRCLDACPTNAITQEFVIDANRCIAYHTIENRAEKLPLTITPHLQGWVAGCDICQDVCPWNQRFARTTDVVEFQPYSGNLAPKLIELAKISNEEWNRQFPASAFRRIKPEMLRRNARANLDNKLDG

SEQ ID NO: 81788 - protein, 343 aa, Tolypothrix sp.
  REGION 1..343: note = tr|A0A0D6L172|A0A0D6L172_9CYAN Epoxyqueuosine reductase OS=Tolypothrix sp. PCC 7601 OX=1188 GN=queG PE=3; SV = 1
MLCDHEVVLWIEAKIKLREMNSSGITTTDVVKKKAQELGFHKVGIAAVDGVDETAAQRLQAWLALGYNADMAWMANPKRQDIRLIMPEARSLICVALNYYTPHQRPTGEEYGKISRYGWGRDYHKVMHKRLKALNNWVQSLSENVQARYYADTGPVPDKLWAQKSGIGWIAKNGNVITREYGSWVFLGEIITNLELECDRPATEHCGTCTRCLEACPTGAITQPYVVDANRCIAYHTIENRAEQLPPNVKPHLQGWVAGCDICQDVCPWNQRFAKSTDVEEFNPYPGNLAPKLLELAEISEEEWEQQFTASALRRIKPEMLRRNARANLDASRQQNDSDSDYF

SEQ ID NO: 81789 - protein, 324 aa, Tolypothrix tenuis; identical to SEQ ID NO: 74629
  REGION 1..324: note = tr|A0A1Z4N5Y8|A0A1Z4N5Y8_9CYAN Epoxyqueuosine reductase OS=Tolypothrix tenuis PCC 7101 OX=231146 GN=queG; PE = 3 SV=1

SEQ ID NO: 81790 - protein, 379 aa, Trabulsiella guamensis
  REGION 1..379: note = tr|A0A085AAM7|A0A085AAM7_9ENTR Epoxyqueuosine reductase OS=Trabulsiella guamensis ATCC 49490 OX=1005994; GN = queG PE=3 SV=1
MSQPLDLNQLAQQIKQWGTELGFQQVGITDTDLSASEPKLQAWLDKQYHGEMEWMARHGMMRARPHELVPGTLRVISVRMNYLPANAAFARTLKNPALGYVSRYALGRDYHKLLRNRLKKLGEKIQEQYASLNFRPFVDSAPVLERPLAEKAGLGWTGKHSLILNRDAGSFFFLGELLVDIPLPVDKPVEEECGRCVACMTICPTGAIVEPYTVDARRCISYLTIELEGAIPEEFRPLIGNRIYGCDDCQLICPWNRYSQLTGEDDFSPRKALHAPELVELFGWSEEKFLKVTEGSAIRRIGHLRWLRNIAVALGNAPWDEANMQALESRRGEHPLLDEHIAWAIARQIEKRNSCVIEVQPPKKLRLVRVVEKGLPRDA

SEQ ID NO: 81791 - protein, 379 aa, Trabulsiella odontotermitis
  REGION 1..379: note = tr|A0A0L0GVQ0|A0A0L0GVQ0_9ENTR Epoxyqueuosine reductase OS=Trabulsiella odontotermitis OX=379893 GN=queG; PE = 3 SV=1
MSQPLDLNQLAQKIKQWGTELGFQQVGITDTDLSASEPKLQAWLDKQYHGEMAWMARHGMMRARPHELLPGTLRVISVRMNYLPANAAFARTLKNPALGYVSRYALGRDYHKLLRNRLKKLGEMIQEQYTSLNFRPFVDSAPVLERPLAEKAGLGWTGKHSLILSRDAGSFFFLGELLVDIPLPVDKPVEEGCGRCVACMTICPTGAIVEPYTVDARRCISYLTIELEGAIPEEFRPLIGNRIYGCDDCQLICPWNRYSQVTDEDDFNPRKALHAPELVELFGWSEERFLKVTEGSAIRRIGHLRWLRNIAVALGNAPWGDANMRALESRRGEHPLLDEHIEWAIAKQIEKRNACVIEVQPPKKLRLVRVIEKGLPRDA

SEQ ID NO: 81792 - protein, 349 aa, Tranquillimonas alkanivorans
  REGION 1..349: note = tr|A0A1I5U2A1|A0A1I5U2A1_9RHOB Epoxyqueuosine reductase OS=Tranquillimonas alkanivorans OX=441119; GN = queG PE=3 SV=1
MERDLKARLGDFAIEAGFGKMRVTTPDAIPEAAERLEAFVGAGRHGQMRWMEERRGWRGDPAALWPDAKSVVMLAESYGPEHDPLEVLAYPDRAAISVYAQGRDYHDVVKKRLKRVGRWLLEQCPDEAIKVFVDTAPVMEKPLAQAAGLGWQGKHTNLLARDLGNWVFLGAIFTTVKLEPDAPEPEHCGSCTRCLDVCPTDAFPAPFQLDARRCISYLTIEHAGPVEPELRAKLGNRIYGCDDCLAVCPWNKFAVTARDQRLSARADLLAPPLAELAVLDDAAFRSRFSGSPIKRIGRGRFVRNVCYAIGNSGDPSLLPVLDPLTRDDDATVADAARWAAMRLKEDDGD

SEQ ID NO: 81793 - protein, 370 aa, Tranquillimonas sp.
  REGION 1..370: note = tr|A0A438AF82|A0A438AF82_9RHOB Epoxyqueuosine reductase OS=Tranquillimonas sp. M0103 OX=2486419 GN=queG; PE = 3 SV=1
MSADLKSRLVAQALSDGFVACGVTRPDAAPQTAGRLRSFLAQGRHGQMDWMEAREGWRGSPSALWPQARSVIMLAESYAPETDPMAVLDLRDRAAISVYAQGRDYHDVVKKRLKRVGRWLLEQAPGEEIKVFVDTAPVMEKPLAQAAGLGWQGKHTNLLSREFGNWVFLGAIFTTIDLPPDTAEDEHCGSCTRCLDICPTNAFPAPFQLDARRCISYLTIEHDGPVDPDLRPALGNRIYGCDDCLAVCPWNKFAVEARDLRLLGDGSLVAPPLAELAALDDAAFRARFSGSPIKRIGRGRFVRNVCYAIGNSQDPSLLPAVQALTGDGDDTVADAAAWAVGRLNGGRQECRLPARSSTGSPSGSSGSQND

SEQ ID NO: 81794 - protein, 305 aa, unidentified
  source 1..305: note = Treponema caldarium
  REGION 1..305: note = tr|F8F4E0|F8F4E0_TRECH Putative iron-sulfur protein; OS = Treponema caldarium (strain ATCC 51460 / DSM 7334 / H1); OX = 744872 GN=Spica_2482 PE=4 SV=1
MDPASIADYIRTEAYDKGFSRVRFLSPYNPGTIFNRLDGTDNHWKGAPSLLVVALPYGNSGIAGALGQPSTIAPFARRNYYAEAVTRLKDVAKNVRARFGGQRSDYRILCNSPVPEKPLALLCGLGWLGKNSLIITPEAGSLVIIAAMTLPFQLPGDSPLSGVFLGARALAFPACKVCGDSPACMNACPTKALSGDGTVQTDRCIQWYASGNGTTVPNFVADVWENQLYGCTYCQDACPYNKKKIKGSDTERGKLPEFFTAEWVLSSSDESIRKAVQGSALGMQWLGPVSLRRNASLVLRRKSSV

SEQ ID NO: 81795 - protein, 349 aa, Treponema primitia
  REGION 1..349: note = tr|F5YHN1|F5YHN1_TREPZ 4Fe-4S ferredoxin, iron-sulfur binding protein OS=Treponema primitia (strain ATCC BAA-887 / DSM 12427 / ZAS-2) OX=545694 GN=TREPR_1046; PE = 4 SV =1
MINEKLIKEKALELGYEDCGIINISEINDYAEKINDRIIKFPNTKNTLEKLNRFTNLNERFPWAKSIIVCVRKYGKYSIPNNLKNLIAKYYLVDGRINEQSIDFQASIEFETFLNKVGLKTATERKFGLTALRWAAFKAGLGIIRRNNFFYTEKSGSWVYLEAWLIDCDMEMKNNDNSKPCPNNCNKCIKACPTKSLHEPYSMDRSTCVSCLTTFEGWDMSKESNNHNIGNWIYGCDVCQDICPFNKNKWMENEQFPRLNELAEHISLEKIIEMDYTYLEGIISSKFFYIGKGDVYKWKTNALNAMLNNYNENYLFYIRKACNDSNEHVRNMAEWVLDKITNYVPSMTE

SEQ ID NO: 81796 - protein, 353 aa, Treponema sp.
  REGION 1..353: note = tr|A0A3D3FSP1|A0A3D3FSP1_9SPIO Uncharacterized protein OS=Treponema sp. OX=166 GN=DIC34_16555 PE=4 SV=1
MAGIEEEAEEGGEERAAEQTGAIRTLAMASGFSRARFLAARGTATAFLVVALPYGNDDPDARLPRATEPSAEPACPARIAAFARRNYYAEAVARLKAVVAELRLRFGGSKGDYRILCNSSVPEKPLALAAGIGAAGRNSLIITPEAGSLVVLAALSLPFPVQADKPLGRSVCGSCTACVDACPTGALAPEDSFDRSRCIQWYASGNGEPSAEVVVRWGQRLYGCSVCQDVCPYNHRPIPGTATERGALPPAFDARDLVAASDEEIRKLFRGSAMGMAWLGAAAIRKNAERALAAALAPAALALPPAMAPAAAPAAAAPAAAAPAAAPAAAAPAAPAAAPSATGGSPDHPSRYP

SEQ ID NO: 81797 - protein, 371 aa, Treponema sp.
  REGION 1..371: note = tr|A0A4R4BPX4|A0A4R4BPX4_9SPIO Uncharacterized protein OS=Treponema sp. J25 OX=2094121 GN=C5O22_07895; PE = 4 SV=1
MVQSSIDLKQLRAYLLERARQSGFVAVRLLEQSRYAHLPEVLEYVEGAPTLLLVALPYGNRLASPFPPPPGWKVLALQEPPLVGLPGSEERDRSEEKPLASGEGLVEEKALPERRETPGTLKRPIAPQAVPGYIAPFAVRNYYGELVHRLKLLAADLRSRWGGTKGDFRIFCNSHLPERELCLRSGLGWQGRHGLLITPQAGSLVVLGGMGLPWPLAGDTPFPGVLEGDFPACRRCMKRYPPESLPCVAACPTAALTADGTLRRERCIQWYASGHAAPPPDIQAVWGHRLYGCTNCQDACPYNQRYIPGVPTNRGALPAVMDVQRVLSLEEGELASYLRGTTLGMRWLGAAVLKQNAARILTWHERFFCGE

SEQ ID NO: 81798 - protein, 385 aa, Trichococcus collinsii
  REGION 1..385: note = tr|A0A143YC16|A0A143YC16_9LACT Armadillo-type fold; OS = Trichococcus collinsii OX=157076 GN=Tcol_655 PE=4 SV=1
MNFAALKAEIIEESKKLGIDKLGFTTAEPFEYMLESLKEQHAKGHSVGFEHPVLDERIYPDRIFDAPQAILSLALAYPSKMTEKSERMRGERRGKFSRASWGTDYHVILRDRMDRLITFIQEKIPDARFKPMVDTGELIDTVVAQRAGLGFIGRNGLLITREFGSYVYLGEIITDIPFPADEPGVFGCGECTRCVDFCPTGAILGNGQLNPNICLSYQTQTKGYMPEEYRKKIGHVIYGCDICQQVCPYNRGMDYHLHPEMEPEPESVTPVLQPMLTISNREFKEQFGHLAGSWRGKKPLQRNAVIALANYRDRTAIPELLRMIEKDPRPVLRGTAAWAVAEIVREANPELLAFFSERLIIEADKETKAEMEKAYLKILEINEAD

SEQ ID NO: 81799 - protein, 385 aa, Trichococcus flocculiformis
  REGION 1..385: note = tr|A0A143YAF2|A0A143YAF2_9LACT Armadillo-type fold; OS = Trichococcus flocculiformis OX=82803 GN=TFLO_586 PE=4; SV = 1
MDFAALKAEIIEESKKLGIDKVGFTTAEPFEYMLESLKEQHAKGHTVGFEHPVLEERIYPDRIFDNPQAILSIALAYPSKMTEKAERVRGERRGNFSRASWGTDYHVILRERMDRLIAFIQEKMPDARFKPMVDTGELIDTVVAQRARLGFIGRNGLLITREFGSYVYLGEIITDIPFPADEPGVFGCGECTRCVDFCPTGAILGNGQLNPNICLSYQTQTKGYMPEEYRQKIGHVIYGCDICQQVCPYNRGMDHHLHPEMEPEPASVTPVLQPMLTISNREFKEQFGHLAGSWRGKKPLQRNAVIALANYRDRTAIPELLRMIEQDPRPVLRGTAAWAIAEIVREPNPEMLAFFSERLIIETDEETKAEMEKAYLKMLEIQKTD

SEQ ID NO: 81800 - protein, 385 aa, unidentified
  source 1..385: note = Trichococcus ilyis
  REGION 1..385: note = tr|A0A143YA24|A0A143YA24_9LACT Armadillo-type fold; OS = Trichococcus ilyis OX=640938 GN=TR210_476 PE=4 SV=1
MDFAALKAEIIEESKKLGIDKLGFTTAEPFEYMLESLKEQHAKGHTVGFEHPDLDERIYPERIFENPQAILSIALAYPSKMTEKAERARGERRGNFSRASWGTDYHVILRDRMERLIAFIQEKIPDARFKPMVDTGELIDTVVAQRAGLGFIGRNGLLITREFGSYVYLGEIITDIPFPADEPGVNGCGECRRCVDFCPTGAVLGNGQLNPNICLSYQTQTKGYMPEEFRKKIGHVIYGCDICQQVCPYNRGMDHHLHPEMEPEPASVTPVLQPMLTISNRDFKEQFGHLAGSWRGKKPLQRNAVIALANYRDRTAIPELLRMIEQDPRPVLRGTAAWAIAEIVREANPELLAFFSESLKTETDEETKAELEKAYLKMLGTKEAD

SEQ ID NO: 81801 - protein, 381 aa, Trichococcus palustris
  REGION 1..381: note = tr|A0A143YJ89|A0A143YJ89_9LACT Armadillo-type fold; OS = Trichococcus palustris OX=140314 GN=Tpal_1486 PE=4 SV=1
MDYTALKAEILQESKRLGIDKLGFTTAEPFDYMLEDLKEQHRKGHTVGFEHQVMEERIYPELIFDRPQAILSLALAYPSKMTAKAERVKGERRGNFARASWGTDYHVILRDKMDQLITFIQSKVPDARFKPMVDTGELIDTVVAQRAGLGFIGRNGLLITREYGSYIYLGEVMTDIPFPPDEPGVFGCGECTRCVDYCPTGAILGNGQLNPNVCLSYQTQTKGFMPEEFRKKMSHVIYGCDICQQVCPYNKGMDFHLHPEMEPEPESVSPVLQPMLTISNREFKEQFGHLAGSWRGKKPLQRNAIIALANYRDRTAIPALLQLIEQDPRPVMRGTAGWAIGEIVREANPELLAFYEERIAAETDEETRLELEKAHQKIKAL

SEQ ID NO: 81802 - protein, 385 aa, Trichococcus pasteurii
  REGION 1..385: note = tr|A0A1W1II69|A0A1W1II69_9LACT Armadillo-type fold; OS = Trichococcus pasteurii OX=43064 GN=TPAS_2398 PE=4 SV=1
MDFAALKAEIIEESKKLGIDKLGFTTAEPFEHMLESLKEQHAKGHTVGFEHPVLDERIYPDRIFDNPQAILSIALAYPSKMTEKAERVRGERRGNFSRASWGIDYHVILRERMDRLIAFIQEKVPGARFKPMVDTGELIDTVVAQRAGLGFIGRNGLLITREFGSYVYLGEIITDIPFPADEPGVFGCGECTRCVDFCPTGAILGNGQLNPNICLSYQTQTKGYMPEEYRQKIGHVIYGCDICQQVCPYNRGMDHHLHPEMEPEPESVTPVLQPMLTISNREFKEQFGHLAGSWRGKKPLQRNAVIALANYRDRTAIPELLRMIEQDPRPVLRGTAAWAIAEIVREANPELLAFFSERLIIETDEETKAEMEKAYLKILEIKEKD

SEQ ID NO: 81803 - protein, 385 aa, Trichococcus patagoniensis
  REGION 1..385: note = tr|A0A2T5IQU5|A0A2T5IQU5_9LACT Epoxyqueuosine reductase OS=Trichococcus patagoniensis OX=382641; GN = C8U37_10127 PE=4 SV=1
MNFAALKAEIIEESKKMGIDKLGFTTAEPFEYMLESLKEQHAKGHTVGFEHPVLDERIYPDRIFDKPQSILSIALAYPSKMTENAERVRGERRGNFSRASWGTDYHVILRERMDRLIAFIQEKIPGARFKAMVDTGELIDTVVAQRAGLGFIGRNGLLITREFGSYVYLGEIITDIPFPADEPGIFGCGECTRCVDFCPTGAILGNGQLNPNSCLSYQTQTKGYMPEAYRQKIGHVIYGCDICQQVCPYNRGMDHHLHPEMEPEPESVTPVLQPMLTISNREFKEQFGHLAGSWRGKKPLQRNAVIALANYRDRTAIPELLRMIEQDPRPVLRGTAAWAIAEIVRESNPELLAFFSERLIIETDEETKAEMEKAYLKMLELKDTD

SEQ ID NO: 81804 - protein, 385 aa, Trichococcus sp.
  REGION 1..385: note = tr|A0A383TEM9|A0A383TEM9_9LACT Armadillo-type fold; OS = Trichococcus sp. ART1 OX=2094020 GN=TART1_1605 PE=4 SV=1
MNFAALKAEIIEESKKLGIDKLGFTTAEPFEYMLESLKEQHSKGHTVGFEHPVLDERIYPDRIFEKPQSILSIALAYPSRMTEKAERTRGERRGNFSRASWGTDYHVILRDRMDRLIAFIQEKIPEARFKPMVDTGELIDTVVAQRAGLGFIGRNGLLITREFGSYVYLGEIITDIPFPADDPGVFGCGECTRCVDFCPTGAILGNGQLNPKICLSYQTQTKGYMPEEYRKKISHVIYGCDICQQVCPYNRGMDHHLHPEMEPEPESVTPVLQPMLTISNREFKEQFGHLAGSWRGKKPLQRNAVIALANYRDRTAIPELLRMVEQDPRPVLRGTAAWAIAEIVREANPELLAFFSERLIIETDEETKAEMEKAYLKILDIKEAD

SEQ ID NO: 81805 - protein, 385 aa, Trichococcus sp.
  REGION 1..385: note = tr|A0A5C5E8B4|A0A5C5E8B4_9LACT tRNA epoxyqueuosine(34) reductase QueG OS=Trichococcus sp. SKBG; OX = 2585775 GN=queG PE=4 SV=1
MNFAALKAEIIEESKKLGIDKLGFTTAEPFEYMLESLKEQHSKGHTVGFEHPVLDERIYPDRIFEKPQSILSIALAYPSRMTEKAERTRGERRGNFSRASWGTDYHVILRDRMDRLIAFIQEKIPEARFKPMVDTGELIDTVVAQRAGLGFIGRNGLLITREFGSYVYLGEIITDIPFPADDPGVFGCGECTRCVDFCPTGAILGNGQLNPKICLSYQTQTKGYMPEEYRKKISHVIYGCDICQQVCPYNRGMDHHLHPEMEPEPESVTPVLQPMLTISNREFKEQFGHLAGSWRGKKPLQRNAVIALANYRDRTAIPELLRMVEQDPRPVLRGTAAWAIAEIVREANPELLAFFSERLIIETNEETKAEMEKAYLKILDIKEAD

SEQ ID NO: 81806 - protein, 308 aa, unidentified
  source 1..308: note = Trichodesmium erythraeum
  REGION 1..308: note = tr|Q10VF8|Q10VF8_TRIEI Epoxyqueuosine reductase; OS = Trichodesmium erythraeum (strain IMS101) OX=203124; GN = queG PE=3 SV=1
MKLYISSSQIKQKALEVGFHKVGITSANKLSSEINRLQSWLNKGYQADLEWMANPKRQDLKKVMPEVKSVICVALNYYTPHKHSESSEIGKISRYGWGRDYHKVMHKKLKSLVNWLQEQDQEILTRYYVDTGPIMEKPLAEQAGVGWIAKNGNLITREYGSWVFLGEVLTNLELTNDRPHTEHCGSCTRCLEACPTNAIVESFVIDANLCIAYHTIENRNPKLPVHIKSNLKGWVAGCDICQDVCPWNQRFAQETNIDEFQPYPNNLVPKLTKLAEISQEDWNKQFPASALRRIKPEMLQRNARANLE

SEQ ID NO: 81807 - protein, 324 aa, unidentified; identical to SEQ ID NO: 74448
  source 1..324: note = Trichormus variabilis
  REGION 1..324: note = tr|Q3MAY9|Q3MAY9_TRIV2 Epoxyqueuosine reductase; OS = Trichormus variabilis (strain ATCC 29413 / PCC 7937); OX = 240292 GN=queG PE=3 SV=1

SEQ ID NO: 81808 - protein, 324 aa, unidentified
  source 1..324: note = Trichormus variabilis
  REGION 1..324: note = tr|A0A3S1AEZ6|A0A3S1AEZ6_ANAVA Epoxyqueuosine reductase OS=Trichormus variabilis SAG 1403-4b OX=447716; GN = queG PE=3 SV=1
MNDCALTSSSVVKEKARELGFHQVGIASVDGVDATEVQRLQAWMELGYHGDMEWMANPKRQDIRLVMPEVRSLVCVALNYYTPDQRPEGEEYAKISRYGWGRDYHKVLHKKLKQLATWLESLDEGVKARYYADTGPVQDKVWAQKAGIGWIAKNGNVITREYGSWVFLGEVLTNIELESDRPATQHCGTCTRCLEACPTGAITEPFVVDANRCIAYHTIENRAETLPETLTPHLQGWVAGCDICQDVCPWNQRFAKVSDVTDFRPYAGNLAPKLVELAQISDQEWDRQFTASALRRIKPEMLRRNARANLDASRLKNDSESNNI

SEQ ID NO: 81809 - protein, 440 aa, unidentified
  source 1..440: note = Trinickia caryophylli
  REGION 1..440: note = tr|A0A1X7H2B4|A0A1X7H2B4_TRICW Epoxyqueuosine reductase OS=Trinickia caryophylli OX=28094 GN=queG PE=3; SV = 1
MNQCPEHAAKGGRANPCDTAAARQDVSRADDAHDVRANRLDDATLAALAQRIKAWGRELGFGALGISDTDLSSAEAGLAAWLEAGCHGEMDYMAKHGTKRARPAELVAGTRRVITARMAYMPASVLAPAASGDASAAAAPQDWRARERARLADPSAAVVSIYARGRDYHKVMRQRLQRLAERIEQEVGPYGYRVFTDSAPVLEVELAQKSQIGWRGKHTLLLERDAGSLFFLGEIYVDLPLPVDAPSTGTADEASAVAAAPAQAPARAAGAHCGHCTRCIEACPTGAIVAPYRVDARRCISYLTIELAGSIPEPLRPLIGNRVYGCDDCQLACPWNKFAQAAPVDDFDVRHGLDRATLVELFEWSAETFDARMQGSAIRRIGYERWLRNVAVGLGNALRSASPTALAAGERERIVAALRGRADDESPLVREHVLWALAAA

SEQ ID NO: 81810 - protein, 422 aa, unidentified
  source 1..422: note = Trinickia soli
  REGION 1..422: note = tr|A0A2N7WAS3|A0A2N7WAS3_9BURK Epoxyqueuosine reductase OS=Trinickia soli OX=380675 GN=queG PE=3 SV=1
MKRSPQQAATDSRVPDEVGPSHAAADVAGKLDAAALAALAQRIKTWGRELGFGAVGISDTDLSDAEAALTAWLEAGCHGEMDYMAKHGAKRARPAELVAGTRRVISARMAYMPASVLARNEAESTPSAAAHGEGKEAGDWRAREWERLADPSAAVVSIYARGRDYHKVMRQRLQQLAERIEREVGAYGYRVFTDSAPVLEVALAQKAGIGWRGKHTLLLERDAGSLFFLGEIYVDIPLPTDARSAPGPATRAQGAHCGHCTRCIDVCPTGAIVGPYRVDARRCISYLTIELKGSIPESLRPLIGNRVYGCDDCQLVCPWNKFAQAAPVDDFDVRHGLDRARLVDLFAWSAEEFDVRLQGSAIRRIGHERWLRNLAVAMGNALRNSETLAADERARIVAALRARADDASSLVREHVQWALQAA

SEQ ID NO: 81811 - protein, 403 aa, unidentified
  source 1..403: note = Trinickia sp.
  REGION 1..403: note = tr|A0A4U1HNP6|A0A4U1HNP6_9BURK Epoxyqueuosine reductase OS=Trinickia sp. 7GSK02 OX=2571161 GN=queG PE=3; SV = 1
MNRCPEHSMSRTPLSDDDCRASRRFDEAALAALAQRVKEWGRELGFGAVGISDIDLTDAEAGLAAWLEAGCHGEMDYMAKHGVKRARPAELVAGTLRVITARMAYLPASTRDESEPSGGWRAREMARLADPSTAVVSIYARGRDYHKVMRNRLQQLAQRIEDEIGAYGYRVFTDSAPVLEIELAQKAGIGWRGKHTLLLQRDAGSLFFVGEILVDVPLPTDAETSPERAPEAPGAHCGQCTRCIDACPTGAIVAPYRVDARRCISYLTIELKGSIPEDLRPLIGNRVYGCDDCQLVCPWNKFAQAAPVDDFDVRHGLDRATLVELFGWSAGEFDTRMQGSAIRRIGYERWLRNIAVAMGNALRSDAASIGDAARAEIVAALESRADDDSPLVREHVQWALAAA

SEQ ID NO: 81812 - protein, 491 aa, unidentified
  source 1..491: note = Trinickia symbiotica
  REGION 1..491: note = tr|A0A2N7WTJ7|A0A2N7WTJ7_9BURK Epoxyqueuosine reductase OS=Trinickia symbiotica OX=863227 GN=queG PE=3; SV = 1
MTALHAAASSAETYRFDGAALAALARRIKAWGRELGFGAIGVSDTDLSQAEAALSAWLAAGCHGEMDYMAKHGMKRARPAELVAGTLRIITARMAYLPAATLAVADDESASSDSKAAAMAEDAPASAERERNESDQPDERDERDERAGALDWRARERARLDDPTAAVVSLYARGRDYHKVMRQRLQQLAERIEREIGPYGHRVFTDSAPVLEVELAQKASIGWRGKHTLLIERDAGSLFFLGEIYVDVPLPVDVDVDVDVDVDVDVDVDADVDADVDADVDADVDADADADADADAVADADAEADAEAEKPAVKKAPRTAGESCGRCTRCIDVCPTGAIVGPYRVDARRCISYLTIELKGSIPEALRPLIGNRVYGCDDCQLVCPWNKFAQAAPVDDFDTRHGLDRASLVDLFSWSAEEFDTRMQGSAIRRIGYECWLRNLAVGLGNALRAGGGTALGQADRSRIVDALRRRADDASPLVREHVEWALEAA

SEQ ID NO: 81813 - protein, 436 aa, unidentified
  source 1..436: note = Trinickia symbiotica
  REGION 1..436: note = tr|A0A2T3XKS3|A0A2T3XKS3_9BURK Epoxyqueuosine reductase OS=Trinickia symbiotica OX=863227 GN=queG PE=3; SV = 1
MTALHAAASSAETSRFDDAALAALARRIKAWGRELGFGAIGVSDTDLSQAEAALSAWLAAGCHGEMDYMAKHGMKRARPAELVAGTLRIITARMAYLPAATLAAADDESASSDSKAPGAAEDAPASAERERNERDERAGAVDWRARERARLDDPTAAVVSLYARGRDYHKVMRQRLQQLAERIEREIGPYGHRVFTDSAPVLEVELAQKASIGWRGKHTLLIERDAGSLFFLGEIYVDIPLPVDVDVAAEARAEEPAVTKAPRTAGESCGRCTRCIDVCPTGAIVGPYRVDARRCISYLTIELKGSIPEALRPLIGNRVYGCDDCQLVCPWNKFAQAAPVDDFDTRHGLDRASLVDLFSWSVEEFDTRMQGSAIRRIGYECWLRNLAVGLGNALRAGGGAALGQADRSRIVDALRKRADHASPLVREHVEWALEAA

SEQ ID NO: 81814 - protein, 347 aa, unidentified
  source 1..347: note = Tritonibacter horizontis
  REGION 1..347: note = tr|A0A132C4D1|A0A132C4D1_9RHOB Epoxyqueuosine reductase OS=Tritonibacter horizontis OX=1768241 GN=queG; PE = 3 SV=1
MTDTPDLKQRLVAEARAEGFVSARICRPWDVPEVPARLDAFLDAGFHGQMSWMAERVNWRADPAALWPEAKSVIMLAESYTPDENPMDVVGLPDRAAISVYARGKDYHDLVKKRLKRLARWLIAEAGDATQVKVFVDTAPVPEKALGQAAGLGWQGKHTNLLSRDWGNWAFLGSIFTTLELAVDPAEPDHCGSCRACLSACPTDAFPAPYQLDARRCISYLTIEHKGPIEEDLRAKLGNRIYGCDDCLAACPWNKFAVAASDVRYAAREGTVAPPLAELARLDDATFRARYAGSPIKRIGRDRFVRNVLYAIGNSGEARLRSVAQELCADPDPTVADAAQWAVMRLS

SEQ ID NO: 81815 - protein, 346 aa, Tropicibacter naphthalenivorans
  REGION 1..346: note = tr|A0A0P1GAM7|A0A0P1GAM7_9RHOB Epoxyqueuosine reductase OS=Tropicibacter naphthalenivorans OX=441103; GN = queG PE=3 SV=1
MEGLAARLKAEAQAVGFSACRVCRPSDVPQVAARLAAFVEQERHGQMAWMAERMHWRGAPDVLWPEARSVIMLAESYGQAHDPMAVVGQGDRGAISVYAQNRDYHDVVKKRLKRLGRWLIDAAGPETQIKVFVDTAPVMEKPLGQAAGLGWQGKHTNLVSRELGSWFFLGAIFTTVELPVDGAERDHCGSCRACLDACPTGAFPAPYQLDARRCISYLTIEHSGPVPEDLRAGLGNRIYGCDDCLAACPWNKFAQMAAEVKYHARPELIGPRLAELAALDDAGFRALFSGSPIKRIGRDRFVRNVCYAIGNSGDMGLRPAVQALADDPDAAVSDAASWAVGRLDGR

SEQ ID NO: 81816 - protein, 348 aa, unidentified
  source 1..348: note = Tropicibacter phthalicicus
  REGION 1..348: note = tr|A0A238J934|A0A238J934_9RHOB Epoxyqueuosine reductase OS=Tropicibacter phthalicicus OX=1037362 GN=queG; PE = 3 SV=1
MSGDLKQALVVEAAEVGFADCRICRPDAVPQVMARLQAFLEAGRHGQMGWMGERVHWRGAPDALWPEARSVIMLAENYGPDFDPRAVLEQKDRGAISVYAQNKDYHDVAKKRLKRLGRWLIEAAHRQRQEAEIKVFVDTAPVMEKPLGMAAGLGWQGKHTNLVSRKLGSWFFLGAIFTTLELEPDEAGVDRCGQCRACLDVCPTDAFPAPYQLDARRCISYLTIEHTGPVDEALREGLGNHIYGCDDCLAACPWNKFAQEAHEAKYHARDELKAPKLAELVVLDDAGFRALFSGSPIKRAGRDRFVRNVLYAIGNSGDSGLAEYVRPLCDDPDVAVADAARWALARIG

SEQ ID NO: 81817 - protein, 342 aa, Tropicimonas isoalkanivorans
  REGION 1..342: note = tr|A0A1I1M6K8|A0A1I1M6K8_9RHOB Epoxyqueuosine reductase OS=Tropicimonas isoalkanivorans OX=441112; GN = SAMN04488094_10943 PE=4 SV=1
MRLEAQARAEGFAAMGVCRPDAIGHVPAELAAFIGQGLHGQMSWLAERMGWRGDPAQLWPEARSIVVLAESYSPDLDPRENLKRPDVGNVSVYARGKDYHDIVKKRLKRLARWLIAEAGGEVKVFVDTAPLAEKPLGQAAGLGWQGKHTNLLSRDLGNWFFLGSIFTTLDLPEDVAETDHCGSCRACLDACPTEAFLGPYRMDARRCISYLTIEHRGPVDVELRARMGNRIYGCDDCLAACPWNKFAVDASDMRYAARDDLSAPDLRDLVRLDDASFRARFSGSPIKRIGRDRFVRNVLYAIGNSEDRSLMDPAKALRADSDPAVADAARWAVERLSSRSQS

SEQ ID NO: 81818 - protein, 343 aa, unidentified
  source 1..343: note = Tropicimonas sediminicola
  REGION 1..343: note = tr|A0A239J4A8|A0A239J4A8_9RHOB Epoxyqueuosine reductase OS=Tropicimonas sediminicola OX=1031541 GN=queG; PE = 3 SV=1
MEGLKERLEAQALAEGFVATGICRPDAIGHVPEALGAFVAQGFHGQMSWMAERMGWRGDPSALWPEARSVVMLAESYTPEHDPREDLGRPEIGNVSVYARGRDYHDLVKKRLKRLARWLIAEAGGEVKVFVDTAPVAEKPLAQAAGLGWQGKHTNLVSRGLGNWIFLGSIFTTLELPADTAEVDHCGSCRACLDACPTEAFVAPYRMDARRCISYLTIEHRGPVAEDLRARMGNRIYGCDDCLAACPWNKFAVAARELRYAARPDLEAPPLEELARLDDAGFRARFSGSPIKRIGRDRFVRNVLYAIGNSGERRLAPVAAGLVSDPDPAVADAAGWALARLAG

SEQ ID NO: 81819 - protein, 354 aa, Tropicimonas sp.
  REGION 1..354: note = tr|A0A4Q3ZHY7|A0A4Q3ZHY7_9RHOB Epoxyqueuosine reductase OS=Tropicimonas sp. IMCC6043 OX=2510645 GN=queG; PE = 3 SV=1
MPTSISETPTTPLKERLLQQATVEGFTRLRLCRPDAIPQVAKDLEKFVGGGYHGQMHWMERRIGWRGDPRALWPEVRSVIVLAESYSPDAPPEASLDRPELGTVSVYARGKDYHDIVKKRLKRLARWLIAEAGGAVKVFVDTAPVAEKPLGQAAGLGWQGKHTNLVSREIGNWFFIGAIFTTLEIPPDAPEVDHCGSCRACLDACPTDAFLAPYRLDARRCISYLTIEHSGPVAPELRARMGNRIYGCDACLAACPWNKFAAAATELRYAAKDDLDAPPLAELAALDDAAFRRRFAGSPIKRIGRDRLVRNVLYAIGNSGRADLGAAAERLLDDPDETVAEAARWALTRLARSI

SEQ ID NO: 81820 - protein, 384 aa, unidentified
  source 1..384: note = Tumebacillus algifaecis
  REGION 1..384: note = tr|A0A223CZG0|A0A223CZG0_9BACL tRNA epoxyqueuosine(34) reductase QueG OS=Tumebacillus algifaecis OX=1214604 GN=queG PE=4 SV=1
MGKHEIDKETIAQIGEELGIDGIGVTTAEPFHDVYEHLVMYRESGHESGFEHGVLEERVDPKTFFPEAKSIVAIAMAYRTEKYAGQKKPEGLRGQMSVYAWGMDYHKVLKQKLELLVARLEVEVGRPIVVHNSVDTGPLVDRAVAQRAGIGWVGKNCSLITEKHGSWVFLGQLVCDVDIEPNEPSLLPQCADCPDLCLKACPTKALVNPFQTDSSKCLSYITQMKGLIPEEYRAKLGRRLWGCDTCQVVCPKNKDVAFGTAIEFDPEPEFAFPDLMHLLELSNKQFRREFGESAAAWRGAKVMQRNAIIALGNMREKAALPKLLSMLQQDERPEIRGTIAWALRKIDAEGTCEAVAEAFERETEDEVKQEMAWAVKLREGGAEA

SEQ ID NO: 81821 - protein, 379 aa, unidentified
  source 1..379: note = Tumebacillus avium
  REGION 1..379: note = tr|A0A1Y0IJS4|A0A1Y0IJS4_9BACL tRNA epoxyqueuosine(34) reductase QueG OS=Tumebacillus avium; OX = 1903704 GN=CBW65_00900 PE=4 SV=1
MRKYEIDNETILRIGAELGIDGIGVTTAEPFHDVHEHLVMYRESGHESGFEHDVLEERVDPKAFFPEAKSIVAIAMAYRTEKYVGQKKPEGLRGQMSVYAWGMDYHKVLKGKLELLAARLEQELGRPVAVHNSVDTGPLVDRAVAQRAGIGWVGKNCSLITETHGSWVFLGQLVCDVDIEPSVPTPLPQCEDCPDLCLKACPTKALVSPFQTDSSKCLSYITQMKGLIPEEYRAKLGRRLWGCDTCQVVCPKNKEVAFGTAIEFDPEPEYAFPDLMHLLTLSNKQFRREFGESAAAWRGAKVMQRNAIIALGNMREQAAVPKLLEMLERDERPEIRGTIAWALQKIDPDGTREKVAQAYAREPEEEIKQEMAWAVDGAE

SEQ ID NO: 81822 - protein, 379 aa, Tumebacillus permanentifrigoris
  REGION 1..379: note = tr|A0A316D9G6|A0A316D9G6_9BACL Epoxyqueuosine reductase OS=Tumebacillus permanentifrigoris OX=378543; GN = C7459_10695 PE=4 SV=1
MAGYEIDNATIRQLAEELGIDGIGVTTAEPFAELEEQLTNYRDLGHESGFEHPVIQERIDPRQTWPNAQSIIAIAMGYRTEQYVGAKKPAGLRGQMSVYAWGMDYHQVLKQKLDQLGKRLQELLGRPIEIYNTVDTGPLVDRAVAQRCGIGWLGKNCSIITDTHGSWVFLGQLVTDISIEPNVPSPPPQCGDCPDLCLKACPTKALVNPFMTDSSKCLSYITQMKGFVPEQYRAKLGRRLWGCDTCQVVCPKNKDVAFGTAIEFDPEPEYAFPDLMRLLDLSNKQFRREYGTSAAAWRGVKVMQRNAIIALGNMRETQAIARLLELLSQDERPEIRGTIAWALKKIDPDATREAVAHAYEVEEHAEAKQEMAWAIEDPA

SEQ ID NO: 81823 - protein, 397 aa, Tumebacillus sp.
  REGION 1..397: note = tr|A0A4R2QXB9|A0A4R2QXB9_9BACL Epoxyqueuosine reductase OS=Tumebacillus sp. BK434 OX=2512169; GN = EV586_105143 PE=4 SV=1
MNWRGQPFRSEDGEAAMRKYEIDRATILRLGEELGIDGIGVTTAEPFHDVHEHLVMYRESGHESGFEHDVLEERVDPKAFFPEAKSIVAIAMAYRTEKYAGQKKPEGLRGQMSVYAWGMDYHKVLKAKLELLAARLEQEAGRPIAVHNSVDTGPLVDRAVAQRAGIGWVGKNCSLITEKHGSWVFLGQLVCDVDIEPSEPSLLPQCEDCPDLCLKACPTKALVNPFQTDSSKCLSYITQMKGLIPLEYRAKLGRRLWGCDTCQVVCPKNREVAFGTAIEFDPEPEYAFPDLMRLLTLSNKQFRREFGESAAAWRGAKVMQRNAIIALGNMREQAALPKLLEMLEQDERREIRGTIAWALQKIDPEGTRALVAAAYAREPDEEIRQEMAWAVEEAPEA

SEQ ID NO: 81824 - protein, 365 aa, Turicibacter sanguinis
  REGION 1..365: note = tr|A0A174ENV4|A0A174ENV4_9FIRM Epoxyqueuosine reductase OS=Turicibacter sanguinis OX=154288 GN=queG PE=4; SV = 1
MKKEKQKQGVIDKQDLTIIENSEAYELKEKLIEYSKEVGIDVIGFSDVKPFLFLETELKRREELGWSSGLTKGSIEERTNPLLSMENAKSFVSIGVSYPRQTELPKQDKEDPFVQFCRSSWGMDYHDIVGKKLQLLEDWLKEHISGIEVIGSVDTGVFNDRAVALRSGIGFSGKNSSIINETFGSYIYLGELLVSYEFPPDTPIERLCGTCDRCVRACPTKAIQPDGSLNEKRCLSYVTQSKEYLAPELYEKISKNVYGCDICQEVCPFNREVDFHLHAEMEPTGAEFPKISELLTMTNKEFKSKYGHLAGSWRGVSVLKRNAMFNAGFYKYKAALPEIAKIRDGQGPDWLKEAAKQAYERLDNK

SEQ ID NO: 81825 - protein, 339 aa, Turicibacter sanguinis
  REGION 1..339: note = tr|D4W1M3|D4W1M3_9FIRM Putative iron-sulfur cluster-binding protein OS=Turicibacter sanguinis PC909; OX = 702450 GN=CUW_2343 PE=4 SV=1
MKDKLIEYSKSIGIDVIGFCSVDPFLELADEIRRRDELGWSSGLTKGSILERTNPLLSMENAKTFISIGVSYPRNTQFPVQDKEDPYVQFSRSSWGVDYHVIVGEKLQLLEEWLKKEIPGIEVIVSVDTGVFNDRAVALRSGIGFSGKNSSIINETFGSYLYLGELLVSYEFPSDNPIERQCGTCDRCVRACPTKAIQPDGSLNEKRCLSYVTQSKEFLDPELYKKISKNIYGCDICQEACPYNREVDFHLHEKMEPTGVEFPKIDEILKMSNKEFKQKYGHLAGSWRGVSVLKRNAMFNASFYKYKEALPEIAKLRDGQAPDWLREAAIVAYEELEKK

SEQ ID NO: 81826 - protein, 347 aa, Turicibacter sp.
  REGION 1..347: note = tr|A0A109RMR1|A0A109RMR1_9FIRM Epoxyqueuosine reductase OS=Turicibacter sp. H121 OX=1712675; GN = AT726_08755 PE=4 SV=1
MENSEAYELKEKLIEYSKEVGIDVIGFSDVKPFLFLETELKRREELGWSSGLTKGSIEERTNPLLSMENAKSFVSIGVSYPRQTELPKQDKEDPFVQFCRSSWGMDYHDIVGKKLQLLEDWLKEHISGIEVIGSVDTGVFNDRAVALRSGIGFSGKNSSIINETFGSYIYLGELLVSYEFPPDTPIERLCGTCDRCVRACPTKAIQPDGSLNEKRCLSYVTQSKEYLAPELYEKISKNVYGCDICQEVCPFNREVDFHLHAEMEPTGAEFPKISELLTMTNKEFKSKYGHLAGSWRGVSVLKRNAMFNAGFYKYKAALPEIAKIRDGQGPDWLKEAAKQAYERLDNK

SEQ ID NO: 81827 - protein, 332 aa, Turneriella parva
  REGION 1..332: note = tr|I4BBM5|I4BBM5_TURPD Uncharacterized protein; OS = Turneriella parva (strain ATCC BAA-1111 / DSM 21527 / NCTC 11395 / H) OX=869212 GN=Turpa_4048 PE=4 SV=1
MAAHRVLLAVIGRTRLDAIARVAAGVGFSAVAAVPVTEPSAEFRNWWLAFLARGGHSDLAYLEGPQRFDLRAVLPEAQSLLLFRYPYRFREVDEKLRLAPYKVARYAWQKDYHVILKAKLAEVMQACSLAGRAVTDSAPLAERYWARLAGLGKIGRNGMLIAAGSGSYFLIAAVLTNEVLAAEVVESLAQTKGPNDIADICGECNLCVEACPTAALTGDGLMKTDRCISYQTIEKRENEVDVSLNQKRHHWVFGCDVCQQVCPHNKTALAFAEPRFNDEHAAAAAIAAGELPATRSSLKLSSFYRRGLAKLAGNLRAVMSFSDSAPGPHDGE

SEQ ID NO: 81828 - protein, 311 aa, unidentified
  source 1..311: note = Tychonema bourrellyi
  REGION 1..311: note = tr|A0A2G4F594|A0A2G4F594_9CYAN Epoxyqueuosine reductase OS=Tychonema bourrellyi FEM_GT703 OX=2040638; GN = queG PE=3 SV=1
MKTSTNSDRIKQKSLELGFHKVGIALVDEGTDQESQRLQAWLDKGYQGDMGWMANPKRQDIRASMPEVKSLICVAINYYTPHQRPESSEYAKISRYGWGRDYHKILHKKLKVLADWVRSQGEGIEARYYADTGPIQDKVWAQRAGIGWIAKNGNVISREYGSWVFLGEVLTNLELVPDSGHTQHCGTCTRCIEACPTGAITEPFVVNADRCIAYHTIENRAEKLPDEIASNLQGWVAGCDICQDVCPWNQRFAKPTDVAEFEPYPENIAPTLAELAEISDEEWNRRFTASALRRIKPEMLRRNAIANQTNS

SEQ ID NO: 81829 - protein, 356 aa, Uliginosibacterium sp.
  REGION 1..356: note = tr|A0A2N4XRG1|A0A2N4XRG1_9RHOO Epoxyqueuosine reductase OS=Uliginosibacterium sp. TH139 OX=2067453; GN = queG PE=3 SV=1
MHPDSLIPQTDELLRQIRSWAHELGFAGLGVSGVDLGSAEQGLLDWLAAGFHGGMDYMARHGLKRARPAELVPGTVSVLMLRMDYWPEPDLTEAIRLQGEAGRAAISRYALGRDYHKVLRTRLQKLAERIAAVVGDYGHRVFVDSAPVLEVELASRAGLGWRGKHTLLINREAGSFFFLGEIYVDLALPPDTPVRAHCGSCTACIPACPTQAIVEPYRLDARRCISYLTIEHAGPIPEALRPLIGNRVYGCDDCQLACPWNRFARLTQEPDFAVRNGLDRATLVELFAWREDEFAQRLAGSPIYRIGHERWLRNLAVGLGNAPTSPAVLEALQSRADDPSALVREHVAWALARHGR

SEQ ID NO: 81830 - protein, 308 aa, Ulvibacter antarcticus
  REGION 1..308: note = tr|A0A3L9ZG46|A0A3L9ZG46_9FLAO Epoxyqueuosine reductase OS=Ulvibacter antarcticus OX=442714 GN=queG PE=3; SV = 1
MIENPSKYAAEIKQEAKRLGFMSCGISKAEFLEEEAPRLEKWLQKNRHGEMSYMENHFDKRLDPTKLVPGSKSVISLLLNYFPSETQDESAYKISKYAYGTDYHFVIKDKLKQLLAFIQDEIGDVHGRAFVDSAPVLDKAWAAKSGLGWIGKHSNLLTKQVGSFYFIAELIVDLDLAYDSPVTDHCGACTACIDACPTQAIVEPYVVDGSKCISYFTIELKNELPTSMNGKFDDWMFGCDVCQDVCPWNRFSKAHREPLFNPNPELLSMSKKDWEEITEEVFQEIFRKSAVKRTKFSGLQRNIDFLKK

SEQ ID NO: 81831 - protein, 306 aa, Ulvibacter litoralis
  REGION 1..306: note = tr|A0A1G7DUQ5|A0A1G7DUQ5_9FLAO Epoxyqueuosine reductase OS=Ulvibacter litoralis OX=227084 GN=queG PE=3; SV = 1
MNEAQHTRLIKEEAKRLGFLSCGVSKAEFLEEEAPRLERWLKQNRNGEMGYMENHFDKRLDPTLLVPDSKSVISLLLNYYPSEVQSDDTYHISKYAYGTDYHFVIKDKLKHLLAFIQEEIGEVHGRAFVDSAPVLDKVWAAKSGLGWIGKHSNVLTKQVGSFYFIAELIVDLKLAYDSPVTDHCGSCTACIDACPTQAIVEPYVVDGSKCISYFTIELKNEIPSNVRGQFDDWIFGCDVCQDVCPWNRFSKSHNEPLFNPNPELLSMTKKDWEEITESVFQTVFKNSAVKRTKFSGLQRNINFVKD

SEQ ID NO: 81832 - protein, 289 aa, unidentified
  source 1..289: note = Ulvibacter marinus
  REGION 1..289: note = tr|A0A5J4IXJ5|A0A5J4IXJ5_9FLAO Epoxyqueuosine reductase OS=Ulvibacter marinus OX=1397112 GN=queG PE=4; SV = 1
MSCGVSKAGFLEEEAPRLESWLNKNMNGEMAYMENHFDKRLDPTLLVEGSKSVISLLLNYYPQELQKDTSYKISKYAYGTDYHFVIKDKLKKLLHFIREEIGEVNGRAFVDSAPVLDKAWAAKSGLGWIGKHSNLLSQKVGSFYFIAELIVDLELEYDYAVTDHCGNCTACIDACPTQAIVDPYIVDGSKCISYFTIELKDELPSSFKGKFDDWMFGCDVCQDVCPWNRFSKSHKEPLFNPNPSLLTNSKKDWEEITRDVFAEIFKKSAVKRTKFEGLIRNINFLNNSD

SEQ ID NO: 81833 - protein, 265 aa, Ulvibacter sp.
  REGION 1..265: note = tr|A0A5J4FSQ7|A0A5J4FSQ7_9FLAO Epoxyqueuosine reductase OS=Ulvibacter sp. KK4 OX=2494560 GN=queG PE=4; SV = 1
MHGEMGYMENHFDKRLDPTKLVEGSKSVISLLLNYYPSQFQNQDSYKISKYAYGTDYHFVIKDKLKQLLHFIEENIGKVHGRAFVDSAPVLDKAWAAKSGLGWIGKHSNLLSKQTGSFYFIAELIVDLDLEYDAPVTDHCGSCTACIDACPTQAIVEPYKVDGSKCISYFTIELKKEIPTAFKNTFDEWMFGCDICQDVCPWNRFSKSHNEPLFDPNPQLLSMDKKDWEEITKEVFNNIFKKSPVKRTKFTGLKRNIDFLKNDSF

SEQ ID NO: 81834 - protein, 307 aa, Ulvibacter sp.
  REGION 1..307: note = tr|A0A2N0ET27|A0A2N0ET27_9FLAO Epoxyqueuosine reductase OS=Ulvibacter sp. MAR_2010_11 OX=1250229 GN=queG; PE = 3 SV=1
MNSKTKHTALIKAEAKRLGFLSCGISKAEFLEEEAPRLEKWLRNGMQGEMSYMENHFDKRLDPTKLVPDSKSVISLLLNYFPSETQDEASYKISKYAYGTDYHFVIKDKLKQLLAFISEEIGDVHGRAFVDSAPVLDKAWAAKSGLGWMGKHSNLLTKQVGSFYFIAELIVDLDLEYDRPVTDHCGACTACIDACPTEAIIAPYVVDGSKCISYFTIELKNEIPSNVRGQFDDWVFGCDVCQDVCPWNRFSKSHNEPLFNPNPELLSMTKKDWEEITDEVFQKLFKNSAVQRTKFSGLQRNINFLKD

SEQ ID NO: 81835 - protein, 399 aa, Umboniibacter marinipuniceus
  REGION 1..399: note = tr|A0A3M0ABJ8|A0A3M0ABJ8_9GAMM Epoxyqueuosine reductase OS=Umboniibacter marinipuniceus OX=569599; GN = queG PE=3 SV=1
MNEIVIVYNLYAKIRKSSLLMIAAIPPLTDASVMTQTHSHSLQIAANQIKAWGAELGFNDVRITDTDLDLDAARLKAWLGKSMHMPLEWMTDHGDMRYTPNSLLAGTQRVISVRLNYLPADVDLVAPLKQENTAYISRYALGRDYHKLVRKRLAKLAAKIATAYPGSAQRALVDSAPVMEKALARKAGHGWVGKNSLIIHPEDGSYFFLGEIYTDLELPIDQPDDHDRCDDCEACLKVCPTDAFVAPYQLEVKRCISYLTIENSGPIPLEFREAIGNRVFGCDDCQIICPWNKQAATTQEEDFSPRNDLDSADLSRLFRWTEDEFLAATIGSPLRRTGYHNFLRNLAVGLGNAPSNDEHVTLLKQRLDENLSEMLNEHIQWAIERQQSQRKRRRKSRRS

SEQ ID NO: 81836 - protein, 374 aa, unidentified
  source 1..374: note = Alphaproteobacteria bacterium
  REGION 1..374: note = tr|A0A212JUK5|A0A212JUK5_9PROT Epoxyqueuosine reductase OS=uncultured Alphaproteobacteria bacterium; OX = 91750 GN=queG PE=3 SV=1
MTEAIKDTIRGWAREAGFDACGFAPAAAVPGAAEALEAFVAAGRHGGMAWMAERMAERGGLERLWPGARSAVVLGLNYGPAVGPRAALARPEAGAISVYARHRDYHDVVKAKLKQVARRIHGETGAEVKVFVDTAPVMEKPLAERAGLGWIGKHSNMVSRDFGSWLFLGVIATALEIVPDPPHANRCGLCRRCIDACPTDAFDGPQRLDARRCISYLTIEHAGPIPRDLREKIGNRIYGCDDCLAACPWNRFARLGREAKLAARDDLLAPPLAELAALDDAGFRAWFSGSPIKRIGRDRFVRNVVIAIGNAGDAGRAAAIAPLLGDGSPLVRGATIWALCRLLGEDGFLSGFSHIQKSESDETVLAEWPRGGGA

SEQ ID NO: 81837 - protein, 276 aa, Anaerotruncus sp.
  REGION 1..276: note = tr|A0A1C6KAG9|A0A1C6KAG9_9FIRM Epoxyqueuosine reductase OS=uncultured Anaerotruncus sp. OX=905011; GN = queG_2 PE=4 SV=1
MDLVEQWLRDRPGVSWGCVPVPPPAQWFACRRAGLLPSGRLWALVFCFPYAHPPAFGGNISCYAAVPDYHRVIGDQLAQLAQQLAKATGHPFVPFVDSSPLDEVALAASCGLGIVGDNGLLITRQYGSYVFIGELITSCPLPRRTAALFRAGGCLHCGACQKVCPGGAIADGAVCTDRCLSHISQKKGELTGWEQRLVAGSELLWGCDRCQLCCPMNRQASPTALPGFLKDTVATVSKEQLRPLCKTRAFGFRGPQVLERNWALQHPGPAGEVTEQ

SEQ ID NO: 81838 - protein, 220 aa, Anaerotruncus sp.
  REGION 1..220: note = tr|A0A1C6J4C7|A0A1C6J4C7_9FIRM Epoxyqueuosine reductase OS=uncultured Anaerotruncus sp. OX=905011; GN = queG_1 PE=4 SV=1
MREKIQALCRQLGLAGAEFVTVPDMPGTPYAVSIAVPLSNAIVDEIDGAPTHSYFHHYRTVNAYIDHCLLRIGLLLGQHGYRYIPIGASQSVNLPGSSYQGRYSHKKVACMAGAGYIGKSCLFIHHQYGPRVRLGTLFCDCPALDTPPRPTGESCGSCTVCQQACPALAILGKNWNEVRCREEMFDPAACSQHMKRAYQHIGRGAVCGICMRVCPKGGHH

SEQ ID NO: 81839 - protein, 167 aa, unidentified
  source 1..167: note = Unknown
  REGION 1..167: note = tr|U5S3J7|U5S3J7_9BACT Putative reductive dehalogenase subunit A (Fragment) OS=uncultured bacterium; OX = 77133 GN=rdhA PE=4 SV=1
MADVCDYDAGKALRGPLVEGTGKTSCMVSDFPAYQMECIIRSIGYDAKANAICDTATMSEPIAVRAGLGELGRSGLVISPWGGNFRLTECFTNLPLIPDKPIDFGLQEFCKVCKKCAVNCPAGAISMEDEPSEVVKSARFIGWDTDSHKCLTERIVHGCSTCQAICP

SEQ ID NO: 81840 - protein, 359 aa, unidentified
  source 1..359: note = Unknown
  REGION 1..359: note = tr|H9BWK0|H9BWK0_9BACT Iron-sulfur cluster binding protein OS=uncultured bacterium W5-102b OX=1130996 PE=4; SV = 1
MHDDAETFDASTTPTAATVATRALDLQLDAVGITRAEAYDDTEQYIVERREAGLFADLKFTMAQPDVSCHPESLVDGARSVISAALSYWHPDGDVPEAAHGTGTIARFARADPYVTLRDRLEQIADWLRTHGHECRVLVDSNDHVDRAAAIRSGVGFSGKNTMLITPRHGSWVVLGTIVTTAELEPTEPMRPGCGSCTACIDACPTDAINADGGVLDTGACIGYWTQSHHQVPDEIAQHMDDMVYGCDICQDVCPWNRGTEKRRAAEEPWQGQVDLVAWLEADRDELNEAYDRFFVPRRNVSFLRRNALIAMGNRRNERDVPIIAAQLEHSDRIVRRAARQALRLNGTTAAINVLESNS

SEQ ID NO: 81841 - protein, 233 aa, Bacteroides sp.
  REGION 1..233: note = tr|A0A1C6KXR4|A0A1C6KXR4_9BACE Epoxyqueuosine reductase OS=uncultured Bacteroides sp. OX=162156 GN=queG; PE = 4 SV=1
MKYLNQEIENELNNQGAELIRFVSISHLDEKQNRQLPNAIVFALPLTAEYAKMVFNIPDYVQVRIADNYNFDDDEYSQTEHKAGEIADELAKFITGKGYKAISQSDTGLLADGVFDYETKESVLPHKTVALLGGLGWIGKNNLLITPEYGAAQCLGTVLTDAPLETVLHEPLSPKCGNCITCVNICERKVLKGKIWSKSVSRDEIVNIHGCSTCLKCLVHCPSTQTYIKRNIV

SEQ ID NO: 81842 - protein, 304 aa, unidentified
  source 1..304: note = Bacteroidetes bacterium
  REGION 1..304: note = tr|H5SK57|H5SK57_9BACT Fe-S cluster binding protein; OS = uncultured Bacteroidetes bacterium OX=152509; GN = HGMM_F40B03C31 PE=4 SV=1
MSLALTQAVKALAKGLGFPAFGVASAHPLTDTFTPTSLAYRRYLAWIAKGKHADMTYLAEGAALRGDPAHVLPGAQALLLTLASYFHSRTHRSPIAQYAWGADYHRVLRRKLQIIADYLVRKGYAARPFVDTAPLLEKAWAVEAGLGWIGKNTLLLNRKLGSYTFIGGVITTAPLVPDDPFVGDGCGTCQRCIEACPTQALQPYELDARRCIAYWTIEAPTLEGSPPLHGWIFGCDVCQQVCPWNRFAQPQGDFVPAAYAFLPRQRWATLSKAAVRRFQRGSALRRARPEKLLAAAQTPHPIKG

SEQ ID NO: 81843 - protein, 365 aa, unidentified
  source 1..365: note = Chloroflexi bacterium
  REGION 1..365: note = tr|H5SER1|H5SER1_9CHLR Epoxyqueuosine reductase; OS = uncultured Chloroflexi bacterium OX=166587 GN=queG PE=3; SV = 1
MASLEEAIKGEARRLGFDLAGITTPDPPAHFHLFERWLEAGYHGEMGYLANERSRQRRADPRQILPECRSILVLAMRYPASHPPEPRPWAQGQIASYAWGEDYHLVLEKRLQQLADFIIAQVGHEIPYRYYTDSGPILERELAQRAGLGWIGKNSCLIHPRYGSYLLLAELLLGLELQPDEPFPSDHCGRCTRCLEACPTACILPDRTLDARRCISYLTIENKSAIPLELRTAIGNWIFGCDECQRVCPWNRFADPEGHPALAPQAPQTDQALREELKLDAVAFAERFRRRAVKRAKRRGYLRNVAVALGNCGTPEDLPALEQALQEENDPLLCEHLNWAIQQIRHRHALPGISSHEPAASTGHE

SEQ ID NO: 81844 - protein, 379 aa, Citrobacter sp.
  REGION 1..379: note = tr|A0A212IB76|A0A212IB76_9ENTR Epoxyqueuosine reductase OS=uncultured Citrobacter sp. OX=200446 GN=yjeS; PE = 3 SV=1
MSEPLDLNQLAQNIKQWGLELGFQQVGIADTDLSEAEPKLQAWLDKQYHGEMDWMARHGMMRARPHELLPGTLRVICVRMNYLPAKAAFASTLKNPSLGYVSRYALGRDYHKLLRNRLKKLGEMIQQHCVSLNFRPFVDSAPILERPLAEKAGLGWTGKHSLILNREAGSFFFLGELLIDLPLPVDQPAEEGCGKCVACMTICPTGAIVEPYTVDARRCISYLTIELEGPIPEEFRPLLGNRIYGCDDCQLICPWNRYSQLTTEDDFNPRKQLHAPELIELFSWSEAWFLKVTEGSAIRRIGHLRWLRNIAVALGNAPWNDAVILALESRRGEHPLLDEHIDWAVAQQIEKRNACVVEVQLPKKQRLVRVIEKGLPRDA

SEQ ID NO: 81845 - protein, 273 aa, unidentified
  source 1..273: note = Clostridiales bacterium
  REGION 1..273: note = tr|A0A212KI66|A0A212KI66_9FIRM Putative iron-sulfur cluster-binding protein OS=uncultured Clostridiales bacterium OX=172733 GN=KL86CLO1_13214 PE=4 SV=1
MTPADLNVRFAAVGAAAWGCVAYDALLPHMGAAAREKAGCLLPNPTTVLVAAFPYFTGETEGNLSVYARGSDYHAVLRERLNTICDFLLEEYDSYTFFSAADSSPLPEREAAWLAGLGLRGENGLLILPPYGSYVFLGTILTDAPLPFQEVASAPGCIGCGACKAACPTRALEGLGPCLSDLTQKKGELTPEETALLKTHPYVWGCDLCQTACPYNRTPRVAPLTEFTQGYLSDLTPDMLEGLTNRAFQEQFGHRAFAWRGPAVLKRNLSLKK

SEQ ID NO: 81846 - protein, 235 aa, Clostridium sp.
  REGION 1..235: note = tr|A0A1C6EQ40|A0A1C6EQ40_9CLOT Epoxyqueuosine reductase OS=uncultured Clostridium sp. OX=59620 GN=queG; PE = 4 SV=1
MDMELTEELKRILRCQGADLVGIGDMSKVENCNFKRGVAVAVALPQNVIIDLQEAPTKEYYNLYYSLNEKLNEIIMAGGEFLRNRGFEVYEQTTDRVKIDQNNISRLPHKTVATRAGLGWIGKNCLLVTPQYGAAIRISSFLTNAPLECNDPINQSRCGYCNLCVKKCPAQALKGTLWEVGIQREEIVDINKCYKKQVEIMLQKTGIETDLCGRCFAVCVYTQKYLKSIAADFKD

SEQ ID NO: 81847 - protein, 269 aa, Clostridium sp.
  REGION 1..269: note = tr|A0A1C5WFI7|A0A1C5WFI7_9CLOT Epoxyqueuosine reductase OS=uncultured Clostridium sp. OX=59620 GN=queG; PE = 4 SV=1
MKGRVAKYYLTDGRRHTDSEGYKTSVAFEKYLADCGLQVATDRDFGITALRWAGMKAGIGIIRKNNFFYTEKGSYQYLEAFLIDEPLQYIVENQIRPCAEKCNLCMRSCPTESLEAPYMMCRNTCVSCLTTWDGWDLRTEPLQNKFEKWIYGCDACQDAWPHNRKAWKDTEEFPELEAWSSHFTDTEIVLAEYSWLRSVVQPKLWYIPQGKEWRYKTNALNAMLNNYDPKYLPVIKKVCQDEYCEVRDMAEWVLEEIERKGIGESENGQ

SEQ ID NO: 81848 - protein, 311 aa, Desulfobacterium sp.
  REGION 1..311: note = tr|A0A445N2J6|A0A445N2J6_9DELT Putative iron-sulfur cluster-binding protein OS=uncultured Desulfobacterium sp.; OX = 201089 GN=PITCH_A780036 PE=4 SV=1
MISDLIEKAKGLGFISLGVSRAETPPFFDQFSKWICAGRHGEMSWLERHMEIRQHPRRLLEGCNSIISLVYPYTKIKPCTPDGFTIARYSEPKKNDYHRRLRQMCLALAESISERYPKTNSRICIDSAPLLERSFAYASGIGFIGKNNSLIIPGYGSYFFLAEILTTAPLPAYETSPMENLCGQCKSCIEACPSGALEAPFNLDAAKCLSYLTIEHKGPTDRSVAMKMGRCFIGCDICQEVCPYNHVNAQAESEEIMLPSTEEILNMDDRQFSDTFGDTALSRPGLCKIKQNILAIRSLPSRDPGQEKTIY

SEQ ID NO: 81849 - protein, 307 aa, Dysgonomonas sp.
  REGION 1..307: note = tr|A0A212J3J7|A0A212J3J7_9BACT Epoxyqueuosine reductase OS=uncultured Dysgonomonas sp. OX=206096 GN=queG; PE = 4 SV=1
MITSAQIKEYALTLGFDACGICSAEEVDLENQEGYKNWIDNSFYAGMDYMARNEDKRCNPALLVEGARSVVCVALNYYPEAKAPEENPQFAYYAYGKDYHDVVKAKLQQLFDFIKSLNPSAEGRPFVDTAPVLERYWAAKAGLGFIGKNSLLIIPKRGSYFFLGELILNLDLEYDKPLSLSCGNCTRCLDACPTKAIVAPRIVDANKCISYQTIENKGEIDEAIVPHLNNRFYGCDICQQVCPWNRYSKPHKTEEFDPSQAFLDLSFEKLDNLTVEEYQVIFKGSAVKRAKYSGLKRNLEALKRSKK

SEQ ID NO: 81850 - protein, 311 aa, Dysgonomonas sp.
  REGION 1..311: note = tr|A0A212JHI8|A0A212JHI8_9BACT Epoxyqueuosine reductase OS=uncultured Dysgonomonas sp. OX=206096 GN=queG; PE = 3 SV=1
MLANKDISLQIKDYAYSLGFDACGICKAEPIEVEEQQHFKDWISDSYHADMDYMARNTEKRCDPTLLVEGSRSVISVALNYYPETKQPQENPQFAYYAYGKDYHDVVKSKLQILLDYIKSIEPTTEGRAFVDTAPILERYWAAKAGLGFIGKNSLLIIPKKGSYFFLGELIINLELTYDTPLNLSCGNCTRCLAACPTSAIVKPRVVNARRCISYQTIENRGEIDVQVIPNMNNRFYGCDICQQVCPWNRYSRPHRTAEFNPSQSFLDLSFDRLDNLSVEDYQKIFKDSAVKRAKFTGLKRNLEALRQNLK

SEQ ID NO: 81851 - protein, 306 aa, unidentified
  source 1..306: note = Flavobacteriia bacterium
  REGION 1..306: note = tr|H6RH30|H6RH30_9BACT Epoxyqueuosine reductase; OS = uncultured Flavobacteriia bacterium OX=212695 GN=queG; PE = 3 SV=1
MLPSKKRTNLIKSAAKDLGFLSCGISKAEFLEEEAPRLEQWLQDGKHGKMAYMEKHFDKRLDPRLLVPGAKSVVSLLLNYYNDEIQKEGVPKISKYAYGADYHIVFKQKLNKLLQTIHDEVGEINGRVFVDSAPVMDKAWATRSGLGWMGKNTNLITQKVGSFFFIAELIIDLELEYDTPVTDHCGNCTACIDSCPTEALTPYNIDASKCISYLTIELKDQIPDEFQNKMDNWAFGCDVCQDVCPWNRFSKSHSEPLFDPQPQILDFTKKDWEELTEATFETIFKNSALKRTRFDGFKRNLSFLSQ

SEQ ID NO: 81852 - protein, 310 aa, unidentified
  source 1..310: note = Flavobacteriia bacterium
  REGION 1..310: note = tr|H6RGW0|H6RGW0_9BACT Epoxyqueuosine reductase; OS = uncultured Flavobacteriia bacterium OX=212695 GN=queG; PE = 3 SV=1
MTTTEKDRIASAIKSESNRLGFISCGISKAEFLEEEAERLENWLKIGMHGKMSYMERNFDKRLDPTLLVEGAKSVISLSYNYYPQTKIDDTDFKISKYAYGKDYHFVIKEKLKNLLEFIREEVGDVHGRVFVDSAPILERAWAKKSGLGWIGKNSNLVSKKIGSYFFLCEIILDLELTYDHQDFDHCGTCTACIDACPTQAIEQPRVVNGSKCISYHTIELKENIPSEFKGKFDDWIFGCDICQDVCPWNRFSKSHNEPLFNPDDNLRLMDKSDWLEMTKETFDKVFQKSPLKRTGFDGIKRNIEFLKKV

SEQ ID NO: 81853 - protein, 278 aa, Flavonifractor sp.
  REGION 1..278: note = tr|A0A1C6D1J0|A0A1C6D1J0_9FIRM Epoxyqueuosine reductase OS=uncultured Flavonifractor sp. OX=1193534; GN = queG PE=4 SV=1
MIPELNGAFAACGAAAWGGLTWADALPHLTHDAVEKTLALCPKPRAVLVAAFPYYAGDTPGNLSLYARGRDYHLVLTEKLNTVCDVLRQEYPSYSFLPGADNSPLPERQLAWACGMGLRGQNGLLILPPWGSYVFLGTILTDCPLEFSTSEPSNVCISCGKCAAACPGGALDGAGFQLSRCLSDISQKKGELSPEETALLSAQECLWGCDLCQRVCPYNVYPALSPISDFREDLISSLTSDDLEGLTNRTFREKYGDRAFAWRGPAVLRRNLALKENT

SEQ ID NO: 81854 - protein, 275 aa, Flavonifractor sp.
  REGION 1..275: note = tr|A0A1C6GIY7|A0A1C6GIY7_9FIRM Epoxyqueuosine reductase OS=uncultured Flavonifractor sp. OX=1193534; GN = queG PE=4 SV=1
MNAWFEAAGAAAWGAVGFGGLSRWMDPPARARAERLCPSPTGVFVAAFPYYAGDDPGNLSRYARGEDYHAAVVRRLEQVCARLRARWPEHIFRPSADSSPIPERAAALCAGLGVLGDNGLVLLDKWGSWIFLGTILTNLTGYPWPEPVPLRRCVHCGACAAACPGGALEADGVRTDRCLSHLTQKTGELTPEEAALLSAHPLIWGCDVCQQVCPYNRAAPVTPLPEFRDDLVPALTLPDVAGQTRRQFLERYPGRAFTWRGPGPLQRNLELKDGE

SEQ ID NO: 81855 - protein, 360 aa, unidentified
  source 1..360: note = Gammaproteobacteria bacterium
  REGION 1..360: note = tr|H5SD92|H5SD92_9GAMM Epoxyqueuosine reductase; OS = uncultured Gammaproteobacteria bacterium OX=86473; GN = queG PE=3 SV=1
MNAPWTALKQQIQTWGKALSFDAIGIASIDLNAASARFKRFLAAGWHGQMDYLAKHGEKRFRPELLVPGTVSVICARLNYLPEPLQAMRQALGDPNRAYLSRYALGRDYHKLIKRRLLVLARKLEERIGPFGYRVFCDSAPVLEKPLAQQAGLGFYGKHTNLIALKQGSFFFLGEIYTDLPLPPDPPLPKSYCGSCRACLEVCPTQAIVAPYQLDARRCISYLTIELHGPIPEELRPKIGNRVFGCDDCQLVCPWNRKAQLTRERDFLPRHGLEKASLVELFAWSEAEFLAKTEGSAIRRLGYERWLRNLAVGLGNAPPSLKVLSALKARLNHPSALVREHVSWALAKHTAQLKTSATAT

SEQ ID NO: 81856 - protein, 363 aa, unidentified
  source 1..363: note = Unknown
  REGION 1..363: note = tr|Q6SGT1|Q6SGT1_9BACT Epoxyqueuosine reductase; OS = uncultured marine bacterium 463 OX=257394 GN=queG PE=3; SV = 1
MSSQGGSQITLPEPEALLAKIRLWADELGFQQLGVSDVDLGEHESYLQKWLDAGYHGSMEYMARHGNKRSRPAELVPDTCRVISLRMDYLADHSAMEVLASSEKAYISRYTLGRDYHKLIRKRLAQLAARIEKEITGGQFRAFVDSAPVLERAIAEQAGLGWIAKNTMLINPDAGSWFFLGEIYTDLPLPETRSQESKHCGTCTACLDLCPTDAFVGPFELDARRCISYLTIEHHGSIDPELRPLMGNRVFGCDDCQLVCPWTKFAQETGESDFKARHGLADAELVDLFLWDKETYLSRTEGSAIRRIGHERWLRNLAVGLGNGPASNEAIAALRSRSEFPSELVREHVEWALGQLEGKSAGV

SEQ ID NO: 81857 - protein, 349 aa, unidentified
  source 1..349: note = Unknown
  REGION 1..349: note = tr|A9QPB0|A9QPB0_9BACT Epoxyqueuosine reductase; OS = uncultured marine bacterium EB000_55B11 OX=480665; GN = queG PE=3 SV=1
MNENLKNLLLEQSHEIGFSMVRICAPSDIPSAASKLDSFLKKNHHGSMNWMAERIEWRGNPASLWPDAKSIIMLADNYSPNHDPLHILAHRNRGAISVYAQNKDYHEVVKKKLKKLGRWLIQQENSTQIKVFVDTAPVMEKPLGAAAGLGWQGKHTNLVSRDLGSWFFLGAIFTTLELPKDTGEEDHCGSCSACLDICPTSAFPAPYELDARKCISYLTIEHAGPVELSLRDQLGNRIYGCDDCLAVCPWNKFAKEANEIGYHARTELKAPKLSELVTLDDNSFRKLFSKSPIKRIGRNRFVRNVLYAIGNSGNVELIDSAKKLQLDLDPVVKDAADWAIAKLKGSTNG

SEQ ID NO: 81858 - protein, 306 aa, Megasphaera sp.
  REGION 1..306: note = tr|A0A1C5NNB2|A0A1C5NNB2_9FIRM Epoxyqueuosine reductase OS=uncultured Megasphaera sp. OX=165188; GN = queG_2 PE=4 SV=1
MIDSTDMKRFAAALGLDCAGVAPADLPRPPYAEEPPCPLAAGVGDERYEPRRILPSCRSVIVVLVPYYTAQTEQANLSLYCRSADYHAVVRAYLEQIAAYLQRQYPGSEQRCVVDTSPLSDRWLAYQAGLGFFGDNRCLINDTYGSYVFIGSVLTSLPFAPDQPLQQECSHCGACQSACPGQCFSGGAYDYSRCKSYITQKKGSFMLPEIQCMEKTPLIFGCDVCQESCPHNAGAKATPLPEFYRSRLSQLCPSDIESLSNKQFQQAFGDRAFAWRGKKVLLRNLEYAANPAAASAENRNDGKDDV

SEQ ID NO: 81859 - protein, 322 aa, Megasphaera sp.
  REGION 1..322: note = tr|A0A1C5MUT3|A0A1C5MUT3_9FIRM Epoxyqueuosine reductase OS=uncultured Megasphaera sp. OX=165188; GN = queG_1 PE=4 SV=1
MSRSSLAQAIYETALSCGFDNCGIIPISALDGYKQRLQEREEAVPQSRPVYQDIEHLAAVRELYPWAKSVVVCITWLGAYRYPLSLQGLYGKAFLLSPDTVPDCEAHRQKLRFEAWLAEQGLRFEGGETNAPARIIPLRYAAVAAGLGIFRKNNFFYGEKGSYYELEGYLIDQLCEYTHECRLRPCADSCTLCQKACRTKALSAPYTMNPLSCTSFWTTFGQGAVPPHRTADQFTTWLCGCDACQDACPYNRHDWSQGKEFPGLQELEPLLQPENIVAASDTVLRRYVIPKTDLHVSPDQVQTLKTSASRVLEYLAKGVMQQ

SEQ ID NO: 81860 - protein, 348 aa, unidentified
  source 1..348: note = Unknown
  REGION 1..348: note = tr|E7C7P4|E7C7P4_9BACT Uncharacterized Fe-S protein; OS = uncultured nuHF1 cluster bacterium HF0770_35I22; OX = 723586 PE=4 SV=1
MTSCETKKQIKILALEEGFDSVAITSASANPKDFQSLEKFLRLKYHGEMSWLEKNRVKRGNPKKLMPNVNSIITLGKNYSPQVNPLNYKNDPVCGKISCYAQTMKDYHKVIKKALKRICQRIAFEYESEIKLFVDTAPIMEKPLAARAGLGWQGKHTNLVSRSFGSWLFLGEIFTSLKLEPDLPEADHCGSCSACLQACPTGAFPKPYQLDSNKCISYLTIEHSGLIDGKLMELMGNHIYGCDDCLAVCPWNKFSSPTADPNFQPRPELVKPKLKDLVKLTDKEFRSLFSGSAIKRTGRDRFIRNVLIAIGNSRDQSFFTVLRKLKDDPSPLVAKTAEWALLKLKNRS

SEQ ID NO: 81861 - protein, 338 aa, Pleomorphomonas sp.
  REGION 1..338: note = tr|A0A212LJN6|A0A212LJN6_9RHIZ Epoxyqueuosine reductase OS=uncultured Pleomorphomonas sp. OX=442121; GN = queG PE=3 SV=1
MNWRARARDLGFSAIGVAPVDRLGEAARRLRAFVDLGRHGSMAWMEETLERRADPRVLWPEARSAVVLAMNYGPDSDPLANLARPAVGNISVYARHRDYHDVLKGRLKEVAGLIARDTGADVKVFVDTAPLMEKPLAALAGVGWQGKHTNLVSRDFGSWLLLGVILSAADLPPDEPATDRCGACRRCLDACPTGALPAPYQIDARLCISYLTIEHAGPIPEDLRPLIGNRIYGCDDCLAVCPWNKFASEAAEMKLRPRPELTAPSLTALAALDDAAFRALFSGSPVKRIGRNRFVRNVAIAIGNSGDPALAPALTPLLDDPDPVVAEAARWAIDRLPP

SEQ ID NO: 81862 - protein, 306 aa, Ruminococcus sp.; identical to SEQ ID NO: 81858
  REGION 1..306: note = tr|A0A1C5ZVD2|A0A1C5ZVD2_9FIRM Epoxyqueuosine reductase OS=uncultured Ruminococcus sp. OX=165186; GN = queG_1 PE=4 SV=1

SEQ ID NO: 81863 - protein, 279 aa, Ruminococcus sp.
  REGION 1..279: note = tr|A0A1C6BRZ0|A0A1C6BRZ0_9FIRM Epoxyqueuosine reductase OS=uncultured Ruminococcus sp. OX=165186 GN=queG; PE = 4 SV=1
MKPQDEFGSSFETAKELPETSWKRKAIQAASSQAEPIRKSGGFQGSALPTPVELREKLEAFLLSLGVSDVGFSKPEAEGLEKTPYAVTLVVRLSNAIVDEIEGEPTLTYFSHYRAVNAFLDQCLLKAGLFLDRAGYQYITVAASQSMNQKGWNYQGRFSHKQAACAAGLGVIGKSSLFLHHRFGPRVRLATLFTDCPFPVENALPASLCGSCRKCVDSCPSGAILGPEWVPGMPRKLLFDPEKCSQHMKRQYQHIGRGAVCGICMRVCPRYERSVIRWE

SEQ ID NO: 81864 - protein, 354 aa, Sphingopyxis sp.
  REGION 1..354: note = tr|A0A1Y5Q5F2|A0A1Y5Q5F2_9SPHN Epoxyqueuosine reductase OS=uncultured Sphingopyxis sp. OX=310581 GN=queG; PE = 3 SV=1
MVAEALPPPDDRLEDRLEAVARAHGFAAFGIARADAAPETAERLNQWLAEGRHGDMIWMESRAEQRGSPQGLWPEVRSVIALGMSYAPALDPLALAAHRTRGRISVYAQGGDYHDVVKKALKGVARWLIGEAEDAEVKVFVDTAPVMEKPLSAAAGLGWQGKHTNLVSREHGSWLFLGAIYTTLDLTPSKAGRDTCGSCAACQDACPTDAFPAPYRLDARRCISYLTIEHNGPIPVALRRGIGNRIYGCDDCLAVCPWNKFADTAHRHRAFLPRAELAAPSLGDLLDLDDAAFREVFAGSPIKRIGRGRMVRNAAIAAGNSGDRGFVPVLERLAKDESPMVADAALWALDELAS

SEQ ID NO: 81865 - protein, 380 aa, unidentified
  source 1..380: note = Unknown
  REGION 1..380: note = tr|A0A3P3XUZ7|A0A3P3XUZ7_9SPIR Putative Iron-sulfur protein OS=uncultured spirochete OX=156406; GN = SPIRO4BDMA_80066 PE=4 SV=1
MTVEEVQGGPPVKLQGEAGARAARWLLFHVQEQGFFSYAILGKEEWETVLLERGFAEEEGILETARSDAAGAMLVVALRYAPDVEPEPAAGRAARGLPPLPLPGAGKPVAKVGRFARGNWYREVIDRLATSAKATATDMVAVGLPFFPPKRWHRFANSRFPEKALAVAAGLGATGRNGLVIAEASETGGQARGSAAGGGLPSGGVIRAYFHSSARSSAVLLGLMLLPFDLEQAIIPPRHSPQAMLSLCGNCRRCVDACPSRALHFAPEPASWRASGRVFDRHRCIQHYASISGPLPDFIEASWQNQLYGCDLCLEACPYFRPDPDAHVSSGHIGGLFDAKVIAGMEDTQLRALFRGSALDQRWIEPEALRRDATLAVKNC

SEQ ID NO: 81866 - protein, 393 aa, unidentified
  source 1..393: note = Unknown
  REGION 1..393: note = tr|A0A3P3XJN5|A0A3P3XJN5_9SPIR 4Fe-4S ferredoxin-type domain-containing protein OS=uncultured spirochete OX=156406 GN=SPIROBIBN47_30012 PE=4 SV=1
MVLEGGVGRWYAEALLRSAASQHFFSFAILRKEEWVRVFRVQGVAEEEGGAHVDEGAPESGAQKSQNAPDSGSASQNSENLWARYQLDSAGAMLVVALRYAPDVEPESDEERAVRGLPPLPIAKEGRPAAAVGRFARANWYRETIARLADCVKSISDEARARGLPVFAPREWHRFSNSRFPEKALAVAAGLGTIGRNGLLIAQRTGNAEASDSGCAETSSWPLWSSAVVLGLMLLPFDIGKEAGTLHDEPIMPLALCGTCQRCIDACPTGALALAELPRYERARCIQNYTSGAGPLPEDIEAAWGNQLYGCDICLEACPYFKPNSEACTALGRIGGAFDAAFIAAMSEAELRAVFKGSALDQKWIAPEALRRNVAIVASLFIGKSSDVPSRLL

SEQ ID NO: 81867 - protein, 363 aa, Stenotrophomonas sp.
  REGION 1..363: note = tr|A0A1Y5Q6H2|A0A1Y5Q6H2_9GAMM Epoxyqueuosine reductase OS=uncultured Stenotrophomonas sp. OX=165438; GN = yjeS PE=3 SV=1
MLEAVSAADMAQLSLRIRQLAREAGFQRCGISNIELHEDEAHLADWLGKGLYGTMEWMARHGAMRARPHELLPGTVRVISVGLDYGPKEDAEAWATLNDAERAYVARYALGRDYHKLMRNRLQKLAERVAAEVGPFGHRVFVDSAPVLERALARNAGLGWIGKHTCLIDKDGGSWFFLGEIYVDLPLPVDAPATAHCGTCTRCIEVCPTAAIIAPYRLDARRCISYLTIEHDGAIPLEMRPLMGNRIYGCDDCQLVCPWNKFARRTDEPDFRARNNLDTATLPELFAWEEDEFLRRTEGSPLRRSGHERWLRNIAVALGNAAPSPAAREALESRIGHPSELVREHVAWGLEQHGGKPGIGNGE

SEQ ID NO: 81868 - protein, 376 aa, Thiohalocapsa sp.; identical to SEQ ID NO: 75698
  REGION 1..376: note = tr|V4J8F7|V4J8F7_9GAMM Epoxyqueuosine reductase; OS = uncultured Thiohalocapsa sp. PB-PSB1 OX=1385625 GN=queG; PE = 3 SV=1

SEQ ID NO: 81869 - protein, 357 aa, Undibacterium parvum
  REGION 1..357: note = tr|A0A3Q9BNV5|A0A3Q9BNV5_9BURK Epoxyqueuosine reductase OS=Undibacterium parvum OX=401471 GN=queG PE=3; SV = 1
MTDFVQLAQELKLKGNELGFADLRITDVDLAHVEPGFQAWLEAGYHGEMAYMAAHGSKRWRPDELVPGTIRVISARMNYLPGSADADWRSAEQNRAADAAVISVYARGRDYHKVLRAKLQLLAEYIQERIGEFGYRVFTDSAPVMEVALAEKSGLGWKGKHTLLLNRDAGSMFFLGEILVDIPLPIDAPISNHCGQCSACIQVCPTQAILAPYQLDARRCISYLTIELQGAIPLELRSLIGNRVYGCDDCQLFCPWNKFAQRASLNDFEVRNGLDNASMISLFAWTEAEFMRKLEGSPIRRIGHERWLRNLAVGLGNAATSLPADPDILRALHSRKDHPSELVREHVEWALQQHEMN

SEQ ID NO: 81870 - protein, 360 aa, Undibacterium pigrum
  REGION 1..360: note = tr|A0A318J8Y7|A0A318J8Y7_9BURK Epoxyqueuosine reductase OS=Undibacterium pigrum OX=401470 GN=queG PE=3; SV = 1
MSLDSTALADLAVQIRLWGKELGFAELRIGDVDLSHIEGSFQAWLDAGYHGEMAYMASHGSKRTRPAELVPGTVRVISARMNYLPKTESWRAEEQGQAADKAVISLYARGRDYHKVLRTRLQQLAERIEKAIGPFGYRVFTDSAPVMEVALAAKAGLGWRGKHSLLLSREAGSMFFLGEILIDIPLPVDEPVGQHCGQCSACMDVCPTKAIVAPYTVDARLCVSYLTIELHGSIPVELRPLIGNRVYGCDDCQLVCPWNKFAQAAAVDDFSVRNGLDNARMVHLFAWTEEQFLRMLEGSPIRRIGHERWLRNIAVGLGNAATAMRGDAEIVAALQSRLAHPSEMVREHVVWALGQHGVAV

SEQ ID NO: 81871 - protein, 359 aa, Undibacterium sp.
  REGION 1..359: note = tr|A0A431TAT6|A0A431TAT6_9BURK Epoxyqueuosine reductase OS=Undibacterium sp. S11R28 OX=2495591 GN=queG; PE = 3 SV=1
MSDYLQLAQEIKQWGRDAGFADVRITDVDLSHVEAGFQAWLDAGYHGEMAYMAAHGSKRSRPDELVPGTIRVISARMNYLPESDDADWRTKERQHAADTAVISVYARGRDYHKVIRNRLQQLAERIQERIGEFGYRVFTDSAPVMEVALAEKSGMGWRGKHTLLLNRDAGSMFFLGEILVDIPLPVDQAISNHCGQCRSCIDVCPTQAILAPYQLDARRCISYLTIELHGSIPVELRPLIGNRVYGCDDCQLYCPWNKFAQRASVNDFEVRNGLDSASMSSLFAWSEAEFMRKLEGSPIRRIGHERWLRNLAVGMGNAATAAKGMLGDAMILAALQSRLEHPSEIVREHVVWALAQHQA

SEQ ID NO: 81872 - protein, 308 aa, unidentified
  source 1..308: note = Unknown
  REGION 1..308: note = tr|A6EPZ9|A6EPZ9_9BACT Epoxyqueuosine reductase; OS = unidentified eubacterium SCB49 OX=50743 GN=queG PE=3; SV = 1
MLQKSKHTSLIKTEAKRLGFLSCGISKAGFLEEEAPRLEKWLTKNMHGEMSYMENHFDKRLDPTKLVEGSKSVISLLLNYYPDQQQNEDAFKISKYAYGTDYHFVIKDKLKELLHTITTEIGAVHGRAFVDSAPVLDKAWAAKSGLGWIGKHSNLLTKQTGSFYFIAELIVDLDLEYDTPVTDHCGSCTACIDACPTQAIVDPYVVDGSKCISYATIELKNEIPAHFSNKMDDWMFGCDVCQDVCPWNRFSKSHKEPLFNPNPKLLSMDKKDWEEITQAVFSEIFKKSPVKRTKFTGLKRNIDFLKKG

SEQ ID NO: 81873 - protein, 378 aa, Ureibacillus terrenus
  REGION 1..378: note = tr|A0A540V203|A0A540V203_9BACL Epoxyqueuosine reductase OS=Ureibacillus terrenus OX=118246 GN=queG PE=3; SV = 1
MKIEQLKNELKEYAKSIGVDKIGFTSASPFDEMKNRLKRQQELNFQSGFEEKDIEKRTNPKGLLPEGESIIAIALAYPSKMKDPPSGKKGERRGIFARASWGLDYHAAVRERLDLIEKWLRERVPDVVVKSMVDTGELVDRAVAERAGIGWSGKNCSIITPEFGSYVYLGEMITNIPFPPDQPIENACGDCRLCLDACPTGALVDAGQLNAKRCIAYLTQTKEFLPDEFRTKIGNRLYGCDTCQIVCPKNKGKTNWIHGEFMPDPELAKPLLEPLLKLSNKEFKRKFGSMAGTWRGKKPIQRNAILALAHFKEQSAVPILIELLKEDERPVIRGTCAWALGKIGGGKAKEALHEALHHEKDEEVIREIQKGLALLEES

SEQ ID NO: 81874 - protein, 377 aa, Ureibacillus thermophilus
  REGION 1..377: note = tr|A0A4P6UU29|A0A4P6UU29_9BACL tRNA epoxyqueuosine(34) reductase QueG OS=Ureibacillus thermophilus OX=367743 GN=queG PE=4 SV=1
MLEQLKQDLIEYAKSIGVDKIRFTTASPFIEMKNRLKRQQELNYQSGFEEEDIEKRTEPKQLLPEGESIIAIALAYPSKMKNPPTGKRGERRGIFARASWGLDYHVAVRERLDLIENWLRERVSNLSVKSMVDTGELVDRAVAERAGIGWSGKNCSIITPEFGSYVYLGEMITNIPFPPDEPIENECGDCRLCLDACPTGALVDAGRLNAKRCIAFLTQTKDFLPDEFRGKIGNRIYGCDTCQTVCPKNKGKANWIHDEFMPDPELAKPLLTPLLKLSNKEFKKKFGTMAGSWRGKKPIQRNAILALAHFKEQSAVPDLIELLKEDERPVIRGTSAWALGVIGGEKAKEALLEALHYEKDEDVIIEIKKGLELLGKA

SEQ ID NO: 81875 - protein, 382 aa, Vagococcus acidifermentans
  REGION 1..382: note = tr|A0A430ASW6|A0A430ASW6_9ENTE tRNA epoxyqueuosine(34) reductase QueG OS=Vagococcus acidifermentans OX=564710 GN=CBF27_08540 PE=4 SV=1
MFTQLKEKIIAESKKLGIDKIGFASADSFEALKDSLVEQKKSGHTSGFEHPVIDERIYPDKIFDQPRSIIAIALAYPTRLPQPPQKIRGEKRGRFARASWGIDYHDILNERMARLIDFIKRESPETDGLTFKPMVDTGELIDVAVAQRAGLGFIGKNGLLITEEFGSYVYLGEIITNIPFEPDTPITSQCGSCTKCIDLCPTSCLLGDGRMNAQRCLSYQTQTKGMMPKEFRPKIRTIIYGCDICQEVCPYNKGKNFHFHREMTPEPDVVFPLLKPLLTISNKEFKQTYGHLAGSWRGKKPIQRNAIIALANARDTTAVPQLLKLIEDDPRPVIRGTAVWAVGELTRSANQHLLDFLIDRQSKETAEEVLQELTEVIAKLTE

SEQ ID NO: 81876 - protein, 382 aa, Vagococcus carniphilus
  REGION 1..382: note = tr|A0A430B9L3|A0A430B9L3_9ENTE tRNA epoxyqueuosine(34) reductase QueG OS=Vagococcus carniphilus OX=218144 GN=CBF28_01705 PE=4 SV=1
MYHTLKKEIIKASQEIGIDKIGFTTAEPFDHLKESLYEQKENLHTTGFEHPNIEERIYPDLIFQEPKSIISIALAYPSRLSQRPEKIRGEKRGKFAKASWGIDYHDILRDRMDKLIDFIKEATDNNPDISFKPMVDTGELIDVAVAQRAGIGFIGKNGLLITEEFGSYVYLGEIVTNIPFEADNPKVNQCGECTKCVDYCPTSALLGDGRMNGKRCLSYQTQTKGMMPEEFRPKIRTVIYGCDICQEVCPFNQGQNNHFHQEMEIDPEIIQPLLKPMLTISNKEFKQTFGILAGSWRGKKPLQRNAIIALANARDKTAVPNLLRCLEEDPRPVIRGTAAWALSILAKGNEAVLSFLEESLVKETDEEATTEIEKAITSLKKG

SEQ ID NO: 81877 - protein, 388 aa, Vagococcus elongatus
  REGION 1..388: note = tr|A0A430B4J1|A0A430B4J1_9ENTE tRNA epoxyqueuosine(34) reductase QueG OS=Vagococcus elongatus; OX = 180344 GN=CBF29_02480 PE=4 SV=1
MNQALKEKIIAESKKIGIDKIGFTDGAPFSHLEESLREQKDAGHTTGFEHPDFEERIYPQKIFEDPRSIIAIALAYPTKMTQKAEMIRGERRGSFARASWGTDYHIILRERMNRLISFIEKEVPHELGPKFKPIVDTGELIDVAVAQRAGLGFIGKNGLLITEEFGSYVYLGEIITNIPFEKDVPMESQCGECTKCIDLCPTSALLGDGRMNGQRCLSYQTQTRGMMPEEYREKIRTVIYGCDICQQVCPFNQGKDTHYHKEMEPEPEIVTPLLRPLLTISNKEFKDKFGHLAGSWRGKKPIQRNAIIALGNARQKNALPDLLMVAEKDPRADIRATAFWSIGKIMGSRLDESMKASLVRLSAHEKDEVVRSEIKKILASFSEQEENN

SEQ ID NO: 81878 - protein, 389 aa, unidentified
  source 1..389: note = Vagococcus entomophilus
  REGION 1..389: note = tr|A0A430AIA0|A0A430AIA0_9ENTE tRNA epoxyqueuosine(34) reductase QueG OS=Vagococcus entomophilus OX=1160095 GN=CBF30_00285 PE=4 SV=1
MYAELKQQIIKKSQEIGIDKIGFTTAAPFKHLEASLTEQKEQGHTTGFEHPNIQERIYPDKIFDQPRSIISIALAYPTKLASQPKRIKGEKRGSFARVSWGTDYHDILRERLDTLKNFITDISQQEVDFKPMVDTGELIDVAVAQRAGVGFIGKNGLLITEEFGSYVYLGEMITNIPFEPDQPIENKCGSCTRCIDLCPTQALLGDGRMNGKKCLSYQTQTKELMPKEYRKKIRTIIYGCDICQEVCPFNKGKDFHFHPEMEPDPEIVKPLLKPLLTISNKEFKQTYGHLSGSWRGKKPIQRNAILALGNSRDKSAIPNLLKCLAEDVRPVIRGSAAWAIGEIVNGNNEELILFFKKQLAQEKEEEVRLEIQAVLQNWQKEREKNDEIE

SEQ ID NO: 81879 - protein, 382 aa, Vagococcus fessus
  REGION 1..382: note = tr|A0A430A5I3|A0A430A5I3_9ENTE tRNA epoxyqueuosine(34) reductase QueG OS=Vagococcus fessus; OX = 120370 GN=CBF31_09940 PE=4 SV=1
MYTQLKNDIIQASKDIGIDKIGFASAEPFTHLKESLEEQKAAGHTTGFEHPNIEERLNPDLIFDKPRSIISIALAYPTKLTKKPTSVLGERRGSFARASWGMDYHDILKDRLTKLIQTIQEKAEDTDEITFKPMVDTGELIDVAVAQRAGLGFIGKNGLLITEEFGSYVYLGEIITNIPFEPDTPIESKCGDCTKCIDLCPTTALLGDGRMNGKKCLSYQTQTKDMMPLEYRSKIRTIIYGCDICQQVCPYNKGKDFHLHDEMEPDPDVVNPLLVPLLTISNREFKETYGPLAGSWRGKKPIQRNAIIALANARQKSALPHLLELIEKDPRPVIRGTAVWAAGELAPKDPSELIAFLTRLQENETEQEVLTELNDVLEKLNK

SEQ ID NO: 81880 - protein, 381 aa, Vagococcus fluvialis
  REGION 1..381: note = tr|A0A369AUK7|A0A369AUK7_9ENTE Epoxyqueuosine reductase OS=Vagococcus fluvialis OX=2738 GN=CBF32_08840; PE = 4 SV=1
MYETLKQQIITASKDIGIDKIGFTTAEPFDHLKESLLEQKENNHTTGFEHQNIDERLYPELIFDKPKSIISIALAYPSRMNTRPEKIRGEKRGKFARASWGVDYHNILKDRMEKLIEAIKELSLDNPDLTFKPMVDTGELIDVVVAQRAGLGFIGKNGLLITEEFGSYVYLGEIITNIPFEADTPIENQCGTCTKCIDQCPTSALLGDGRMNGQLCLSYQTQTKGMMPEEFRPKIRTIIYGCDICQEVCPFNKGKNSHFHEEMEPDPEVVQPLLKPLLTISNKEFKEKFGYLAGSWRGKKPIQRNAIIALANARDKTSVPNILRCLDEDPRPVIRGTAAWALGILGKGNEEVLLFLEEHLEKESDEEVITELEKSIINIKE

SEQ ID NO: 81881 - protein, 382 aa, Vagococcus fluvialis
  REGION 1..382: note = tr|A0A1X6WMK0|A0A1X6WMK0_9ENTE Epoxyqueuosine (OQ) reductase QueG OS=Vagococcus fluvialis bH819 OX=1255619; GN = FM121_05090 PE=4 SV=1
MYENLKEQIIAGSKKIGIDKIGFTSADPFDHLKPSLVEQKENNHTTGFEHPNIDERVYPELIFDQPKSIISIALAYPSRMTSRPEKIRGEKRGKFARASWGTDYHDVLKDRMAKLINYIQDISIDHPEITFKPMVDTGELIDVAVAQRAGLGFIGKNGLLITEEFGSYVYLGEIITNIPFEPDNPKENQCGSCTKCIDYCPTSALLGDGRMNATRCLSYQTQTKGMMPEEFRPKIRTIIYGCDICQEVCPFNKGKDSHYHKEMEPDPEIVQPLLKPLLTISNKEFKTKFGILAGSWRGKKPIQRNAIIALANSRDKTAVPNLLRCIEEDPRPVIRGTAAWALGILGTGNEEIKHFLIEFLDKEDDEESKKEFINAIKLLDNQ

SEQ ID NO: 81882 - protein, 387 aa, Vagococcus lutrae
  REGION 1..387: note = tr|A0A429ZED6|A0A429ZED6_9ENTE Epoxyqueuosine reductase OS=Vagococcus lutrae OX=81947 GN=queG PE=3 SV=1
MTATLKKQIIAESKKIGIDKIGFTDASPFAHLEESLHEQKAAGHTTGFEHPVIEERLYPDKIFDKPASIISIALAYPTKIKEKAPRVRGERRGSFARASWGTDYHDILRDRMAKLIAFIEEVAPNSAELSFKPMVDTGELIDVAVAQRAGLGFIGKNGLLITEEFGSYVYLGEIITNIPFEPDTPIENQCGSCTKCIDFCPTSALLGDGRMNGQRCLSYQTQTRGMMPEEYREKIRTVIYGCDICQQVCPFNKGKDFHFHEEMEPDPEVVTPLLTPLLTISNREFKEQFGYLAGSWRGKKPIQRNAIIALGNAKQTSALPNLLACAEEDPRPEIRGTAYWSIGKIGSPSNDALVSFLLERFEKEENEEARLEITKVLNNWKIDDKKR

SEQ ID NO: 81883 - protein, 387 aa, Vagococcus lutrae
  REGION 1..387: note = tr|V6Q291|V6Q291_9ENTE Epoxyqueuosine reductase; OS = Vagococcus lutrae LBD1 OX=1408226 GN=queG PE=3 SV=1
MTATLKKQIIAESKKIGIDKIGFTDASPFAHLEESLHEQKAAGHTTGFEHPVIEERLYPDKIFDKPTSIISIALAYPTKIKEKAPRVRGERRGSFARASWGTDYHDILRDRMAKLIAFIEEVAPNSAKLSFKPMVDTGELIDVAVAQRAGLGFIGKNGLLITEEFGSYVYLGEIITNIPFEPDTPIENQCGSCTKCIDFCPTSALLGDGRMNGQRCLSYQTQTRGMMPEEYREKIRTVIYGCDICQQVCPFNKGKDFHFHEEMEPDPEVVTPLLTPLLTISNREFKEQFGYLAGSWRGKKPIQRNAIIALGNAKQTSALPNLLACAEEDPRPEIRGTAYWSIGKIGSPSNDALVSFLLERFEKEENEEARIEITKVLNNWKIDDKKR

SEQ ID NO: 81884 - protein, 382 aa, unidentified
  source 1..382: note = Vagococcus martis
  REGION 1..382: note = tr|A0A1V4DFS1|A0A1V4DFS1_9ENTE Epoxyqueuosine reductase OS=Vagococcus martis OX=1768210 GN=queG PE=3 SV=1
MDTELLKQKIIEASKDIGIDKIGFTTAEPFDHLKTSLIEQKENNHTTGFEHGNIDERLYPDLIFNQPQSIISIALAYPTRMNERLKSVRGEKRGKFARASWGTDYHHILKDRLDKLITFIKEQAPKELELDFKPMVDTGELIDVVVAQRAGLGFIGKNGLLITEEFGSYVYLGEIITNIPFEPDTPMENQCGECTKCIDQCPTSALLGDGRMNAQKCLSYQTQTKGFMPEEYRPKIRSIIYGCDICQEVCPFNKGKNFHFHEEMEPDPEIVTPLLKPLLTISNREFKERFGYLAGSWRGKKPIQRNAIIALGNVRDKTSIPHLLSCIEQDPRPVIRGTAAWSLSKIDPTNPAIYDFLVEYLEKETDEEAKEEMRNAIDRMRI

SEQ ID NO: 81885 - protein, 391 aa, Vagococcus penaei
  REGION 1..391: note = tr|A0A1Q2D738|A0A1Q2D738_9ENTE Epoxyqueuosine reductase OS=Vagococcus penaei OX=633807 GN=queG PE=3 SV=1
MYHVLKEKIIAASQDIGIDKIGFTTADPFDHLKDSLEEQKANGHTTGFEHPIIDERLYPELIFDQPQSIISIALAYPTRAKNRPQAIRGEKRGRFARASWGTDYHHILRDRLDKLMAFIREACDNDESITFKPMVDTGELIDVAVAQRAGLGFIGKNGLLITEEFGSYVYLGEIITNIPFEPDTPIANQCGDCTKCIDFCPTSALLGDGRMNATKCLSYQTQTKGFMPKEYRPKIRTIIYGCDICQEVCPFNKGKDFHFHPEMEPDPDITQPLLKPLLTISNKEFKQRFGTLAGSWRGKKPIQRNAIIALANARDKTCLPNLLQCIEQDPRPVIRGTAAWALSQIAPTNQEVKNFLEDYLAKETDDDAQIEFLDAIAHMNEQIILTKQNKS

SEQ ID NO: 81886 - protein, 385 aa, Vagococcus salmoninarum
  REGION 1..385: note = tr|A0A429ZTN1|A0A429ZTN1_9ENTE Epoxyqueuosine reductase OS=Vagococcus salmoninarum OX=2739 GN=queG PE=3; SV = 1
MYQELKQKIINASQDLGIDKIGFTDATPFDHLKASLIEQKAAGHTTGFEHQEIDERLYPELIFDQPQSIISIALAYPTKMKTKAPSIKGERRGSFARASWGIDYHDILKERLEKLMAFIQEACENDESIRFKPMVDTGELIDVAVAQRAGLGFIGKNGLLITEEFGSYVYLGEVITNIPFEPDTPIENQCGSCTKCIDLCPTEALLGDGRMNGQKCLSYQTQTKGYMPTEYRPKIRTIIYGCDICQQVCPFNKGKDSHFHPEMEPEPEVVTPLLKPLLTISNREFKETFGPLAGSWRGKKPIQRNAIIALANAKEKSAIPNLLALVENDPRPVIRGTAIWAISILATPGNIGIIDFISEQLTTETDPETIVEIEEALLRLKIQER

SEQ ID NO: 81887 - protein, 387 aa, Vagococcus sp.
  REGION 1..387: note = tr|A0A4S3B5Q3|A0A4S3B5Q3_9ENTE tRNA epoxyqueuosine(34) reductase QueG OS=Vagococcus sp. 2B-2; OX = 2508885 GN=queG PE=4 SV=1
MNSILKDKIIHASQDLGIDKIGFTTAAPFDHLKQSLEEQKVNEHTTGFEHPIIDERLYPDQIFNQPQSIISIALAYPSRIKTRPKSIRGEKRGKFARASWGTDYHHILEDRLQKLITFIKEEADQDQTLTFKPMVDTGELIDVAVAQRAGLGFIGKNGLLITEEFGSYVYLGEIITNIPFEPDTPIENKCGECTKCIDLCPTSALLGDGRMNARRCLSYQTQTKGYMPEEFRPKIRTIIYGCDICQEVCPYNKGKDSHFHEEMEPDPEVVMPLLKPLLTISNKEFKTKFGYLAGSWRGKKPIQRNAIIALANARDKTSIPNLLRCIEEDPRPMIRGTSAWALSMIDPNNEEILAFLKSVLTQETDEETQHELLTAIQKMEKTIKGES

SEQ ID NO: 81888 - protein, 390 aa, Vagococcus sp.
  REGION 1..390: note = tr|A0A429ZV74|A0A429ZV74_9ENTE Epoxyqueuosine reductase OS=Vagococcus sp. SS1995 OX=1977869 GN=queG PE=3; SV = 1
MYQTLKQQIIEASKDIGIDKIGFTTADPFDHLKASLEEQKAKGHTTGFEHPMIDERLYPELIFDQPKSIISIALAYPTRAKQRPKSIRGEKRGRFARASWGIDYHHILRDRLNKLIDFINTTCETDASFTFKPMVDTGELIDVAVAQRAGLGFIGKNGLLITEEFGSFVYLGEIITNIPFEPDIPIENQCGDCTKCIDFCPTSALLGDGRMNAMRCLSYQTQTKGFMPKEFRPKIRTIIYGCDICQEVCPYNKGKNFHFHEEMEPDPETTQPLLKPILTISNKEFKQRFGYLAGSWRGKKPIQRNAIIALANARDKTAVPNLLQCIDHDPRPVIRGTAAWALSMIAPTNTEIRSFLEDFLNKEEDPEARKETEEAIAYMIETEKKQKEKD

SEQ ID NO: 81889 - protein, 387 aa, unidentified
  source 1..387: note = Vagococcus teuberi
  REGION 1..387: note = tr|A0A1J0A7E5|A0A1J0A7E5_9ENTE Epoxyqueuosine reductase OS=Vagococcus teuberi OX=519472 GN=queG PE=3 SV=1
MEVYLVDTELLKQKIIEASKDIGIDKIGFTTAEPFDHLRTSLIEQKENNHTTGFEHGNIDERLYPDLIFNQPQSIISIALAYPTRMNERLKSVRGEKRGKFARASWGTDYHHILKDRLDKLITFIKEETPKELELDFKPMVDTGELIDVVVAQRAGLGFIGKNGLLITEEFGSYVYLGEIITNIPFEPDTPMENQCGECTKCIDQCPTSALLGDGRMNAQKCLSYQTQTKGFMPEEYRPKIRSIIYGCDICQEVCPFNKGKNFHFHEEMEPDPEVVTPLLKPLLTISNREFKERFGYLAGSWRGKKPIQRNAIIALGNVRDKTSIPHLLSCIEQDPRPVIRGTAAWSLSKIDPTNPAIYDFLVEYHEKETDEEAKEEMRNAIDRMRI

SEQ ID NO: 81890 - protein, 292 aa, unidentified
  source 1..292: note = Variibacter gotjawalensis
  REGION 1..292: note = tr|A0A0S3PVG8|A0A0S3PVG8_9BRAD Epoxyqueuosine reductase OS=Variibacter gotjawalensis OX=1333996 GN=queG; PE = 4 SV=1
MTDPRRGNPRALWSDVQRVIMLGMNYGPDRDPRETLLAKERAAISVYAQGDDYHEIIKPKLKSIARWLIANAGGDVKVFVDTAALMEKPLAEAAGLGWQGKHTNLVSRVRGSWLFLGAIMTTLELPEDAADIDHCGSCRACLDACPTEAFPAPYRLDARRCISYLTIEHKGPIPLELRPLMGNRIYGCDDCLAACPWNKFAVAANEMKLSAREELTAPKLADLATLDDTAFRALFRKSPVKRIGRDRFIRNVMIAIGNSGDASLAASAQARLNDDSELVRDAARWALDRLAA

SEQ ID NO: 81891 - protein, 350 aa, Variovorax boronicumulans
  REGION 1..350: note = tr|A0A286SFI6|A0A286SFI6_9BURK Epoxyqueuosine reductase OS=Variovorax boronicumulans OX=436515 GN=queG; PE = 3 SV=1
MQALARELGFSQIGIAGVDLSSAEDGLMQWLAHGFHGEMQYMATHGTRRARPAELVPGTVSVITARMDYLPRDTDAEWQAIEFDRLRRPGEAIVSLYARGRDYHKVLRNRLAKLAEKIAEEVGPFGHRAFTDSAPVLEAELASRSGQGWRGKHTLVLDRDAGSMFFLGEIYVDMALPPSEPVSAHCGSCSACIDVCPTRAIVAPQRLDARRCISYLTIEHAGAIPVELRPLMANRIYGCDDCQLICPWNKFAKKSTLPDFDAREGLTGRTLAELFAWSEEDFLRRTEGSPIRRIGHERWLRNIAVALGNAVRSGEGGAKEALATRAGHPSELVREHVAWGLAQQPEDQPI

SEQ ID NO: 81892 - protein, 350 aa, Variovorax boronicumulans
  REGION 1..350: note = tr|A0A1E7U8K8|A0A1E7U8K8_9BURK Epoxyqueuosine reductase OS=Variovorax boronicumulans OX=436515 GN=queG; PE = 3 SV=1
MQALARELGFSQIGIAGVDLSSAEDGLMQWLAHGFHGEMQYMATHGTRRARPAELVPGTVSVITARMDYLPRDTDAEWQAIEFDRLRRPGEAIVSLYARGRDYHKVLRNRLAKLAEKIAEEVGPFGHRAFTDSAPVLEAELASRSGQGWRGKHTLVLDRDAGSMFFLGEIYVDMALPPSEPVSAHCGSCSACIDVCPTRAIVAPQRLDARRCISYLTIEHAGAIPVELRPLMANRIYGCDDCQLICPWNKFAKKSTLPDFDAREGLTGRTLAELFAWSEEDFLRRTEGSPIRRIGHERWLRNIAVALGNAVRSGEGGAKEALATRAEHPSELVREHVAWGLAQQPEDQPT

SEQ ID NO: 81893 - protein, 347 aa, unidentified
  source 1..347: note = Variovorax gossypii
  REGION 1..347: note = tr|A0A431TUF2|A0A431TUF2_9BURK Epoxyqueuosine reductase OS=Variovorax gossypii OX=1679495 GN=queG PE=3; SV = 1
MQALARELGFSQIGIAGVDLSSAEAGLMQWLAHGFHGEMQYMETHGTRRARPAELVPGTVSVITARMDYLPRSTSPEWQTVEFDRLKRPGEAIVSVYARGRDYHKVLRNRLAKLAERIAEEVGPFGHRAFTDSAPVLEAELASRSGQGWRGKHTLVLDRDAGSMFFLGEIYVDMELPPSEPVTAHCGSCSACIDVCPTQAIVAPKRLDARRCISYLTIEHGGPIPVELRPLMANRIYGCDDCQLICPWNKFAKKSTLPDFDAREELTGRTLADLFAWTEQDFLRRTEGSPIRRIGHERWLRNIAVALGNAVRAGEGGAKEALATRAEHPSELVREHVAWGLAQQATH

SEQ ID NO: 81894 - protein, 348 aa, unidentified
  source 1..348: note = Variovorax guangxiensis
  REGION 1..348: note = tr|A0A502E3Q2|A0A502E3Q2_9BURK Epoxyqueuosine reductase OS=Variovorax guangxiensis OX=1775474 GN=queG; PE = 3 SV=1
MQAMAREFGFSQIGIAGIDLSSAEDGLMQWLAQGFHGEMHYMATHGTRRARPAELVPGTVSVITARMDYLPRKTPADWQAVEFARLERPSEAIVSVYARGRDYHKVLRNRLAKLAERIAEEVGPFGHRAFTDSAPVMEAELASRSGQGWRGKHTLVLDRDAGSMFFLGEIYVDMALPESAPVTPHCGSCSACIDICPTQAIVAPQRLDARRCISYLTIEHPGPIPVELRPLIGNRIYGCDDCQLVCPWNKFAKKSALPDFDARDGLTGRQLAELFAWTEDEFLRHTEGSPIRRIGHARWLRNIAVALGNAVRAGQPGSREALAARIDDPDAMVREHVAWALSSEASVG

SEQ ID NO: 81895 - protein, 346 aa, unidentified
  source 1..346: note = Variovorax guangxiensis
  REGION 1..346: note = tr|A0A433MCY3|A0A433MCY3_9BURK Epoxyqueuosine reductase OS=Variovorax guangxiensis OX=1775474 GN=queG; PE = 3 SV=1
MQALARELGFSQIGIAGVDLSSAEAGLMQWLAHGFHGEMQYMETHGTRRARPAELVPGTVSVITARMDYLPRSTEPEWQAIEFDRLKRPGEAIVSVYARGRDYHKVLRNRLARLAERIAEEVGPFGHRAFTDSAPVLEAELASRSGQGWRGKHTLVLDRDAGSMFFLGEIYVDMELPPSEPVTAHCGSCSACIDVCPTQAIVAPKRLDARRCISYLTIEHGGSIPVELRPLMANRIYGCDDCQLICPWNKFAKKSTLPDFDAREELTSRTLANLFAWTEQDFLRRTEGSPIRRIGHERWLRNIAVALGNAARVGEGGAKEALATRAEHPSELVREHVAWGLAQRAD

SEQ ID NO: 81896 - protein, 346 aa, Variovorax paradoxus
  REGION 1..346: note = tr|A0A0D0LUQ1|A0A0D0LUQ1_VARPD Epoxyqueuosine reductase OS=Variovorax paradoxus OX=34073 GN=queG PE=3; SV = 1
MQALARELGFSQIGIAGVDLSSAEDGLMQWLAHGFHGEMQYMATHGTRRARPAELVPGTVSVITARMDYLPRDTPPEWQAVEFDRLARPGEAIVSVYARGRDYHKVLRNRLAKLAEKIAEEVGPFGHRAFTDSAPVLEAELASRSGQGWRGKHTLVLDRDAGSMFFLGEIYVDMALPESEPVTAHCGSCSACIDVCPTQAIVAPRRLDARRCISYLTIEHGGPIPEELRPLMANRIYGCDDCQLICPWNKFAKKSALPDFDAREGLTGRTLAELFAWTEDEFLRRTEGSPIRRIGHERWLRNIAVALGNAVRSGEVGAKEALATRAEHPSELVREHVAWGSMQQST

SEQ ID NO: 81897 - protein, 321 aa, Variovorax paradoxus
  REGION 1..321: note = tr|T1XCL3|T1XCL3_VARPD Putative iron-sulfur cluster binding protein OS=Variovorax paradoxus B4 OX=1246301; GN = VAPA_1c35680 PE=4 SV=1
MQWLAHGFHGEMKYMATHGTRRARPAELVPGTVSVITARMDYLPRDTPLDDWQAVEFDRLARPGEAIVSVYARGRDYHRVLRARLARLAERIAEEVGPFGHRAFTDSAPVLEAELASRSGQGWRGKHTLVLDRSAGSMFFLGEIYVDMALPESEPVTAHCGSCSACIDVCPTKAIVAPYRLDARRCISYLTIEHGGPIPLELRPLMGNRIYGCDDCQLICPWNKFAKKSALPDFDAREGLTGQALASLFAWSEEDFLRFTQGSPIRRIGHERWLRNIAVALGNALRAGESGAAEALATRASDPSELVREHVAWALAQRPER

SEQ ID NO: 81898 - protein, 349 aa, Variovorax sp.
  REGION 1..349: note = tr|A0A520H263|A0A520H263_9BURK Epoxyqueuosine reductase OS=Variovorax sp. OX=1871043 GN=queG PE=3 SV=1
MQALAREFGFSQIGIAGVDLSSAEPGLMQWLARGFHGEMHYMEAHGVRRARPAELVPGTVSVITARMDYLPRDTPPGWQAAELSRLDRPGEAIVSVYARGRDYHKVLRSRLAKLAERIAQEVGPFGHRAFTDSAPVLEAELASRSGQGWRGKHTLVLDRDAGSMFFLGEIYVDLALPPSEPVTAHCGSCSACIDVCPTQAIVAPQRLDARRCISYLTIEHAGAIPVELRPLIGNRIYGCDDCQLICPWNKFARRSALPDFDAREGLTGRQLGELFAWTEADFLRLTEGSPIRRIGHERWLRNVAVALGNAAHAGAPGAREALATRASHPSALVREHVAWALEAAPAPAG

SEQ ID NO: 81899 - protein, 357 aa, Variovorax sp.
  REGION 1..357: note = tr|A0A286B4A8|A0A286B4A8_9BURK Epoxyqueuosine reductase OS=Variovorax sp. YR752 OX=1884383 GN=queG PE=3; SV = 1
MIVSHPLVVRIQALARELGFSQIGIAGVDLSSAEAGLMQWLAHGFHGEMQYMETHGTRRARPAELVPGTVSVITARMDYLPRSTQPEWQAIEFDRLTRPGEAIVSVYARGRDYHKVLRNRLAKLAERIAEEVGPFGHRAFTDSAPVLEAELASRSGQGWRGKHTLVLDRDAGSMFFLGEIYVDMELPPSEPVTAHCGSCSACIDICPTQAIIAPQRLDARRCISYLTIEHGGPIPLELRPLMGNRIYGCDDCQLICPWNKFAKKSELPDFDAREGLTGRTLAELFAWTEEDFLRRTEGSPIRRIGHERWLRNIAVALGNAARAGEGDAQEALATRAEHPSELVREHVAWGLAQRATS

SEQ ID NO: 81900 - protein, 351 aa, unidentified
  source 1..351: note = Varunaivibrio sulfuroxidans
  REGION 1..351: note = tr|A0A4R3J782|A0A4R3J782_9PROT Epoxyqueuosine reductase OS=Varunaivibrio sulfuroxidans OX=1773489; GN = queG PE=3 SV=1
MTALSPADKEHLRQEAHAIGFDAVGFAAAGDDGAPARALASYVAQGLHGDMAWMADTQERRKSPTALWPEVQSVIALGVNYSPGRDPLAVHSHKDRGAISVYAQGRDYHDVVKKRLKRLARWIVAAHPSALKVFVDTAPVMEKPIAQRAGIGWRGRHTNIVSREFGSWLFLGEIFTTLTIPPDAPHTDHCGQCRLCIDACPTQALNVEGKIDPRRCVSYLTIETKTSVPEALRGDLGNRIYGCDDCLAVCPWNKFAKPAREDAFHPRVELTAPRLADLIQLDDAQFRALFAGSPVKRSKRGRFVRNVLYAIANGDGRSHDLLARVRALCADPDPQVGEAARWALAHIEKFP

SEQ ID NO: 81901 - protein, 315 aa, Veillonella atypica
  REGION 1..315: note = tr|A0A133S1U7|A0A133S1U7_9FIRM Uncharacterized protein OS=Veillonella atypica OX=39777; GN = HMPREF3233_01653 PE=4 SV=1
MNTLLAQEIHDKALACGYDSCGIVPLDALDFYKDRLTKRLEDVPESEDVYAHSKDFLALKDNYPWAQSIVVCTEYFGNYKFPVSLQKRYAKGLLLSLANIPDGVEAKRRRSFETWLHSKNIQCIGGETARPAGVVPLRPASVAAGLGIYRKNNFFYGPKGSNYELVAYLIDKSCEYIQHLEIPPCPDTCDLCQQGCKTKSLSAPFTMNPLTCVSFINTFGDGNLPEGVTEDMLEEWIIGCDNCQDSCPFNKNHDWSVGKDYPGLDELEPMLQPEFILKASDEEIIEQMIPKFCFHLTNEQIPLLRKSAKRVIERK

SEQ ID NO: 81902 - protein, 318 aa, Veillonella atypica
  REGION 1..318: note = tr|E1LED4|E1LED4_9FIRM Uncharacterized protein; OS = Veillonella atypica ACS-134-V-Col7a OX=866778; GN = HMPREF9684_0092 PE=4 SV=1
MNTLLAQEIHDKALACGYDSCGIVPLDALDFYKDRLTKRLEDVPESEDVYAHSKAFLTLKENYPWAQSIVVCTEYFGNYKFPVSLQKRYAKGLLLSLSNIPDGVEFKRRQSFETWLQSQNIQYIGGETAKPAGVVPLRPASVAAGLGIYRKNNFFYGPKGSNYELVAYLIDKSCEYIHDTDIPPCPDSCNLCQQGCKTKSLSAPFTMNPLTCVSFINTFGDGNMPEGVTEDMLEEWIIGCDNCQDSCPFNKNHDWSIGKDYPGLDELEPMLQPEFILKASDEEIIEQMIPKFCFHLRNEQIPLLRQSARRAIEYKKIR

SEQ ID NO: 81903 - protein, 304 aa, Veillonella criceti
  REGION 1..304: note = tr|A0A380NLG6|A0A380NLG6_9FIRM Epoxyqueuosine reductase OS=Veillonella criceti OX=103891 GN=queG PE=4; SV = 1
MITRNIINNIAKQLNIPAIGIAPWPLPKNASQFIDTNKPCPFINGTLEERLTGNTQLINPRSAIVCLFPYYIRPEDMPANQKINLPRYAWGPDYHLVIPNYLTRFGNALQALDKTVEFEIHCDTSPLADRYMAYLAGLGVFGKNRALIHPTWGSYTSIGTLLTSCEIPADTPMEGTCLNCHSCIKACPGQSLGTPVFGYDTCKSYLTQKKGHLTDSEIATLQRSSLIWGCDICQEVCPHNRNVPTTPIPEFQQIDPYVNPIDLESLTNKTFKAAFGHRAFAWRGKATLLRNAQIIDKDYSSKDE

SEQ ID NO: 81904 - protein, 315 aa, Veillonella denticariosi
  REGION 1..315: note = tr|A0A2S7Z8R9|A0A2S7Z8R9_9FIRM Epoxyqueuosine reductase OS=Veillonella denticariosi JCM 15641 OX=1298594; GN = VEHSUH05_09010 PE=4 SV=1
MTTLTAKQIHDKALECGFDDCGIISIDALDSYKDRLAQRLEAVPESEDIYAHTKSFLELKEKYPWAQSIVVCTEYYGNYKFPVSLRKRYAKGLLLSLSNIPRSDEFKRRRSFETWLGENGIRYIGGETAKPAGIIPLRPASVAAGLGIYRKNNFFYGPKGSSYELVAYLIDEPCEYIRQLGIPPCPDSCDLCQQGCKIKSLSAPFTMNPLTCVSFINTFGDGKLPDGVTDDMLEAWILGCDNCQDACPFNADHEWSIGVDYPGLDELEPLLQPEYILKASDEELIKKVIPKCCFHLTDEQIPLLRKSAKRAMQDT

SEQ ID NO: 81905 - protein, 300 aa, Veillonella denticariosi
  REGION 1..300: note = tr|A0A2S7ZCT9|A0A2S7ZCT9_9FIRM DUF1730 domain-containing protein OS=Veillonella denticariosi JCM 15641 OX=1298594 GN=VEHSUH05_01310 PE=4 SV=1
MINSINLQKICKELHIPIVGIAPWPLPADAKNILYESNPCPFTAADVAERTRGPKDFEPHSAIVCLFPYYVNYTGPANVSRYTWAKDYHLVINDYLTRLVNELSILEPSAQFSIHCDTSPLADRYMAYLAGLGFYGRNKCFINPTWGSYIVIGTVLTTLKLEPDMPSTESCIGCNRCITSCLGQCLGNNGFSYATCKSYLTQKKGDLTDTERAIIGKTPLIFGCDVCQEVCPHNKNLPTTPIVEFQSIEPVVDTSELKSLTNKEFKAKFGHRAFSWRGKKILIRNHEIIDSKKHKDRIGQ

SEQ ID NO: 81906 - protein, 321 aa, Veillonella dispar
  REGION 1..321: note = tr|A0A3D2WRL4|A0A3D2WRL4_9FIRM Epoxyqueuosine reductase OS=Veillonella dispar OX=39778 GN=DHW37_03585; PE = 4 SV=1
MNTLLAREIHDKALACGYDSCGIVPLDALDFYKDRLTKRLEDVPESEDVYAHSKAFLALKENYHWAQSIVVCTEYFGNYKFPASLQKRYAKGLLLSLSNIPDGVEFKRRQSFETWLQSQNIQYIGGETAKPAGVVPLRPASVAAGLGIYRKNNFFYGPKGSNYELVAYLIDKSCEYIHDTDIPPCPDSCNLCQQGCKTKSLSAPFTMNPLTCVSFINTFGDGNLPEGVTEDMLEEWIIGCDNCQDSCPFNKNHDWSIGKDYPGLDELEPILQPEFILKASDEEIIEQMIPKFCFHLTNEQIPLLRKSAKRAIEYKNRWQKQ

SEQ ID NO: 81907 - protein, 294 aa, Veillonella dispar
  REGION 1..294: note = tr|W1V5F0|W1V5F0_9FIRM DUF1730 domain-containing protein OS=Veillonella dispar DORA_11 OX=1403949; GN = Q619_VDC00511G0004 PE=4 SV=1
MKDINLQEICKELHIYEFGIASWPLPEQAKTILFESNPCPFTTADVEARLLGTKQFIPKSAIVCLFPYHVQHKGQSNLSRYTWSTDYHLVINEYLERLIERLQIIDDSAQFSIHCDTSPLADRYMAYLAGLGFYGKNNCFINPKWGSYVVIGTILTTLELKPNTPLEQSCMGCNRCITACLGQCLGHDDFKYNTCKSFLTQKKGELTDEEENILAKTPLVFGCDVCQEVCPHNKDIPTTPIPEFQQIEPYVNIDELEALTNKEFKAKYGRRAFSWRGKKILMRNQEIIDRKSKL

SEQ ID NO: 81908 - protein, 297 aa, Veillonella montpellierensis
  REGION 1..297: note = tr|A0A096AJB2|A0A096AJB2_9FIRM (Fe-S)-binding protein OS=Veillonella montpellierensis DNF00314; OX = 1401067 GN=HMPREF0872_06700 PE=4 SV=1
MNKLKLIDYCQQLHIHAVGIAPWPLPMEEARRILFEQDPCPFTASELQARLQGNTTLVNPRCAIVCLFPYYVPTNEPTNIARYTWATDYHLVVPHYLSQIISYLQQEEPSAEFEIHCDTSPLADRYMAYLAGLGFYGKNHCFIHPSLGSYVVIGTILTSIPFEPDRPLHATCLGCNRCLQACPGQALQADHFHYHTCKSYLTQKKGDLSETEQQIIGKTPLLFGCDICQEVCPHNAHLPITPFAEFRHIDPQISTEELANMTNKQFKERYGHRAFSWRGKKILLRNEAYIKSKKDST

SEQ ID NO: 81909 - protein, 294 aa, Veillonella parvula
  REGION 1..294: note = tr|A0A418PKB2|A0A418PKB2_9FIRM DUF1730 domain-containing protein OS=Veillonella parvula OX=29466; GN = D3219_01375 PE=4 SV=1
MNDINLQEICKELHIYEFGIASWPLPEQAKTILFESNPCPFTTADVEARLLGTTQFMPKSAIVCLFPYHVQHKGHANLSHYTWSTDYHLVINEYLERLIERLQIIDDSAQFSIHCDTSPLADRYMAYLAGLGFYGKNNCFISPKWGSYVVIGTILTTLELKPNTPLEQSCIGCNRCITACLGQCLGHDEFKFATCKSYLTQKKGELTDEEEQILAKTPLVFGCDVCQEVCPHNKDIPTTPIPEFQQIKPYINIDELETLTNKEFKAKYGHRAFSWRGKKILMRNQEIIDRKSKL

SEQ ID NO: 81910 - protein, 294 aa, Veillonella parvula
  REGION 1..294: note = tr|T0T1X6|T0T1X6_9FIRM Iron-sulfur cluster-binding protein OS=Veillonella parvula HSIVP1 OX=1316254; GN = HSIVP1_1050 PE=4 SV=1
MKDINLQEICKELHIYEFGIASWPLPEQAKTILFESNPCPFTTEDVEARLLGTTQFMPKSAIVCLFPYHVQHKGHANLSRYTWSTDYHLVINEYLERLIERLQIIDDSAQFSIHCDTSPLADRYMAYLAGLGFYGKNNCFISPKWGSYVVIGTILTTLELKPNAPLEQSCIGCNRCITACLGQCLGHDEFKFATCKSYLTQKKGELTDEEEQILAKTPLVFGCDVCQEVCPHNKDIPTTPIPEFQQIEPYINIDELETLTNKEFKAKYGHRAFSWRGKKILMRNQEIIDRKNKL

SEQ ID NO: 81911 - protein, 315 aa, Veillonella rodentium
  REGION 1..315: note = tr|A0A239ZJC1|A0A239ZJC1_9FIRM Epoxyqueuosine reductase OS=Veillonella rodentium OX=248315 GN=queG_2; PE = 4 SV=1
MTTLTAKQVHDKALECGFDDCGIISIDALDSYKDRLAQRLEAVPESEDIYTHTKSFLELKENYPWAHSIVVCTEYYGSYKFPLSLRKRYAKGLLLSLSNIPHSDEFKRRRSFETWLGEKGIRYIGGETAKPAGIIPLRPASVAAGLGIYRKNNFFYGPKGSCYELAAYLIDESCEYIQQSEIPPCPDSCDLCQQGCKTKSLSAPFTMNPLTCVSFINTFGDGKLPDGVTDDMLEVWILGCDNCQDACPFNVDHDWSIGLDYPGLDELEPLLQPEYILKASDAELIKKVIPKCCFHLTDEQIPLLRKSAERAMRGK

SEQ ID NO: 81912 - protein, 300 aa, Veillonella rodentium
  REGION 1..300: note = tr|A0A239YHD1|A0A239YHD1_9FIRM Epoxyqueuosine reductase OS=Veillonella rodentium OX=248315 GN=queG_1; PE = 4 SV=1
MINSINLQKICKELHIPAVGIAPWPLPADAQNILYESNPCPFTAADVTERIKSPEDFKPNGAIVCLFPYYVNYTGPTNLSRYTWAKDYHLVINDYLTRLVNELGRLEPSAQFSIHCDTSPLADRYMAYLAGLGFYGKNKCFINPTWGSYIVIGTVLTTLELKPDTPSTESCIGCNRCIRSCLGQCLENDEFSYTTCKSYLTQKKGDLTDTERTIIGKTPLIFGCDVCQEVCPHNKNLPTTPIVEFQSIEPVVDTAELETLTNKEFKAKFGQRAFSWRGKKILIRNHEIIDSEKHKDRIGQ

SEQ ID NO: 81913 - protein, 294 aa, Veillonella rogosae
  REGION 1..294: note = tr|A0A2S7YXZ6|A0A2S7YXZ6_9FIRM DUF1730 domain-containing protein OS=Veillonella rogosae JCM 15642; OX = 1298595 GN=VRHSUH09_05065 PE=4 SV=1
MKYINLQEICKELNIYEFGVASWPLPENAKSILYESNPCPFTAANVEERLLGTSLFTPKSAIVCLFPYYVEHKSPSNLSRYTWAKDYHLVINEYLKKLIEKLQIMNTDAQFSIHCDTSPLADRYMAYLAGLGFYGKNNCFISPKWGSYVVIGTILTTLELEPNTPLTQSCMGCNRCITACLGQCLGHDEFKFDTCKSYLTQKKGELTSEEEHIIAKTPLVFGCDVCQEVCPHNKDIPTTPIPEFQSVEPYIDIDELDSLTNKEFKAKYGPRAFSWRGKKILMRNQEIIESKKML

SEQ ID NO: 81914 - protein, 325 aa, unidentified
  source 1..325: note = Veillonella seminalis
  REGION 1..325: note = tr|K9DHG5|K9DHG5_9FIRM Uncharacterized protein; OS = Veillonella seminalis ACS-216-V-Col6b OX=883156; GN = HMPREF9282_01158 PE=4 SV=1
MITRNDIFQIAKKLNIPAVGIAPWPLPEDAPNYIDTNKPCPFINGTLEERLTANTQLQTPKSAIVCLFPYYIKTDQPVNLPRYAWGPDYHLVIPDYLKRFGAALQELDQTVEFEIHCDTSPMADRYIAYLAGLGIFGKNRSLIHPVWGSYTSIGTLLTSCELTPDEPMQGTCLSCNRCIKSCPGQSLGHKDFGFETCKSYLTQKKRDLPPDEVAIIQKSPLIWGCDICQEVCPHNRNVPTTPIPEFQTVEPYVNPVQLPELTNKTFKAEYGHRAFAWRGKAVLLRNANYIAETNTTGTDSNAITSSADSAAKPVAPLTTHSSNDE

SEQ ID NO: 81915 - protein, 297 aa, Veillonella sp.
  REGION 1..297: note = tr|A0A496P9Z7|A0A496P9Z7_9FIRM DUF1730 domain-containing protein OS=Veillonella sp. OX=1926307; GN = D8B58_11400 PE=4 SV=1
MTNLELEELAIQLNIPAVGVASWPLPVEASLHLDTPYPCPFTNGSIEERLQGSTTIASPKSAIVCLFPYYMPREGVTNLARYCWGDDYHVVVRQYLERLVDILRERYPDEIYEIHCDTSPLADRYMAYLAGLGFYGWNQTFINPTWGSYTVIGTIMTTLELSPSVPLAQSCLQCGACLRACPGKALQGDHLDYRTCKSYLTQCKGELSEEEERIIGKTPLIFGCDVCQEVCPHNRDIPMTPIPEFQQVTSYIEMEELEGMTNKEFKAKYGHKAWAWRGKKVLLRNAEIVRKEKHEGK

SEQ ID NO: 81916 - protein, 315 aa, Veillonella sp.
  REGION 1..315: note = tr|A0A2S7ZDR9|A0A2S7ZDR9_9FIRM Epoxyqueuosine reductase OS=Veillonella sp. T34266-5 OX=2027457; GN = VIHSUH07_07025 PE=4 SV=1
MNTLLAQEIHDKALACGYDSCGIVPLDALDFYKERLTKRLEDVPESEKVYAHSKDFLALKDNYPWAQSIVVCTEYFGNYKFPVSLQKRYAKGLLLSLANIPDGVEAKRRRSFETWLHSKNIQFIGGETARPAGVVPLRPASVAAGLGIYRKNNFFYGPKGSNYELVAYLIDKSCEYIQNLEIPPCPDTCDLCQQGCKTKSLSAPFTMNPLTCVSFINTFGDGNLPEGVTEEMLEEWIIGCDNCQDSCPFNKNHDWSVGKDYPGLDELEPILQPEFILKASDEEIIEQMIPKFCFHLTNEQIPLLRKSAKRVIERK

SEQ ID NO: 81917 - protein, 246 aa, unidentified
  source 1..246: note = Veillonella tobetsuensis
  REGION 1..246: note = tr|A0A480B5C7|A0A480B5C7_9FIRM Epoxyqueuosine reductase OS=Veillonella tobetsuensis OX=1110546; GN = PAGU1579_05820 PE=4 SV=1
MGTPDFMPRSAIVCLFPYHVPYSGATNLARYTWATDYHLVVTDYLQRLVDELSSTNPSELFSIHCDTSPLADRYMAYLAGLGFYGKNKCFINPIWGSYIVIGTVLTTLEFEPNTPMTETCLGCNRCISACLGKCLDHNEFKYDTCKSYLTQKKGDLTNNEQSIIKKSPLVFGCDVCQEVCPHNKDLPTTPIVEFQSIEPYVDIEELESISNKEFKSKYGHRAFSWRGKKILIRNNKYIDSKTLQKK

SEQ ID NO: 81918 - protein, 315 aa, unidentified
  source 1..315: note = Veillonella tobetsuensis
  REGION 1..315: note = tr|A0A480B7B7|A0A480B7B7_9FIRM Fe-S oxidoreductase; OS = Veillonella tobetsuensis OX=1110546 GN=PAGU1579_10330; PE = 4 SV=1
MNTLLAQEIHDKALACGYDSCGIVSLDALDFYKDRLTKRLEDVPESEEVYAHSKDFLVLKDNYPWAQSIVVCTEYFGNYKFPVSLQKRYAKGLLLSLANTPDGVEAKRRRSFERWLRSKNIQCIGGETAKPAGVVPLRPASVAAGLGIYRKNNFFYGPKGSNYELVAYLIDKSCEYIQNLEIPPCPDTCDLCQQGCKTKSLSAPFTMNPLTCVSFINTFGDGILPEGVTEDMLEEWIIGCDNCQDSCPFNKNHDWSIGKDYPGLDELEPKLQPEFILKASDEEIIEKMIPKFCFHLTNEQIPLLRKSAKRVTERK

SEQ ID NO: 81919 - protein, 270 aa, unidentified
  source 1..270: note = Veillonellaceae bacterium
  REGION 1..270: note = tr|A0A349N1N2|A0A349N1N2_9FIRM Epoxyqueuosine reductase (Fragment) OS=Veillonellaceae bacterium; OX = 2049049 GN=DCS74_03850 PE=4 SV=1
MNSAYLLKQKIKEKASSMSLEYIGICALPFSPDLKHILQQSGPVPLCPDDTNMRLNAEALLPGVRCAIVILFPYGPPAAKSNIAAYAQLADYHIISRRYLSILEKFLSSLCPAASFYAAADTSPLCDRWMAYAAGLGFLGKNHCLINSKYGSWITIGTLLTTLDLPPDHPVSQQCGNCSACLKACPGQALKDGGPMQFTKCKSWLTQKQGILSEAETGIIQRTPLIFGCDVCQQVCPWNQSAAPSPLPEYKNGRIQNLARQAFELLPTKN

SEQ ID NO: 81920 - protein, 310 aa, unidentified
  source 1..310: note = Veillonellaceae bacterium
  REGION 1..310: note = tr|A0A134CJJ2|A0A134CJJ2_9FIRM Putative iron-sulfur cluster-binding protein OS=Veillonellaceae bacterium KA00182 OX=1588748 GN=HMPREF3182_00513 PE=4 SV=1
MERDTNLIKQYIHTLGIPCVGIAPGTFSIPSYPQDICPLAAGEGDARYQPTTLLPSCQSVIVLLFPYYVKDPHPYNLSLYCRSIDYHTIIHHYLNEVTCFLTQTYPHQDFLSIVDTAPLSDRYLAYLAGLGFIGDNNCFINETYGSFCFIGSILTSLPLKPDHPQQRECFHCGACKRSCLGHCLDTAEYDYHLCKSYLTQKKGELSPMEIQVIQKTPLVFGCDICQDVCPHNHDIPETPIKEFHQSRIAYLKKSDLQELSNRQFQQLYKNRAFSWRGKGILLRNIQYLEEVQSNSEQRQNPNTKNDPSHK

SEQ ID NO: 81921 - protein, 348 aa, Verminephrobacter eiseniae
  REGION 1..348: note = tr|A1WIL1|A1WIL1_VEREI Epoxyqueuosine reductase; OS = Verminephrobacter eiseniae (strain EF01-2) OX=391735; GN = queG PE=3 SV=1
MQEWARALGFSQLGVAGVDLSAAEPGLLAWLAQGLHGDMHYMAVHGLKRARPAELLPGTVSVITARMDYLPRNTGAGAPQGWQAVELGRLARPQEGIVSVYARGRDYHKVLRTRLQTLSARIAAAVGPFGHRVFTDSAPVLEAELAARSGLGWRGKHTLVLNRAAGSMFFLGEIYVDMALPASAPVAAHCGSCNACMALCPTQAIIAPHRLDARRCISYLTIEHAGPIPLALRPLLGNRIYGCDDCQLVCPWNKFAQVSRLPDFDERQGLSGQQLVQLFAWDEATFARLTEGGPIRRIGHERWLRNVAVALGNALRATGDEALRAALRLRARDASPLVREHVAWALGG

SEQ ID NO: 81922 - protein, 346 aa, Verminephrobacter sp.
  REGION 1..346: note = tr|A0A4Q2LGR0|A0A4Q2LGR0_9BURK tRNA epoxyqueuosine(34) reductase QueG OS=Verminephrobacter sp. Larva24 OX=2509434 GN=queG PE=4 SV=1
MAARRPVAPAANAVALAQDRAQEKAHFVRCGVRCAPYAVIASAEQLAAAPAELLPGTVSVITARMDYLPRNTGAGAPQGWQAVELGRLARPQEGIVSVYARGRDYHKVLRTRLQTLSARIAAAVGPFGHRVFTDSAPVLEAELAARSGLGWRGKHTLVLNRAAGSMFFLGEIYVDMALPASAPVAAHCGSCNACMALCPTQAIIAPHRLDARRCISYLTIEHAGPIPLALRPLLGNRIYGCDDCQLVCPWNKFAQVSRLPDFDERQGLSGQQLVQLFAWDEATFARLTEGGPIRRIGHERWLRNVAVALGNALRATGDEALRAALRLRARDASPLVREHVAWALGG

SEQ ID NO: 81923 - protein, 534 aa, unidentified
  source 1..534: note = Verrucomicrobia bacterium
  REGION 1..534: note = tr|A0A2V5ZLR0|A0A2V5ZLR0_9BACT Shikimate kinase; OS = Verrucomicrobia bacterium OX=2026799 GN=queG PE=3 SV=1
MISIQPYSILVGHSVTATSFQLSLPAAYCDMSAAKSIVLIGMMGAGKSSVGRCLQRLTGLARIDTDEIIAAEFGIPIAQIFATHGEEKFRDAETNVLLKLAPDRPAIITTGGGIILRPGNVDLLKKLGTVIWLTADERTLFERASRRNERPLLQKENPQTVFSDLFAKREPLYASAADLQIDTSGKSHDEVADAILAKLQELAPERPAIVVTGGGIVGNTENLDLLKRLGTVVWAHGEMNYMARAEEKRRDPQNVLPGARSIIVLALNYFQGGENASAGRIARYAWGDDYHDVIEAKLRKIDNYLRELGGEQKCYVDTGPVLERDHAATAGIGWHGKSTMLLNEKLGTWFFLAEILTTLELPPDEAARDRCGTCERCITACPTGAITAPHKLDARRCISYLTIELKSAIPLELRPLIGDRIFGCDDCLEACPWNRFAKVSRETSFTARRSTATLALRDYLTLSEAEFRNLFRNSPIKRVKRRGFLRNVCVALGNVGTFDDLPALRRAAADSEPLIAEHATWAIEQILNRVGPTA

SEQ ID NO: 81924 - protein, 341 aa, unidentified
  source 1..341: note = Verrucomicrobia bacterium
  REGION 1..341: note = tr|A0A2A2R8D6|A0A2A2R8D6_9BACT tRNA epoxyqueuosine(34) reductase QueG OS=Verrucomicrobia bacterium Tous-C9LFEB OX=1982333 GN=B9S32_04610 PE=4 SV=1
MPPTTLTATQIKDQARALGFDLCGIAAATRPAQAEYYQQWITDGRHGEMGWLARDPQRRTDPQQVLPEARSVIAVGLNHYQPAPTRRGRIATYALGEDYHTLFEEKLAAFQGWLTATAGGSHKFYADTGPVLEKNVAQLAGLGWQAKSTMLLNAKFGPWLFLGEILTTLDLPADEPARDRCGSCTRCIDVCPTQAITAPYELDARRCISYLTIELKGSIPEELRPLIGDHLYGCEECLTVCPWNRFAKQSQELRFAATASTQLDLRDYLALSPQEFKQRFAGSPILRVKRRGLLRNVCVVLGNIGTADDLPALHRALSDEEPLVREHAAWAVARIRERTTT

SEQ ID NO: 81925 - protein, 341 aa, unidentified
  source 1..341: note = Verrucomicrobia subdivision
  REGION 1..341: note = tr|A0A3C1V7E0|A0A3C1V7E0_9BACT tRNA epoxyqueuosine(34) reductase QueG OS=Verrucomicrobia subdivision 3 bacterium OX=2052186 GN=queG PE=4 SV=1
MKNAIRQRAQELGFDDCRFTTAAPPASAEKFQYWLAQKQNGEMLWLERNAEKRVEPQQVLAGAKSVIVLTVSYENSNSKLKTKNSKLGVVARYARFEDYHDVLGGRLKALTQFVNELGGAETRSLWYVDTGPVLERDLAQRAGTGFVGKHTNLISRKLGNWIFLAEILTTLELEPDAPEKNHCGSCTRCLTACPTNAITAPFQLDARKCISYLTIELKGSIPVELRPAIGNRIYGCDDCLAACPWNRFAREGNLMKPHARQDLAAPDLIELLQLDDAGFKSRFAGTPMLRTKRRGVLRNVCVALGNVGDETALPFLEKAARDQEPLIAEHAHWAMGQIYQP

SEQ ID NO: 81926 - protein, 339 aa, unidentified
  source 1..339: note = Verrucomicrobia subdivision
  REGION 1..339: note = tr|A0A0R2XDH0|A0A0R2XDH0_9BACT Uncharacterized protein OS=Verrucomicrobia subdivision 6 bacterium BACL9 MAG-120924-bin69 OX=1655635 GN=ABS33_02205 PE=4 SV=1
MSRAEELKKAAQSLGFDALGITSADIPPHADHLKEWLSLSYQGEMKWMANRPEIRSDPQKYDSIAKTIIVAGITSRQTSSPLPRGRIAAYAQGEDYHEVLRDKLEQLAQKSLAQWGGHYRVCVDSSPLLEKPIAAMAGLGWQGKNTLLIHSQHGPWLMLGSILTDLEISPDSSSPDHCGTCTRCLDACPTQAFPQPYVLDARRCLAYLTIEHPGSIPEEFRPLIGDRLFGCDECLEVCPWNRHAQESRELRFTPIPRTDLSEMLTWDDARFRQEFRHTPIFRLKRGRWLRNICIVLGNIGTTQDLPALQKAAEDSDPLVQEHAQWGIARIGQRNRKTND

SEQ ID NO: 81927 - protein, 369 aa, unidentified
  source 1..369: note = Verrucomicrobiaceae bacterium
  REGION 1..369: note = tr|A0A4Q2Y2A9|A0A4Q2Y2A9_9BACT tRNA epoxyqueuosine(34) reductase QueG OS=Verrucomicrobiaceae bacterium OX=2026800 GN=queG PE=4 SV=1
MAASVKRIATTLGLDDCRIAAVTGPAGHAEQYQQWIDAGEHGEMDWMAKNPNRRKDPREVLPGIRSVITVALNYYQAEPPPLAHTLPSPAGSGPVPSVPGLSPLRGRIARYAWGDDYHEVLNGKLRDLCEWLEDQGGAQRLYADTGPVLERDWASASGLGWNGKSTIQIHPRMGCYFFLGEILTTLAIAPDKPLADHCGKCTRCINACPTGAITSPRHVDAKRCVSYLTIESKSAIPLEFRRAIGDRLYGCDDCLAACPWNRFAQDSREAAFAARPFVAQWSPRDFLTLTDDTFRSLFRHSPIRRIKRPAFLRNVCTVLGNTGTAADLPALRAAAEDPHPLIAEHAVWAVTEITAREADAGKTENSQHP

SEQ ID NO: 81928 - protein, 344 aa, unidentified
  source 1..344: note = Verrucomicrobiaceae bacterium
  REGION 1..344: note = tr|A0A1Z8ZR55|A0A1Z8ZR55_9BACT tRNA epoxyqueuosine(34) reductase QueG OS=Verrucomicrobiaceae bacterium TMED86 OX=1986881 GN=CBC46_11230 PE=4 SV=1
MTPETVKRNVQFVARQLGFDDCRVSAAQRAPHADNYLDWVEQGHAGDMGWLERNVERRCDPREVLPGCRSVISLALNYLPAKDHPDTGYRIARYSWNDDYHDLIEEKLKDLNLALEDMGGQQRYYVDTGPILERDFASASGLGWNGKSTVQIHRKLGTWFFLCELLTTLELEPDKASSDHCGKCTACIQACPTEAITGPRQLAAKRCISYLTIEHKGSIPLEFRRAIGDRIYGCDDCLDACPWNRFAQVSREASLHARPGLFEHRLRDFLALDLEQFRALFAKSPIKRIKRDRFLRNVCVALGNTGGQDDLPALYATAHNEASLVTEHAQWAIGEINERVQATP

SEQ ID NO: 81929 - protein, 347 aa, unidentified
  source 1..347: note = Verrucomicrobiae bacterium
  REGION 1..347: note = tr|A0A2A2YFB4|A0A2A2YFB4_9BACT Epoxyqueuosine reductase OS=Verrucomicrobiae bacterium AMD-G2 OX=1982328; GN = queG PE=3 SV=1
MSLGNAPIDDELVARVRTIARECGFDDCRIATANRATHADDYLHWVEQGMHGEMTWLERNQERRCDPREVLPGCRAVICLGMNYYPGSSSANDQYRIARYSWNEDYHDLIGDRLKAMDAALQALGGTQRYYVDTGPVLERDFATDAGLGWNGKSTVQIHRKFGTWLFLAELLTTLPLVADSPFGDHCGKCTRCITACPTQAIIAPHRVDARRCVSYLTIEHKGAIPLEFRRAIGDRIYGCDDCLSACPWNRFAQLSQHAQFHARAEIFQHSLSDFLGFDDETFRRVFARSPIKRIKRNRFLRNVCIALGNVGTRADLPALEVARIDADPLIAEHAAWAVEEILARNI

SEQ ID NO: 81930 - protein, 339 aa, unidentified
  source 1..339: note = Verrucomicrobiae bacterium
  REGION 1..339: note = tr|A0A2A2QDI2|A0A2A2QDI2_9BACT tRNA epoxyqueuosine(34) reductase QueG OS=Verrucomicrobiae bacterium Tous-C5FEB OX=1982331 GN=B9S30_05800 PE=4 SV=1
MNRAEELKEAARSLGFDALGITSAHIPPHADHLKEWLSLSYQGEMKWMASRPEIRSDPQKYDSLAKTIIVAGITSRQTSSPLPRGRIAAYAQGEDYHEVLRDKLEQLAQKTLAPWGGHYRVCVDSSPLLEKPIAAMAGLGWQGKNTLLIHPQHGPWLMLGSLLTDLELSPDPSSHDHCGTCTRCLDACPTQAFPKPYVLDARRCLAYLTIEHPGSIPEEFRPLIGDRLFGCDECLEVCPWNRHAQESRELRFTPIPRTDLSKMLTWDDARFRQEFRHTPIFRLKRGRWLRNICIVLGNIGTIKDLPALQKATEDSDPLVQEHAHWGITRIRERNPTTND

SEQ ID NO: 81931 - protein, 364 aa, unidentified
  source 1..364: note = Verrucomicrobiales bacterium
  REGION 1..364: note = tr|A0A354TBK7|A0A354TBK7_9BACT Epoxyqueuosine reductase OS=Verrucomicrobiales bacterium OX=2026801; GN = queG PE=3 SV=1
MTPAEIKSALLAKARALGFDDCRVAPALPAAHREVFEQWIAEGKHGDMAWMARNIERRTDPRVVLPGARSVIVLAMNYYQGAPHGRDGRNATDEKNDDNHSHSSHWSHPSYRIARYAWNDDYHDLIEKKLRELDAFLTTHGGTQKPYVDTGPVLERDFASEAGLGWGGKSTMQIHRHLGTWFFLADILTTLELPADAPAKDMCGKCTRCIDACPTQAITAPQRMDARRCISYLTIESKGSIPHEFRRAIGDRIYGCDACLDACPWNRHAQESREATFQARETVFSKSLRDFLALTDEEFRALFAKSPIKRIKRPAFLRNVCVALGNVGLPEDLPALEAAAADPHPLIAEHAAWAIAEIRQRHGG

SEQ ID NO: 81932 - protein, 337 aa, unidentified
  source 1..337: note = Verrucomicrobiales bacterium
  REGION 1..337: note = tr|A0A257M255|A0A257M255_9BACT tRNA epoxyqueuosine(34) reductase QueG OS=Verrucomicrobiales bacterium VVV1 OX=2015575 GN=queG PE=4 SV=1
MIKAIARGLGFDDCRIAVAKEATHAEAFREWIGEGLHGDMAWMEKTPHRRCDPREVLEGCKSVICLALNYYPGRSSGADGYRIARYAWNEDYHDLILAKLKAFDVELAKLGGTQRYYVDTGPVLERDFATDAGLGWNGKSTLQIHRRLGTWFFLAELLTTLDLTADTPFGDHCGKCTRCITACPTGAITAPHRVDARRCISYLTIEHKEAIPEEFRIAMGDRIYGCDDCLDACPWNKFAEVSREARFHARESVFRHRLRDFLTLDDESFRALFAKSPIKRIKRPRFLRNVCVALGNTGTNEDLPALETAAIDPDPLIAEHATWAIQRLKTRLSHAVK

SEQ ID NO: 81933 - protein, 372 aa, Vibrio aerogenes
  REGION 1..372: note = tr|A0A1M6E806|A0A1M6E806_9VIBR Epoxyqueuosine reductase OS=Vibrio aerogenes CECT 7868 OX=1216006 GN=queG; PE = 3 SV=1
MNYQVLAEKIKGWALELGFEKAGICDVDLSRHETELQRWLDAGYHGEMEWMARHGMMRARPDELLPGTIRVISVRMTYLPPEAKFSLDLSTPTHAYISRYALGRDYHKLLRNQLKKLAEKIKQETTSLNYRPFVDSAPILERPLAEKAGLGWTGKHSLILDKEAGSWFFLGEILVDIPLPVDQPVENQCGSCKACITSCPTQAIVSDGVVDARRCISYLTIEYSGVIPEEFREAIGNRIYGCDDCQLVCPWNRFSPLTGQPDFHRRKVLETPDLTELFLWDEQTFLKNMEGSAIRRIGHLQWLRNLAVSMGNAPYSEELTLALEQRLGLSEMLDIHIHWAISQQNKKQNISHQNRKHDRLIRIIQKGLTRDA

SEQ ID NO: 81934 - protein, 375 aa, Vibrio agarivorans
  REGION 1..375: note = tr|A0A2K1DS99|A0A2K1DS99_9VIBR Epoxyqueuosine reductase OS=Vibrio agarivorans OX=153622 GN=queG PE=3 SV=1
MDYTQLAHQIKIWGKELGFQKVGICDVDLSEHETALQRWLDSNYHGSMDWMARHGMMRARPEELLPGTIRAISVRMDYLPPEAGFATNLANRNHGYISRYALGRDYHKLVRKQLNKLGQRIEKEVKQLGYRPFVDSAPILERPLAQKAGLGWTGKHSLILDKDCGSWFFLGELLIDLPLPVDPPSQDQCGKCSSCITSCPTQAIVSDKVVDARRCISYLTIEFDGVIPEEFRKPIGNRIYGCDDCQLVCPWNRFANIAEQKDFHRRNSLQNPDLITLFNWDEATFLKSMEGSAIRRIGHVQWLRNIAIALGNAEYSQKAIESLEARRGHSSLLDKHIEWALEQQIKQLSFNRTESSDTKQQRLIRIIEKGLPRDA

SEQ ID NO: 81935 - protein, 375 aa, unidentified
  source 1..375: note = Vibrio alfacsensis
  REGION 1..375: note = tr|A0A347UML3|A0A347UML3_9VIBR Epoxyqueuosine reductase OS=Vibrio alfacsensis OX=1074311 GN=queG PE=3; SV = 1
MNYEQLAQQIKIWGKELGFQKVGICDVDLSEHEAALQKWLDAGYHGSMDWMARHGMMRARPNELLPGTVRVISVRMDYLPPEAKFASNLANKNHAYISRYALGRDYHKLVRKQLNKLGQLIEQEVDQLGYRPFVDSAPILERPLAQKAGLGWTGKHSLILDKDCGSWFFLGELLIDLPLPIDEASIDQCGKCRACITSCPTQAIVDDNVVDARRCISYLTIEFDGVIPEEFRKPMGNRIYGCDDCQLVCPWNRHAEITEQEDFHRRDSFIDPDLVTMFLWDESHFLKQMEGSAIRRIGHLQWLRNIAIALGNSEYSLRVIEALEARQGENPLLDEHIEWALAQQFNQTPLESMGSIETKQKRLIRIVEKGLSRDA

SEQ ID NO: 81936 - protein, 375 aa, Vibrio alginolyticus
  REGION 1..375: note = tr|A0A4U1XE36|A0A4U1XE36_VIBAL Epoxyqueuosine reductase OS=Vibrio alginolyticus OX=663 GN=queG PE=3 SV=1
MNYEQLAQQIKVWGKELGFQKVGICDVDLSEHEAALQKWLDAGYHGSMDWMARHGMMRARPHELLPGTVRVISVRMDYLPPEAQFASNLANKSHAYISRYALGRDYHKLVRKQLNKLGKLIEQEVGQYGYRPFVDSAPILERPLAQKAGLGWTGKHSLILDQDCGSWFFLGELLIDLPLPVDEPSVDQCGKCKACITSCPTQAIVEDKVVDARRCISYLTIEFGGVIPEEFRKPMGNRIYGCDDCQLVCPWNRYADITEQDDFHRRDSFKNPDLVDMFNWDEATFLKNMEGSAIRRIGHIQWLRNIAVALGNAEYSQRIIDALESRQGENKLLDEHIKWALTEQLNQLPTESNSSIETKKQRLIRIVEKGLPRDA

SEQ ID NO: 81937 - protein, 375 aa, Vibrio alginolyticus
  REGION 1..375: note = tr|D0X191|D0X191_VIBAL Epoxyqueuosine reductase; OS = Vibrio alginolyticus 40B OX=674977 GN=queG PE=3 SV=1
MNYEQLAQQIKVWGKELGFQKVGICDVDLSEHEAALQKWLDAGYHGSMDWMARHGMMRARPHELLPGTVRVISVRMDYLPPEAQFASNLANKSHAYISRYSLGRDYHKLVRKQLNKLGKLIEQEVGQYGYRPFVDSAPILERPLAQKAGLGWTGKHSLILDQDCGSWFFLGELLIDLPLPVDEPSVDQCGKCKACITSCPTQAIVEDKVVDARRCISYLTIEFDGVIPEEFRKPMGNRIYGCDDCQLVCPWNRYADITEQDDFHRRDSFKNPDLVDMFNWDEATFLKNMEGSAIRRIGHIQWLRNIAVALGNAEYSQRIIDALESRQGENKLLDEHIKWALTEQLNQLPTESNSSIETKKQRLIRIVEKGLPRDA

SEQ ID NO: 81938 - protein, 376 aa, unidentified
  source 1..376: note = Vibrio algivorus
  REGION 1..376: note = tr|A0A557NWB9|A0A557NWB9_9VIBR Epoxyqueuosine reductase OS=Vibrio algivorus OX=1667024 GN=queG PE=3 SV=1
MNYQELANKIKLWGKELGFQQVGITDVDLSEHEAQLQRWLDAGFHGSMDWMARHGMMRARPQELHPGTIRVISVRMDYLPPKAQFASNLSDPTQAYISRYSLGRDYHKLIRNQLKKLGQRIEEEVGKLGYRPFVDSAPILERPLAQKAGLGWAGKHSLILDKQAGSWFFLGELLVDIPLPIDEPQTDQCGQCRACMTSCPTGAIVEEGVVDARLCISYLTIELNGVIPEELRSKIGNRIYGCDDCQLVCPWNRAAEVTNEVSFHRRDIFNDADLIHLFQWNELQFLKNMEGSAIRRIGHIQWLRNISVALGNAPYESAILEVLTARLGLDDNLDIHIQWAIEQQNKKKNAIEANTARNTKLERLVRIIGKGLPRDA

SEQ ID NO: 81939 - protein, 376 aa, Vibrio anguillarum
  REGION 1..376: note = tr|A0A241PMV2|A0A241PMV2_VIBAN Epoxyqueuosine reductase OS=Vibrio anguillarum OX=55601 GN=queG PE=3 SV=1
MDYQVLADKIKIWARELGFEKVGICDIDLSEHEEPLQKWLDAGFHGEMDWMARHGMMRARPHELLPGTVRVISARMNYLPPDARFASDLNNPNYAYISRYALGRDYHKLVRNQLKKLGEKIEQEVGALGYRPFVDSAPILERPLAQKAGLGWTGKHSLILDKESGSWFFLGELLIDLPLPVDTPSSNQCGKCTACITSCPTQAIVEDGVVDARRCISYLTIEYDGVIAEEFRKAMGNRIYGCDDCQLVCPWNRFSDLTQQSDFHRRQALDEPDLVELFAWDEATFLRYMEGSAIRRIGHQQWLRNLSIALGNAPYSQRIIVALNTRLGLSDLLDEHIHWALVEQKRKSSEPASACSSNKKQQRLIRIVEKGLPRDA

SEQ ID NO: 81940 - protein, 312 aa, Vibrio anguillarum
  REGION 1..312: note = tr|F7YIT5|F7YIT5_VIBA7 Epoxyqueuosine reductase; OS = Vibrio anguillarum (strain ATCC 68554 / 775) OX=882102; GN = queG PE=3 SV=1
MDYQVLADKIKIWARELGFEKVGICDIDLSEHEEPLQKWLDAGFHGEMDWMARHGMMRARPHELLPGTVRVISARMNYLPPDARFASDLNNPNYAYISRYALGRDYHKLVRNQLKKLGEKIEQEVGALGYRPFVDSAPILERPLAQKAGLGWTGKHSLILDKESGSWFFLGELLIDLPLPVDTPSSNQCGKCTACITSCPTQAIVEDGVVDARRCISYLTIEYDGVIAEEFRKAMGNRIYGCDDCQLVCPWNRFSDLTQQSDFHRRQALDEPDLVEKCFLGWGPPFFPYIWKGSVIARIGPPAKGAVFFPSL

SEQ ID NO: 81941 - protein, 392 aa, Vibrio atlanticus
  REGION 1..392: note = tr|A0A1C3J4C0|A0A1C3J4C0_9VIBR Epoxyqueuosine reductase OS=Vibrio atlanticus OX=693153 GN=queG PE=3 SV=1
MNLDHLAEKIKIWGKELGFQKVGICDVDLSEHEAPLQAWLDAGNHGEMDWMARHGMMRARPNELHPGTIRVISARMNYLPPEAQFASNLSDTTQGYISRYSLGRDYHKLFRNQLKKLGQRIEKEVEGLDSRPFVDSAPILERPLAQKAGLGWTGKHSLILDKDAGSWFFLGELLVNIPLPTDEPSVDECGKCTACITSCPTGAIIADGVVDARKCISYLTIEYDGVIPEEYRDAIGNRIYGCDDCQLVCPWNRHAELTEQTDFHRREDFREADLVSLSSWDEATFLKKMEGSAIRRIGHTQWLRNIFVAMGNAPFQQRIVETLESHRGNNEMLDVHIEWALNKQLQQLPNASSMQEDSSTQKNSCVQKNSSKILTKKHRLIRIVEKGLPRDA

SEQ ID NO: 81942 - protein, 380 aa, Vibrio atlanticus
  REGION 1..380: note = tr|A0A558GMV7|A0A558GMV7_9VIBR Epoxyqueuosine reductase OS=Vibrio atlanticus OX=693153 GN=queG PE=3 SV=1
MNLDHLAEKIKIWGKELGFQKVGICDVDLSEHEAPLQAWLDAGNHGEMDWMARHGMMRARPSELHPGTIRVISARMNYLPPEAQFASNLSDTTQGYISRYSLGRDYHKLFRNQLKKLGQRIEKEVEGLDSRPFVDSAPILERPLAQKAGLGWTGKHSLILDKDAGSWFFLGELLVNIPLPVDTPSIDECGKCTACITSCPTGAIIADGVVDARKCISYLTIEYDGVIPEEYRDAIGNRIYGCDDCQLVCPWNRHAELTEQKDFHRREDFQEADLVSLSSWDEATFLKKMEGSAIRRIGHIQWLRNIFVAMGNAPFQQRIVETLESHQGKNDMLDVHIEWALEKQLQQLPNASSIQEGKNKVSTKKHRLIRIVEKGLPRDA

SEQ ID NO: 81943 - protein, 375 aa, Vibrio azureus
  REGION 1..375: note = tr|U3C707|U3C707_9VIBR Epoxyqueuosine reductase; OS = Vibrio azureus NBRC 104587 OX=1219077 GN=queG PE=3 SV=1
MDYTQLAQQIKIWGKELGFQKVGICDVDLSEHETALQKWLDSNYHGSMDWMARHGMMRARPDELLPGTLRAISVRMDYLPPEAGFASNLANRNHAYISRYALGRDYHKLVRKQLNKLGQRIEKEVEQLGYRPFVDSAPILERPLAQKAGLGWAGKHSLILDKDCGSWFFLGELLIDLPLPVDQPSQDQCGKCHSCMTSCPTQAIVADKVVDARRCISYLTIEFDGVIPEEFRQPIGNRIYGCDDCQLVCPWNRFADITEQEDFHRRENFQEPDLVTLFSWDEATFLKHMEGSPIRRIGHTQWLRNIAVALGNAEYSHKAIAALEARQGQSPLLDEHIAWALEQQVNNLSFNRTEKAETKQKRLIRIIEKGLPRDA

SEQ ID NO: 81944 - protein, 375 aa, unidentified
  source 1..375: note = Vibrio barjaei
  REGION 1..375: note = tr|A0A1J4R1N2|A0A1J4R1N2_9VIBR Epoxyqueuosine reductase OS=Vibrio barjaei OX=1676683 GN=queG PE=3 SV=1
MDLNKLASDIKQWGQELGFQKVGISDIDLQDQETVLKNWLAAGYHGDMAWMETHQDLRIHPDKLHPNTCRIISVRMDYLPEDANFASNLEDKHSGYISRYALGRDYHKLIRNLLKKLGQKIEQEVSELGYRPFVDSAPVLERPLAEKAGLGWIGKHSLLLDKEAGSWFFLGELFIDLPLPTDNPVNNECGKCRACVTSCPTGAILENGVIDARRCISYLTIEYKGVIPLEFREAMGNRIYGCDDCQLVCPWNRHAELSQRQDFQRRNSFADTNLDILLSWDEATFLKNMEGSAIRRIGHEQWQRNIIIAMGNAPFSQTYVERLEQIEGQSDLLDPHIKWALQKQLGQLPVNLDTSLHTKNQRLIRIVKKGLPRDA

SEQ ID NO: 81945 - protein, 370 aa, unidentified
  source 1..370: note = Vibrio bivalvicida
  REGION 1..370: note = tr|A0A177XY99|A0A177XY99_9VIBR Epoxyqueuosine reductase OS=Vibrio bivalvicida OX=1276888 GN=queG PE=3; SV = 1
MNYQELTDKIKIWGQELGFQKVGICDVDLSEHEAELQKWLDAGYHGEMDWMARHGMMRARPAELLPGTLRVISVRMNYLPPQAQFAANLSDPTQAYISRYSLGRDYHKLVRNQLKKLGQKIEQEIGNFGYRPFVDSAPILERPLAQKSGLGWTGKHSLILDKECGSWFFLGELLIDLPLPVDKPSVEECGKCKACITSCPTQAIVADGIVDARRCISYLTIEFEGVIPEDFRKAMGNRIYGCDDCQLVCPWNRFSDLTDQQDFHRREALTNANLVELFKWDEATFLKNMEGSAIRRIGHLQWLRNLSVAMGNAPYSIDIIEALESRVGLSDTLDVHIRWAQEQQQTQIPAQSTKLNRLIRIVEKGLPRDA

SEQ ID NO: 81946 - protein, 370 aa, Vibrio brasiliensis
  REGION 1..370: note = tr|E8LNH6|E8LNH6_9VIBR Epoxyqueuosine reductase; OS = Vibrio brasiliensis LMG 20546 OX=945543 GN=queG PE=3; SV = 1
MNYQALADKIKIWGQELGFQKVGICDVDLSEHEAELQKWLDAGYHGEMDWMARHGMMRARPSELLPGTVRVISVRMDYLPPEAQFAANLSDPTQAYVSRYALGRDYHKLIRNQLKKLGQKIEQEVGQFGHRPFVDSAPILERPLAQKAGLGWTGKHSLILDKECGSWFFLGELLIDLPLPVDEASVDQCGKCKACITSCPTQAIVDEGIVDARRCISYLTIEFDGVIPEEFRRAMGNRIYGCDDCQLVCPWNRFSELTKQEDFHRREALKNANLTELFLWDEATFLKNMEGSAIRRIGHLQWMRNLSIAMGNAPYSMEIIDALQQRTGLSEVLDTHIQWALSQQQAQLPLSSTKLDRLIRIVEKGLPRDA

SEQ ID NO: 81947 - protein, 370 aa, Vibrio breoganii
  REGION 1..370: note = tr|A0A2N7HMB4|A0A2N7HMB4_9VIBR Epoxyqueuosine reductase OS=Vibrio breoganii OX=553239 GN=queG PE=3 SV=1
MNLQHLADQIKLWGNELGFQKIGITDVDLSSHEEGLKKWIAHGYHGSMKWMERNEDKRLHPDKLHPGTLRVISVRLDYLPPEAHFASNLSDPTQAYISRYALGRDYHKLMRNKLKNLAKKIEDELGELNYRPFVDSAPVLERPLAEKAGLGWTGKHSLLLDEEAGSWFFLGELLIGLPLPVDAPVENQCGKCRSCITSCPTGAIIEDGVIDARKCISYLTIEYDGIIEPDLSDAMGNRIYGCDDCQLVCPFNRLAQLTQQADFHRRESIKDSNLITLFLWSEQEFLKNFEGSAIRRIGHLQWLRNLAIALGNGAYSDEAIITLESRLGLCDVLDHHIAYAIERLKSQTPFTSTKQQRLIRIVQKGLPRDA

SEQ ID NO: 81948 - protein, 370 aa, Vibrio breoganii
  REGION 1..370: note = tr|A0A4U2FJK8|A0A4U2FJK8_9VIBR Epoxyqueuosine reductase OS=Vibrio breoganii OX=553239 GN=queG PE=3 SV=1
MNLQHLADQIKLWGNELGFQKIGITDVDLSSHEEGLKKWIAHGYHGSMEWMERNEDKRLHPDKLHPGTLRVISVRLDYLPPEAHFASNLSDPSQAYISRYALGRDYHKLMRNKLKNLAKKIEDELGELNYRPFVDSAPVLERPLAEKAGLGWTGKHSLLLDEEAGSWFFLGELLIGLPLPVDAPVENQCGKCRSCITSCPTGAIIEDGVIDARKCISYLTIEYDGIIERELSDAMGNRIYGCDDCQLVCPFNRHAQLTQQADFHRRESIKDSNLITLFLWSEQEFLKNFEGSAIRRIGHLQWLRNLAIALGNGAYSDEAITTLENRLGLCDVLDHHIAYAIERLKSQTSFTSTKQQRLIRIVQKGLPRDA

SEQ ID NO: 81949 - protein, 375 aa, Vibrio campbellii
  REGION 1..375: note = tr|A0A1Q1PEM4|A0A1Q1PEM4_9VIBR Epoxyqueuosine reductase OS=Vibrio campbellii OX=680 GN=queG PE=3 SV=1
MNYEQLAQQIKIWGKELGFQKVGICDVDLSEHEAALQKWLDAGYHGSMDWMARHGMMRTRPNELLPGTVRVISVRMDYLPPEAKFASNLANKNHAYISRYALGRDYHKLVRKQLNKLGKLIEQEVGQYGYRPFVDSAPILERPLAQKAGLGWTGKHSLILDKDCGSWFFLGELLIDLPLPVDEPSVDQCDKCKACITSCPTQAIVDEKVVDARRCISYLTIEFDGVIPEEFRKPMGNRIYGCDDCQLVCPWNRYADITEQEDFHRRDSFEDPDLVTMFNWDEPTFLKQMEGSAIRRIGHLQWLRNISVALGNTEYSQRTIDALEARRGESELLDEHINWALGQQLSQIPTAESDSIETKKKRLIRIVEKGLPRDA

SEQ ID NO: 81950 - protein, 375 aa, Vibrio campbellii
  REGION 1..375: note = tr|A7MX80|A7MX80_VIBCB Epoxyqueuosine reductase; OS = Vibrio campbellii (strain ATCC BAA-1116 / BB120); OX = 338187 GN=queG PE=3 SV=1
MNYEQLAQQIKVWGKELGFQKVGICDVDLSEHEAALQKWLDAGYHGSMDWMARHGMMRARPNELLPGTVRVISVRMDYLPPEAKFASNLANKNYAYISRYALGRDYHKLVRKQLNKLGKLIEQEVGQYGYRPFVDSAPILERPLAQKAGLGWTGKHSLILDKDCGSWFFLGELLIDLPLPVDEPSVDQCDKCKACITSCPTQAIVDEKVVDARRCISYLTIEFDGVIPEEFRKPMGNRIYGCDDCQLVCPWNRYADITEQEDFHRRDSFEDPDLVTMFNWDEPTFLKQMEGSAIRRIGHLQWLRNISVALGNTEYSQRTIDALEARRGESELLDEHINWALGQQLSQIPTAESDSIETKKKRLIRIVEKGLPRDA

SEQ ID NO: 81951 - protein, 372 aa, unidentified
  source 1..372: note = Vibrio caribbeanicus
  REGION 1..372: note = tr|A0A0A6QJT3|A0A0A6QJT3_9VIBR Epoxyqueuosine reductase OS=Vibrio caribbeanicus OX=701175 GN=queG PE=3; SV = 1
MNYQELADKIKIWAQELGFQKVGICDVDLSEHEAELQKWLDAGYHGEMDWMARHGMMRARPDELLPGTIRVISARMNYLPPEAQFASNLSDTTQAYISRYALGRDYHKLVRNQLKKLGQRIEEEVGQFGYRPFVDSAPILERPLAQKAGLGWTGKHSLILDKECGSWFFLGELLIDLPLPIDTPSEDACGKCKACITSCPTSAIISEGVVDARRCISYLTIEFDGVIPEEFRKPMGNRIYGCDDCQLVCPWNRFSDITDQSDFHRRSTLTNADLVQLFLWDEATFLKNMEGSAIRRIGHIQWMRNLSIAMGNAPFSPRIIDALRARAGINDVLDVHIDWAIEQQLGQESIAGTDTKQQRLIRIVEKGLPRDA

SEQ ID NO: 81952 - protein, 370 aa, unidentified
  source 1..370: note = Vibrio caribbeanicus
  REGION 1..370: note = tr|E3BIU6|E3BIU6_9VIBR Epoxyqueuosine reductase; OS = Vibrio caribbeanicus ATCC BAA-2122 OX=796620 GN=queG; PE = 3 SV=1
MNYTELANKIKIWGKELGFQKVGICDVDLSEHEPLLQKWLDAGYHGEMDWMARHGMMRARPSELLPGTTRVISVRMNYLPPEAQFASNLSDPTQAYISRYALGRDYHKLMRNQLKKLGQKIEQEMENFSHRPFVDSAPILERPLAQKAGLGWTGKHSLILDKDCGSWFFLGELLIDIPLPVDQPSIDECGKCKACITSCPTQAIVADGVVDARRCISYLTIELDGVIPEEFRKSMGNRIYGCDDCQLVCPWNRFSPLTEQNDFHRRSSLNQADLVELFLWDEQTFLKYMEGSAIRRIGHTKWLRNLSVAMGNAPFSQRIVDALKTRLGINDVLDEHVKWALMQQDQKISVRSTKLDRLIRVVTKGLPRDA

SEQ ID NO: 81953 - protein, 372 aa, Vibrio casei
  REGION 1..372: note = tr|A0A368LFV3|A0A368LFV3_9VIBR Epoxyqueuosine reductase OS=Vibrio casei OX=673372 GN=queG PE=3 SV=1
MNYNELADNIKIWGQELGFQKVGITDIDLSDHEAQLQRWLDAGYHGEMDWMARHGMMRARPAELHPGTIRVISVRMDYLPPEAQFASNLSDPNQAYISRYSLGRDYHKLIRNQLKKLGQKIEQEVGQLGYRPFVDSAPILERPLAQKAGLGWAGKHSLILDKEAGSWFFLGELLVDIPLPIDLPQTNQCGKCTACMTSCPTNAIVEEGVIDARLCISYLTIEFNGIIPENLRSKMGNRIYGCDDCQLVCPWNREADVTTQEAFHRKDIFQDASLISLFQWNEPDFLKNMEGSAIRRIGHQQWLRNIAVALGNAPFSESIIKVLESRLGISNVLDIHIHWALSEQRNKHKNLERNTKLERLVRIIGKGLPRDA

SEQ ID NO: 81954 - protein, 380 aa, Vibrio celticus
  REGION 1..380: note = tr|A0A1C3JHS3|A0A1C3JHS3_9VIBR Epoxyqueuosine reductase OS=Vibrio celticus OX=446372 GN=queG PE=3 SV=1
MNLDHLAEKIKIWGKELGFQKVGICDVDLSEHEAPLQAWLDAGNHGEMDWMARHGMMRARPDELHPGTIRVISARMNYLPPEAQFASNLSDTTQGYISRYSLGRDYHKLFRNQLKKLGQRIEKEVEGLDSRPFVDSAPILERPLAQKAGLGWTGKHSLILDKDAGSWFFLGELLVNIPLPTDEPSVDECGKCTACLTSCPTGAIIADGVVDARKCISYLTIEYDGVIPEEYRDAIGNRIYGCDDCQLVCPWNRHAELTEQTDFHRREDFQEADLVSLSSWDEATFLKKMEGSAIRRIGHTQWLRNIFVAMGNAPFQQRIVETLESHQGKNDMLDVHIEWALQKQLQQLPNASCVQKSNSKISTKKHRLIRIVEKGLPRDA

SEQ ID NO: 81955 - protein, 380 aa, Vibrio chagasii
  REGION 1..380: note = tr|A0A2S7V9S6|A0A2S7V9S6_9VIBR Epoxyqueuosine reductase OS=Vibrio chagasii OX=170679 GN=queG PE=3 SV=1
MNLDHLAEKIKIWGKELGFQKVGICDIDLSEHEAPLQAWLDAGHHGEMDWMARHGMMRARPNELHPGTIRVISARMNYLPPEAQFASNLSDTTQGYISRYSLGRDYHKLFRNQLKKLGQRIEKEVEGLDSRPFVDSAPILERPLAQKAGLGWTGKHSLILDKDAGSWFFLGELLVNIPLPVDEPSVDECGKCTACITSCPTGAIIADGVVDARKCISYLTIEYDGVIPEEFREAIGNRIYGCDDCQLVCPWNRHADITEQKDFHRREDFKEADLVLLASWDEATFLKKMEGSAIRRIGHTQWLRNIYVAMGNAPFQQRIVETLESHRGNSDMLDVHIEWALEKQLQQLPSIIEVQKGNSKVATKKHRLIRIVEKGLPRDA

SEQ ID NO: 81956 - protein, 369 aa, Vibrio cholerae
  REGION 1..369: note = tr|A0A0E4CBV0|A0A0E4CBV0_VIBCL Epoxyqueuosine reductase OS=Vibrio cholerae OX=666 GN=queG PE=3 SV=1
MDYQQLANQIKQWAIELGFEKVGICDVDLSEHEPALQAWLDAGYHGEMDWMARHGMMRARPAELLPGTLRVISARINYLPPQAQFASNLSDPNQAYISRYALGRDYHKLVRNLLKKLGEKIEQEVGKLGYRPFVDSAPILERPLAQKAGLGWTGKHSLILDKENGSWFFLGELLVDIPLPVDEPSENQCGKCTACITSCPTNAIVAEGVVDARRCVSYLTIEYSGVIPLEFRRAMGNRIYGCDDCQLVCPWNRLAPLTQQSDFHRRQSLNNADLVVLFEWDEATFLKNMEGSAIRRIGHQQWRRNLIIAMGNAPYSPRIIDTLQRHLGQSELLDEHIHWALEEQTQKTATPRQHARLIRIIEKGLPRDA

SEQ ID NO: 81957 - protein, 369 aa, Vibrio cholerae
  REGION 1..369: note = tr|C3LR74|C3LR74_VIBCM Epoxyqueuosine reductase; OS = Vibrio cholerae serotype O1 (strain M66-2) OX=579112; GN = queG PE=3 SV=1
MDYQQLANQIKQWAIELGFEKVGICDVDLSEHEPALQAWLDAGYHGEMDWMARHGMMRARPAELLPGTLRVISARINYLPPQAQFASNLSDPNQAYISRYALGRDYHKLVRNQLKKLGEKIEQEVGKLGYRPFVDSAPILERPLAQKAGLGWTGKHSLILDKENGSWFFLGELLVDIPLPVDEPSENQCGKCTACITSCPTNAIVAEGVVDARRCVSYLTIEYSGVIPLEFRRAMGNRIYGCDDCQLVCPWNRFAPLTQQSDFHRRQSLNNADLVVLFEWDEATFLKNMEGSAIRRIGHQQWRRNLIIAMGNAPYSPRIIDTLQRHLGQSELLDEHIHWALEEQTQKTATPRQHARLIRIIEKGLPRDA

SEQ ID NO: 81958 - protein, 373 aa, unidentified
  source 1..373: note = Vibrio cidicii
  REGION 1..373: note = tr|A0A151KVG2|A0A151KVG2_9VIBR Epoxyqueuosine reductase OS=Vibrio cidicii OX=1763883 GN=queG PE=3 SV=1
MDYQQLAQQIKIWGAELGFQKVGICDVDLREHEAELQKWLDAGYHGSMDWMARHGMMRARPNELLPGTIRVISVRINYLPPQAQFAANLADKTQAYISRYALGRDYHKLVRKQLSELGKRIENAVGAFGYRPFVDSAPILERPLAQKAGLGWTGKHSLILDKEAGSWFFLGELLVDLPLPVDEPSTDDCGKCKACITSCPTQAIVDDKIVDARRCISYLTIEFSGVIPEEFRKAIGNRIYGCDDCQLVCPWNREAELTEQSDFHRRDSLHQADLVNLFLWDEPTFLKKMEGSAIRRIGHLQWLRNLAIAMGNAPYSLKIVQALQERKGQNELLDVHIDWALAEQRNQSADSSTIDIKNQRLIRIVEKGLPRDA

SEQ ID NO: 81959 - protein, 370 aa, Vibrio cincinnatiensis
  REGION 1..370: note = tr|A0A1T4S9M7|A0A1T4S9M7_VIBCI Epoxyqueuosine reductase OS=Vibrio cincinnatiensis DSM 19608 OX=1123491; GN = queG PE=3 SV=1
MDYQALADQIKHWAYDLGFDKVGICDIDLSEHEPALQSWLDAGYHGEMDWMARHGMLRARPAELLPGTLRVISARINYLPPQAQFATNLSDPSQAYISRYALGRDYHKLVRNRLKKLAEKIEQEVGQLGYRPFVDSAPILERPLAQKAGLGWAGKHSLILDKEAGSWFFLGELLVDIPLPIDQPSENQCGQCRACITSCPTKAIIKDGVVDARRCISYLTIEYSGVIPEEFRHAIGNRIYGCDDCQLVCPWNRFADLTQEPDFHRRDQLKNADLIELFEWNEQTFLRNMEGSPIRRIGHQQWQRNLIIAMGNAPYSQRIIDTLEKKYGMNELLDIHIDWALKCQRQQISYITNKHQRLIRIVKKGLPRNA

SEQ ID NO: 81960 - protein, 370 aa, Vibrio comitans
  REGION 1..370: note = tr|A0A4Y3IU27|A0A4Y3IU27_9VIBR Epoxyqueuosine reductase OS=Vibrio comitans NBRC 102076 OX=1219078; GN = queG PE=3 SV=1
MNLQYLADQIKLWGNELGFQKVGITDVDLSSHEEGLKKWIAHGYHGSMEWMERNEDKRLHPEKLHPGTLRVISVRLDYLPPEAHFASNLSDPAQAYISRYALGRDYHKLMRNKLKHLAKKIEDELGELNYRPFVDSAPVLERPLAEKAGLGWTGKHSLLLDEDAGSWFFLGELLIGLPLPVDAPVENQCGKCRSCITSCPTGAIIEDGVIDARKCISYLTIEYDGIIESELSDAMGNRIYGCDDCQLVCPFNRHAQLTQQTDFHRRESIKDSNLITLFLWSEQEFLKNFEGSAIRRIGHLQWLRNLAIALGNSAYSDEAITALDSRLGLCDVLDHHITYAIERLNSQTPLTSTKQQRLIRIVQKGLPRDA

SEQ ID NO: 81961 - protein, 370 aa, Vibrio coralliilyticus
  REGION 1..370: note = tr|A0A2A2CI72|A0A2A2CI72_9VIBR Epoxyqueuosine reductase OS=Vibrio coralliilyticus OX=190893 GN=queG PE=3; SV = 1
MNYQELANKIKVWAQELGFQKAGICDVDLSEHEAALQKWLDAGYHGEMDWMARHGMMRARPAELLPGTVRVISVRMDYLPPEALFAANLADPTQAYVSRYALGRDYHKLVRNQLKKLGQKIEQEVGQFGYRPFVDSAPILERPLAQKAGLGWTGKHSLILDKDCGSWFFLGELLIDLPLPIDEAHQGDCGKCTACITSCPTQAIIEEGVVDARRCISYLTIEFDGVIPEEFRKPMGNRIYGCDDCQLVCPWNRFSELTEREDFHRRQALTSPDLVTLFAWDEKTFLKNMEGSAIRRIGHIQWLRNLSIAMGNAPYSANIIEALEQRIGLSEVLDEHIRWAIEQQIAQIPHSSTKLNRLIRIVQKGLPRDA

SEQ ID NO: 81962 - protein, 370 aa, Vibrio coralliilyticus
  REGION 1..370: note = tr|A0A2A2MJB8|A0A2A2MJB8_9VIBR Epoxyqueuosine reductase OS=Vibrio coralliilyticus OX=190893 GN=queG PE=3; SV = 1
MNYQELANKIKVWAQELGFQKAGICDVDLSEHEAALQKWLDAGYHGEMDWMARHSMMRARPAELLPGTVRVISVRMDYLPPEALFAANLADPTQAYISRYALGRDYHKLVRNQLKKLGQKIEQEVGQFGYRPFVDSAPILERPLAQKAGLGWTGKHSLILDKDCGSWFFLGELLIDLPLPIDEAHQGDCGKCTACITSCPTQAIIEEGVVDARRCISYLTIEFDGVIPEEFRKPMGNRIYGCDDCQLVCPWNRFSELTEREDFHRRQALTSPDLVTLFAWDEKTFLKNMEGSAIRRIGHIQWLRNLSIAMGNAPYSANIIEALEQRIGLSEVLDEHIRWAIEQQIAQIPHSSTKLNRLIRIVQKGLPRDA

SEQ ID NO: 81963 - protein, 386 aa, Vibrio crassostreae
  REGION 1..386: note = tr|A0A4R3P8G5|A0A4R3P8G5_9VIBR Epoxyqueuosine reductase OS=Vibrio crassostreae OX=246167 GN=queG PE=3; SV = 1
MNLDHLAEKIKIWGKELGFQKVGICDIDLSEHEAPLQAWLDAGHHGEMDWMARHGMMRARPDELHPGTIRVISARMNYLPPEAQFASNLSDTTQGYISRYSLGRDYHKLFRNQLKKLGQRIEKEVEGLDSRPFVDSAPILERPLAQKAGLGWTGKHSLILDKDAGSWFFLGELLVNIPLPTDEPSVDECGKCTACITSCPTGAIIDDGVVDARKCISYLTIEYDGVIPEEFRDAIGNRIYGCDDCQLVCPWNRHAELTEQTDFHRREDFQEADLVALSSWDEATFLKKMEGSAIRRIGHTQWLRNIFVAMGNAPFQQRIVETLESHQGKNEMLDVHIEWALNKQLQQLPNASGVQQDNCVQKSNSKISTKKHRLIRIVEKGLPRDA

SEQ ID NO: 81964 - protein, 392 aa, Vibrio crassostreae
  REGION 1..392: note = tr|A0A1B1BRC5|A0A1B1BRC5_9VIBR Epoxyqueuosine reductase OS=Vibrio crassostreae 9CS106 OX=1191300 GN=queG; PE = 3 SV=1
MNLDHLAEKIKIWGKELGFQKVGICDVDLSEHEAPLQAWLDAGNHGEMDWMARHGMMRARPDELHPGTIRVISARMNYLPPEAQFASNLSDTTQGYISRYSLGRDYHKLFRNQLKKLGQRIEKEVEGLDSRPFVDSAPILERPLAQKAGLGWTGKHSLILDKDAGSWFFLGELLVNIPLPTDEPSVDECGKCTACITSCPTGAIIADGVVDARKCISYLTIEYDGVIPEEYRDAIGNRIYGCDDCQLVCPWNRHAELTEQTDFHRREDFQEADLVSLSSWDEATFLKKMEGSAIRRIGHTQWLRNIFVAMGNAPFQQRIIETLESHQGKNEMLDVHIEWALNKQLQQLPNASSVQEDSSTQKNSCVQKSNSKISTKKHRLIRIVEKGLPRDA

SEQ ID NO: 81965 - protein, 375 aa, Vibrio diabolicus
  REGION 1..375: note = tr|A0A2L2K6M3|A0A2L2K6M3_9VIBR Epoxyqueuosine reductase OS=Vibrio diabolicus OX=50719 GN=queG PE=3 SV=1
MNYEQLAQQIKIWGKELGFQKVGICDVDLSEHEAALQKWLDAGYHGSMDWMARHGMMRARPNELLPGTVRVISVRMDYLPPEALFASNLANKNHAYISRYALGRDYHKLVRKQLNKLGKLIEQEVGQYGYRPFVDSAPILERPLAQKAGLGWTGKHSLILDQDCGSWFFLGELLIDLPLPVDEPSVDQCGKCKACITSCPTQAIVEDKVVDARRCISYLTIEFDGVIPEEFRKPMGNRIYGCDDCQLVCPWNRYADITEQSDFHRRDSFKNPDLVDMFNWDEATFLKNMEGSAIRRIGHIQWLRNIAVALGNAEYSQRVIDALESRQGENKLLDEHIKWALAEQLNQLPIENKASTETKKQRLIRIVEKGLPRDA

SEQ ID NO: 81966 - protein, 370 aa, Vibrio diazotrophicus
  REGION 1..370: note = tr|A0A329E4N4|A0A329E4N4_VIBDI Epoxyqueuosine reductase OS=Vibrio diazotrophicus OX=685 GN=queG PE=3 SV=1
MNYQALADQIKQWATELGFEKVGICDIDLHEHEAALQKWLDAGYHGEMDWMARHGMMRARPAELFPGTIRVISARMNYLPPQAQFASNLSDPTQAYISRYALGRDYHKLVRNQLKKLGEKIENEVEKLSYRPFVDSAPILERPLAQKAGLGWTGKHSLILDKDAGSWFFLGELLVDIPLPVDTPSENECGKCKACITSCPTGAIIADGIVDARKCISYLTIEFDGIIPEEFRTAMGNRIYGCDDCQLVCPWNRFSELTQKKDFHRRESFESPDLLSLFEWDEKTFLQKMEGSAIRRIGHLQWQRNIAIALGNAPYSEKIVSALENAKGQSETLDVHLNWAIEKQLANLPSSIASHQRLIRIIEKGLPRDA

SEQ ID NO: 81967 - protein, 370 aa, Vibrio diazotrophicus
  REGION 1..370: note = tr|A0A2J8GDS2|A0A2J8GDS2_VIBDI Epoxyqueuosine reductase OS=Vibrio diazotrophicus OX=685 GN=queG PE=3 SV=1
MNYQALADQIKQWATELGFEKVGICDIDLHEHEMALQKWLDAGYHGEMDWMARHGMMRARPAELLPGTIRVISARMNYLPPKAQFASNLSDPTQAYISRYALGRDYHKLVRNQLKKLGEKIEKEVEKLSYRPFVDSAPILERPLAQKAGLGWTGKHSLILDKEAGSWFFLGELLVDIPLPVDTPSENECGKCKACITSCPTGAIVADGIVDARKCISYLTIEFDGIIPEEFRTAMGNRIYGCDDCQLVCPWNRFSDLTQQKDFHRRESFESPDLLSLFAWDEKTFLQKMEGSAIRRIGHLQWQRNIAIALGNAPYSEQIVSALEKAKGQSETLDVHLNWAIEKQLANLPSSVTSHQRLIRIVQKGLPRDA

SEQ ID NO: 81968 - protein, 370 aa, unidentified
  source 1..370: note = Vibrio europaeus
  REGION 1..370: note = tr|A0A178JC47|A0A178JC47_9VIBR Epoxyqueuosine reductase OS=Vibrio europaeus OX=300876 GN=queG PE=3 SV=1
MNYQELADKIKIWGQELGFQKVGICDVDLSEHEAELQKWLDAGYHGEMDWMARHGMMRARPAELLPGTVRVISVRMNYLPPEAQFAANLSDPTQAYISRYSLGRDYHKLIRNQLKKLGQKIEQEVGSFGYRPFVDSAPILERPLAQKAGLGWTGKHSLILDKECGSWFFLGELLIDLPLPVDEPSVDECGKCKACITSCPTQAIIGDGIVDARRCISYLTIELDGVIPEEFRKAMGNRIYGCDDCQLVCPWNRFSELTDQQDFHRREALTNANLVELFKWDEATFLKNMEGSAIRRIGHLQWLRNLSIAMGNAPYSIDIIEALENRLGISETLDIHIKWALEQQRTQIPAQSTTLNRLIRIVEKGLPRDA

SEQ ID NO: 81969 - protein, 370 aa, Vibrio ezurae
  REGION 1..370: note = tr|U3AN50|U3AN50_9VIBR Epoxyqueuosine reductase; OS = Vibrio ezurae NBRC 102218 OX=1219080 GN=queG PE=3 SV=1
MNLHHLAEQIKIWGKELGFQKVGISDLDLSDSEEELHHWLGKGYNGNMEWLERNIDKRLYPDRLHPGTLRIISVRLDYLPPEARFASNLSDSTEAYISRYALGRDYHKLMRNKLKKLAQKIEQEVGELNYRPFVDSAPVLERPLAEKAGLGWTGKHSLILNDDTGSWFFLGELMIGLPLPIDEPVENQCGKCRSCMTSCPTDAIVEEGTVDARRCISYLTIEYDGIIDKELADAMGNRIYGCDDCQLVCPFNRFASITEQSDFHRRESIENSNLLSLFAWSEAEFLKNFEGSAIRRIGYLQWLRNLSIAIGNSHYSVDAISALENRLGMGEVLDHHIHYAIERLNSQSDCTSKKQQRLIRIVQKGLPRDA

SEQ ID NO: 81970 - protein, 373 aa, Vibrio fluvialis
  REGION 1..373: note = tr|A0A1L9KTR6|A0A1L9KTR6_VIBFL Epoxyqueuosine reductase OS=Vibrio fluvialis OX=676 GN=queG PE=3 SV=1
MDYQQLAQQIKQWGKELGFEKVGICDIDLTEHEAQLQKWLDAGYHGSMDWMARHGMMRARPAELLPGTVRVISVRMNYLPPQAQFAADLADPTQGYISRYALGRDYHKLVRKQLSALAKKIETEVGQFGYRPFVDSAPILERPLAQKAGLGWTGKHSLILDKDAGSWFFLGELLIDLPLPVDQASEEACGKCQACITSCPTQAIVDNKVVDARRCISYLTIEHDGIIAPEFRKAIGNRIYGCDDCQLVCPWNRYADLTQQGDFHRRSPLNNTSLIALFQWDEPTFLKNMEGSAIRRIGHLQWLRNIAVAMGNAPFSPQIVTALESRKGMSELLDEHINWALEEQAAQAGHFSLDVKKQRLIRIVDKGLPRDAR

SEQ ID NO: 81971 - protein, 370 aa, Vibrio fluvialis
  REGION 1..370: note = tr|S7HUF1|S7HUF1_VIBFL Epoxyqueuosine reductase; OS = Vibrio fluvialis PG41 OX=1336752 GN=queG PE=3 SV=1
MDYHALADQIKSWAIELGFEKVGICDVDLSQHEAKLQQWLDAGYHGEMDWMARHGMMRARPAELLPGTVRVISARMNYLPPQAQFASNLNNPAHAYISRYALGRDYHKLVRNQLKKLGEKIEAAVGELGYRPFVDSAPILERPLAQKAGLGWTGKHSLILDKDAGSWFFLGELLVDIPLPVDTPSVDQCGKCRACVTSCPTGAIVADGVVDARRCISYLTIEYDGVIPLEFRKAMGNRIYGCDDCQLVCPWNRYADLTQQSDFHRRPAFNEPDLVTLFEWDEATFLRNMEGSAIRRIGHQQWQRNLIIAMGNAPYSSRIIDALTRKQGQSELLDEHIQWALEEQERQLPFSNTKHQRLVRIVEKGLPRDA

SEQ ID NO: 81972 - protein, 387 aa, Vibrio fortis
  REGION 1..387: note = tr|A0A066UVY7|A0A066UVY7_9VIBR Epoxyqueuosine reductase OS=Vibrio fortis OX=212667 GN=queG PE=3 SV=1
MNLDHLAEQIKTWGQELGFQKVGICDVDLSEHEAALQAWLDAGYHGDMDWMARHGMMRARPDELHPGTVRVISARMNYLPPEAQFATNLADSTQGYISRYALGRDYHKLFRNQLKKLGQKIEKEIEGLDYRPFVDSAPILERPLAQKAGLGWTGKHSLILDKEAGSWFFLGELLVNIPLPVDEPNTEECGKCTACMTSCPTGAIVEEGIVDARRCISYLTIEFDGVIPLEFREAIGNRIYGCDDCQLVCPWNRHADVSKQSDFHRREAFQDIDLVTLASWDEATFLKKMEGSAIRRIGHTQWLRNLFVAMGNAPFQQRIIDILESHLGNDEMLDEHIQWALEKQNQQLPNTVQTALSTISPQESVNKIESKKKRLIRIVEKGLPRDA

SEQ ID NO: 81973 - protein, 370 aa, Vibrio furnissii
  REGION 1..370: note = tr|A0A0Q2RIR3|A0A0Q2RIR3_VIBFU Epoxyqueuosine reductase OS=Vibrio furnissii OX=29494 GN=queG PE=3 SV=1
MDYHALADQIKHWAIELGFEKVGICDVDLSQHEAALQQWLDAGYHGEMDWMARHGMMRARPAELLPGTLRVISARMNYLPPQAQFASNLNNPTHAYISRYALGRDYHKLLRNQLKKLGVKIEAAVGELGYRPFVDSAPILERPLAQKAGLGWTGKHSLILDQDSGSWFFLGELLVDIPLPVDTPSEDQCGKCRACVTSCPTGAIVADGVVDARRCISYLTIEYDGVIPLEFRKAVGNRIYGCDDCQLVCPWNRFADLTQQSDFHRRPAFNEPDLVALFAWDEATFLRNMEGSAIRRIGHQQWQRNLIIAMGNAPYSSRIIDALTRHQGQSALLDEHIEWALAEQQAQLPFSNTKHQRLVRIIEKGLPRDA

SEQ ID NO: 81974 - protein, 370 aa, Vibrio furnissii
  REGION 1..370: note = tr|F0LNQ1|F0LNQ1_VIBFN Epoxyqueuosine reductase; OS = Vibrio furnissii (strain DSM 14383 / NCTC 11218 / VL 6966) OX=903510 GN=queG PE=3 SV=1
MDYHALADQIKHWAIELGFEKVGICDVDLSQHEAALQQWLDAGYHGEMDWMARHGMMRARPAELLPGTLRVISARMNYLPPQAQFASNLNNPTHAYISRYALGRDYHKLLRNQLKKLGEKIEAAVGELGYRPFVDSAPILERPLAQKAGLGWTGKHSLILDQDSGSWFFLGELLVDIPLPVDTPSEDQCGKCRACVTSCPTGAIVADGVVDARRCISYLTIEYDGVIPLEFRKAMGNRIYGCDDCQLVCPWNRFADLTQQSDFHRRPAFNEPDLVALFAWDEATFLRNMEGSAIRRIGHQQWQRNLIIAMGNAPYSSRIIDALTRHQGQSALLDEHIEWALAEQQAQLPFSNTKHQRLVRIIEKGLPRDA

SEQ ID NO: 81975 - protein, 370 aa, unidentified
  source 1..370: note = Vibrio galatheae
  REGION 1..370: note = tr|A0A0F4NFH8|A0A0F4NFH8_9VIBR Epoxyqueuosine reductase OS=Vibrio galatheae OX=579748 GN=queG PE=3 SV=1
MNYQALADKIKIWGQELGFQKVGICDVDLSEHEAQLQKWLDAGYHGEMDWMARHGMMRARPAELLPGTVRVISARMDYLPPQAQFASNLSDPTQAYISRYALGRDYHKLIRNQLKKLGEKIALEVSNLGYRPFVDSAPILERPLAQKAGLGWTGKHSLILDKEAGSWFFLGELLVDLPLPVDDASVDQCGKCKACITSCPTQAIVADGIVDARRCISYLTIEFDGVIPEEFRPSIGNRIYGCDDCQLVCPWNRFAKLTEQSDFHRRESLNQADLVTLFMWDEETFLTNMQGSAIRRIGHLQWLRNLSIAMGNAPYSKNIVKALESRLGVTETLDIHIQWALAQQRGQIPLQSTQLKRLIRIVEKGLPRDA

SEQ ID NO: 81976 - protein, 371 aa, Vibrio gazogenes
  REGION 1..371: note = tr|A0A1Z2SEA2|A0A1Z2SEA2_VIBGA Epoxyqueuosine reductase OS=Vibrio gazogenes OX=687 GN=queG PE=3 SV=1
MDYQALADKIKIWAQALGFEKVGICDVDLTEHEAELQRWLDAGYHGDMDWMARHGMLRARPQELHPGTIRVISVRMNYLPPQAHFASNLDTPTHAYISRYALGRDYHKLVRKQLKKLGDKIRQEVGELNARPFVDSAPILERPLAQKAGLGWTGKHSLILDQDAGSWFFLGELLVDIPLPVDQPSQNQCGHCRACVTSCPTGAIVADGVVDARRCISYLTIEFSGIIPLEFRKAIGNRIYGCDDCQLVCPWNRAASLTEQSDFHRRNVFAHPDLVELFEWEEETFLQNTEGSAIRRIGHQQWLRNIAIAMGNAPYSEQIVLALEKRMGETELLDVHIRWSLEQHQQKQRQEQNRKHDRLIRIIQKGLPRDA

SEQ ID NO: 81977 - protein, 371 aa, Vibrio gazogenes
  REGION 1..371: note = tr|A0A1M5H5E1|A0A1M5H5E1_VIBGA Epoxyqueuosine reductase OS=Vibrio gazogenes DSM 21264 = NBRC 103151; OX = 1123492 GN=queG PE=3 SV=1
MDYQALADKIKIWAQALGFEKVGICDVDLTEHEAELQRWLDAGYHGDMDWMARHGMLRARPQELHSGTIRVISVRMNYLPPQAHFASNLDTPTHAYISRYALGRDYHKLVRKQLKKLGDKIRQEVGELNDRPFVDSAPILERPLAQKAGLGWTGKHSLILDQDAGSWFFLGELLVDIPLPVDQPSQNQCGHCRACVTSCPTGAIVADGVVDARRCISYLTIEFSGVIPLEFRKAIGNRIYGCDDCQLVCPWNRSASLTEQSDFHRRDVFAHPDLVELFAWEEETFLQNTEGSAIRRIGHQQWLRNIAIAMGNAPYSERIVLALEKRLGETELLDVHIRWSLEQHQQKQQQEQNRKHERLIRIIQKGLPRDA

SEQ ID NO: 81978 - protein, 382 aa, unidentified
  source 1..382: note = Vibrio genomosp.
  REGION 1..382: note = tr|A0A1B9QZE2|A0A1B9QZE2_9VIBR Epoxyqueuosine reductase OS=Vibrio genomosp. F10 OX=723171 GN=queG PE=3; SV = 1
MDYQHLADQIKIWAKELGFQKVGICDVDLSEHEPQLQKYLDAGFHGEMDWMARHGMMRARPAELLPGTIRVISARMDYLPPEAQFASNLADKTQAYISRYALGRDYHKIIRNQLKKLGKKIEQEVGTYGYRPFVDSAPILERPLAEKAGLGWAGKHSLLLDKETGSWFFLGELLVDLPLPIDQPSQNECGKCSACITSCPTQAIIADGVVDARRCISYLTIEYNGVIPEEFRKPMGNRIYGCDDCQLVCPWNRFSTITEQGDFHRRDTLADANLVSLFSWQEEEFLQKMEGSAIRRIGYIQWLRNLSIAMGNAPFSSSIVAVLEEKLGFNDMLDIHIKWALEEQHRQLPLSLGDLEQNTIDSVEQKKQRLIRVIEKGLPRDA

SEQ ID NO: 81979 - protein, 374 aa, unidentified
  source 1..374: note = Vibrio genomosp.
  REGION 1..374: note = tr|A0A1E5D3Q2|A0A1E5D3Q2_9VIBR Epoxyqueuosine reductase OS=Vibrio genomosp. F6 str. FF-238 OX=1191298; GN = queG PE=3 SV=1
MNYDQLAIQIKIWARELGFQKVGICDVDLREHEGPLQKWLDNGYHGDMDWMARHGMMRARPDELLPGTVRVISARMNYLPPEAMFASNLSDPNLGYISRYSLGRDYHKLVRNKLKKLGQLIEQEVGQFGHRPFVDSAPILERPLAQKAGLGWTGKHSLILDKEAGSWFFLGELLIDLPLPVDTPSEDECGKCKACITSCPTNAIVDEKVVDGRRCISYLTIEFDGVIPEEFRVAIGNRIYGCDDCQLVCPWNRFSDLTDQTDFHRRTSFEEPDLLSLFSWDEDMFLKRMEGSAIRRIGHLQWLRNISIALGNAPYKLAIVEALESRFGLSDVLDTHIQWAIQQQLQQLPVDSARHSTKKQRLIRIVQKGLPRDA

SEQ ID NO: 81980 - protein, 370 aa, Vibrio halioticoli
  REGION 1..370: note = tr|V5FMR0|V5FMR0_9VIBR Epoxyqueuosine reductase; OS = Vibrio halioticoli NBRC 102217 OX=1219072 GN=queG PE=3; SV = 1
MNLHHLAEQIKLWGNELGFQKVGITDLDLSKSEQALTQWLEKGYNGNMEWMERNVDKRLYPDRLHPGTLRVISVRLDYLPPEARFASNLSDPTEAYISRYALGRDYHKLMRNKLKNLAQKIEQELGELNYRPFVDSAPVMERPLAEKAGLGWTGKHSLLLNDDTGSWFFLGELLIGLPLPIDQPVENQCGKCRSCITSCPTGAIVEEGTVDARRCISYLTIEYDGIIDSELSDAMGNRIYGCDDCQLVCPFNRFASITEQSDFHRRESIEDSNLLSLFAWSEAEFLKNFEGSAIRRIGYLQWLRNLSIAMGNGNYSAEAISALESKLGMGEVLDHHINYAIERLNSQSEFTSKKQQRLIRIVQKGLPRDA

SEQ ID NO: 81981 - protein, 376 aa, Vibrio hangzhouensis
  REGION 1..376: note = tr|A0A1H6CIB9|A0A1H6CIB9_9VIBR Epoxyqueuosine reductase OS=Vibrio hangzhouensis OX=462991 GN=queG PE=3; SV = 1
MMDFNKLASDIKVWARELGFQKVGISDINLEEQESALKNWLDAGYHGDMAWMATHQDLRIHPDKLHPNTCRIISVRMDYLPEDAAFASNLENKHSGYISRYALGRDYHKLIRNLLKKLGQKIEQEVTELGFRPFVDSAPVLERPIAQKAGLGWIGKHSLLLDQDAGSWFFLGELFIDLPLPVDEPVDNQCGKCSACVTSCPTNAILDNGVIDARRCISYLTIEYKGVIPEEYRDAIGNRIYGCDDCQLVCPWNRFAALSQQGDFQRRDAFDDTDLCRLLEWDETTFLKNMEGSAIRRIGHEQWQRNIIIAIGNAPFSQHYLEALEYVSGRTEFLDQHIEWAKQKLLKQLPESVTTNLHNKNQRLIRIVKKGLPRDA

SEQ ID NO: 81982 - protein, 375 aa, Vibrio harveyi
  REGION 1..375: note = tr|K5SYQ5|K5SYQ5_VIBHA Epoxyqueuosine reductase; OS = Vibrio harveyi OX=669 GN=queG PE=3 SV=1
MNFEQLAQQIKIWGKELGFQKVGICDVDLSEHEAALQKWLDQGYHGSMDWMARHGMMRARPNELLPGTVRVISVRMDYLPPEAKFASNLANKNHAYISRYALGRDYHKLVRKQLNKLGKLIEQEVGQFGYRPFVDSAPILERPLAQKAGLGWTGKHSLILDKDCGSWFFLGELLIDLPLPVDEPSVDQCDKCKACITSCPTQAIVDEKVVDARRCISYLTIEFDGVIPEEFRKPMGNRIYGCDDCQLVCPWNRYAEITEQEDFHRRESFEDPDLVTMFNWDEATFLKQMEGSAIRRIGHLQWLRNISVALGNAEYSQRTIDALEARRGESELLDEHIEWALAQQFNQLPANESDSIETKKKRLIRIVEKGLPRDA

SEQ ID NO: 81983 - protein, 375 aa, Vibrio harveyi
  REGION 1..375: note = tr|D0XAV4|D0XAV4_VIBH1 Epoxyqueuosine reductase; OS = Vibrio harveyi (strain 1DA3) OX=673519 GN=queG PE=3 SV=1
MNFEQLAQQIKIWGKELGFQKVGICDVDLSEHEAALQKWLDAGYHGSMDWMARHGMMRARPSELLPGTVRVISVRMDYLPPEAKFASNLANKNHAYISRYALGRDYHKLVRKQLNKLGKLIEQEVGQYGYRPFVDSAPILERPLAQKAGLGWTGKHSLILDKDCGSWFFLGELLIDLPLPVDEPSVDQCDKCKACITSCPTQAIVDDKIVDARRCISYLTIEFDGVIPEEFRKPMGNRIYGCDDCQLVCPWNRYAEVTTQEDFHRRDSFEDPDLVTMFNWDEATFLKQMEGSAIRRIGHLQWLRNISVALGNAEYSQEAIDALESRRGESELLDEHINWALEQQFSQFPTNESDSIETKKKRLIRIVEKGLPRDA

SEQ ID NO: 81984 - protein, 371 aa, Vibrio hepatarius
  REGION 1..371: note = tr|A0A0M0HVC4|A0A0M0HVC4_9VIBR Epoxyqueuosine reductase OS=Vibrio hepatarius OX=171383 GN=queG PE=3 SV=1
MNYQELADKIKVWAQELGFQKVGICDVDLSEHEAALQKWLDAGYHGEMDWMARHGMMRARPAELLPGTVRVISARMDYLPPQAQFAANLSDPTQAYISRYALGRDYHKLVRNQLKKLGQKIEQEVGQLGYRPFVDSAPLLERPLAQKAGLGWTGKHSLILDKECGSWFFLGELLVDIPLPVDEAKQNDCGKCTACITSCPTQAIVEEGIVDARRCISYLTIEFDGVIPEEFRKAMGNRIYGCDDCQLVCPWNRFAELTQQEDFHRRPSFNSPDLVSLFSWSETEFLKNMEGSPIRRIGHLQWLRNLSVAMGNAPYSKSIVSALESRRGLSDVLDQHIDWALAQQLAQLPYNETSKHGRLIRIIQKGLPRDA

SEQ ID NO: 81985 - protein, 373 aa, Vibrio ichthyoenteri
  REGION 1..373: note = tr|F9S879|F9S879_9VIBR Epoxyqueuosine reductase; OS = Vibrio ichthyoenteri ATCC 700023 OX=870968 GN=queG PE=3; SV = 1
MNYQELADNIKIWAKELGFQKVGICDVNLQEHEATLQKWLDAGYHGSMDWMARHGMMRARPNELLPGTVRVISVRMDYLPPKAQFATNLNDPTQAYISRYALGRDYHKLIRNQLKKLGQIIEQEVGAFGYRPFVDSAPILERPLAQKAGLGWTGKHSLILDKECGSWFFLGELLIDLPLPVDTPSEDQCGKCKACITSCPTNAIVEDGVVDARRCISYLTIEFDGVIPEKFRKPMGNRIYGCDDCQLVCPWNRFSSLTDQNDFHRRQSLHNPNLIELFAWDEANFLKNMEGSAIRRIGHIQWLRNLSIAMGNAPYSQEIVEALQSRKGISPLLDEHIDWALAEQQQQVREKTGIDIAHQRLIRIINKGIPRDA

SEQ ID NO: 81986 - protein, 370 aa, Vibrio inusitatus
  REGION 1..370: note = tr|A0A4Y3I083|A0A4Y3I083_9VIBR Epoxyqueuosine reductase OS=Vibrio inusitatus NBRC 102082 OX=1219070; GN = queG PE=3 SV=1
MNLQYLAEQIKIWGNELGFQKIGITDVDLSSHEEGLKSWVAHGYHGSMEWMERNEDKRLHPEKLHPGTLRVISVRLDYLPPEAHFASNLSDPTQAYISRYALGRDYHKLMRNKLKHLAKKIEDELGELNYRPFVDSAPVLERPLAEKAGLGWTGKHSLLLDEDAGSWFFLGELLIGLPLPVDAPVENQCGKCRSCITSCPTGAIIEEGVIDARKCISYLTIEYDGIIDSKLSDAMGNRIYGCDDCQLVCPFNRHAKLTQQADFHRRESIKDSNLMTLFSWSEQEFLKNFEGSAIRRIGHLQWLRNLAIALGNSVYSDEAIMTLESKLGLCNVLDHHITYAIERLKSQPPLTSTKQQRLIRIVQKGLPRDA

SEQ ID NO: 81987 - protein, 376 aa, unidentified
  source 1..376: note = Vibrio ishigakensis
  REGION 1..376: note = tr|A0A0B8PFY5|A0A0B8PFY5_9VIBR Epoxyqueuosine reductase OS=Vibrio ishigakensis OX=1481914 GN=queG PE=3; SV = 1
MDLCQLAEKIKVWGKELGFQQLGITDTDLSLHEQGLQRWIDEGYHGEMSWMERNHEKRIHPEELHPGAVRVISVRLDYLPPQAGFASNLEDTSTAYISRYALGRDYHKLMRNRLKQLGQKIEAEIASNPEFEALNYRPFVDSAPVLERPLAEKAGLGWRGKHSLLLNKEAGSWFFLGEILIGLPLPVDTPAEDNCGKCTACMTSCPTGAIVEEGVVDARKCISYLTIEYDGVIDAELSQAMGNRIYGCDDCQLVCPHNRAAGLTSIEDFHRREALTDSKLLNLFSWDEKTFLKNFEGSAIRRIGYLQWLRNLSIAIGNGPFSHDAIEALESKLGLGEVLDTHINEALERLHQQRPNRSTKKERLIRIVQKGLPRDA

SEQ ID NO: 81988 - protein, 376 aa, unidentified
  source 1..376: note = Vibrio ishigakensis
  REGION 1..376: note = tr|A0A0B8QJK3|A0A0B8QJK3_9VIBR Epoxyqueuosine reductase OS=Vibrio ishigakensis OX=1481914 GN=queG PE=3; SV = 1
MDLCQLAEKIKVWGKELGFQQVGITDTDLSLHEQGLQRWIDEGYHGEMSWMERNHEKRIHPEELHPGAVRVISVRLDYLPPQAGFASNLEDTSTAYISRYALGRDYHKLMRNRLKQLGQQIEAEIASNPEFEALNYRPFVDSAPVLERPLAEKAGLGWRGKHSLLLNKEAGSWFFLGEILIGLPLPVDTPAEDNCGKCTACMTSCPTGAIVEEGVVDARKCISYLTIEYDGVIDAELSQAMGNRIYGCDDCQLVCPHNRAAGLTSIEDFHRREALTDSKLLNLFSWDEKTFLKNFEGSAIRRIGYLQWLRNLSIAIGNGPFSHDAIEALESKLGLGEVLDTHINEALERLHQQRPNRSTKKERLIRIVQKGLPRDA

SEQ ID NO: 81989 - protein, 375 aa, unidentified
  source 1..375: note = Vibrio jasicida
  REGION 1..375: note = tr|A0A2S7V8S0|A0A2S7V8S0_9VIBR Epoxyqueuosine reductase OS=Vibrio jasicida OX=766224 GN=queG PE=3 SV=1
MNFEQLAQQIKIWGKELGFQKVGICDVDLSEHEAALQKWLDAGYHGSMDWMARHGMMRARPDELLPGTVRVISVRMNYLPPEAHFASNLANKNHAYISRYALGRDYHKLVRKQLNKLGKLIEQEVGQYGYRPFVDSAPILERPLAQKAGLGWTGKHSLILDKDCGSWFFLGELLIDLPLPVDEPSVDQCDKCKACITSCPTQAIVEDKVVDARRCISYLTIEFDGVIPEEFRKPIGNRIYGCDDCQLVCPWNRYAELTEQEDFHRRDSFEEPDLLTMFHWDEATFLKQMEGSAIRRIGHVQWLRNISVALGNAEYSQQIIEALENRRGESELLDEHIEWALTQQINQLPTNESDSVETKKKRLIRIVEKGLPRDA

SEQ ID NO: 81990 - protein, 380 aa, Vibrio kanaloae
  REGION 1..380: note = tr|A0A4U1YFN1|A0A4U1YFN1_9VIBR Epoxyqueuosine reductase OS=Vibrio kanaloae OX=170673 GN=queG PE=3 SV=1
MNLDHLAEKIKIWGKELGFQKVGICDVDLSEHEAPLQAWLDAGNHGEMDWMARHGMMRARPDELHPGTIRVISARMNYLPPEAQFASNLSDTTQGYISRYSLGRDYHKLFRNQLKKLGQKIEKEVEGLDSRPFVDSAPILERPLAQKAGLGWTGKHSLILDKEAGSWFFLGELLVNIPLPVDEPSVDECGKCTACITSCPTGAIIDDGIVDARKCISYLTIEFDGIIPEEYREAIGNRIYGCDDCQLVCPWNRHADITDQKDFHRREDFEESDLVALSSWDEATFLKRMEGSAIRRIGHTQWLRNIFVAMGNAPFQQRIVESLESYRGQSELLDVHIEWALGKQLQQLPNANREQEGHNKVSTKKHRLIRIVEKGLPRDA

SEQ ID NO: 81991 - protein, 380 aa, Vibrio kanaloae; identical to SEQ ID NO: 81990
  REGION 1..380: note = tr|A0A1E5DYD1|A0A1E5DYD1_9VIBR Epoxyqueuosine reductase OS=Vibrio kanaloae 5S-149 OX=1191299 GN=queG; PE = 3 SV=1

SEQ ID NO: 81992 - protein, 386 aa, Vibrio lentus
  REGION 1..386: note = tr|A0A2N7IFF5|A0A2N7IFF5_9VIBR Epoxyqueuosine reductase OS=Vibrio lentus OX=136468 GN=queG PE=3 SV=1
MNLDHLAEKIKIWGKELGFQKVGICDVDLSEHEAPLQAWLDAGNHGEMDWMARHGMMRARPDELHPGTIRVISARMNYLPPEAQFASNLNDTTQGYISRYSLGRDYHKLFRNQLKKLGQRIEKEVEGFDSRPFVDSAPILERPLAQKAGLGWTGKHSLILDKDAGSWFFLGELLVNIPLPVDTPSVDECGKCTACITSCPTGAIIADGVVDARKCISYLTIEYDGVIPEEFRDAIGNRIYGCDDCQLVCPWNRHAELTEQTDFHRREDFQEADLVSLSSWDEATFLKKMEGSAIRRIGHTQWLRNIFVAMGNAPFQQRIIETLESHQGKNDMLDVHIEWALNKQLQQLPNASGVQEDNCVQKNSSKISTKKHRLIRIVEKGLPRDA

SEQ ID NO: 81993 - protein, 380 aa, Vibrio lentus
  REGION 1..380: note = tr|A0A4U2ARJ4|A0A4U2ARJ4_9VIBR Epoxyqueuosine reductase OS=Vibrio lentus OX=136468 GN=queG PE=3 SV=1
MNLDHLAEKIKIWGKELGFQKVGICDVDLSEHEAPLQAWLDAGNHGEMDWMARHGMMRARPDELHPGTIRVISARMNYLPPEAQFASNLSDTTQGYISRYSLGRDYHKLFRNQLKKLGQRIEKEVEGLDSRPFVDSAPILERPLAQKAGLGWTGKHSLILDKDAGSWFFLGELLVNIPLPVDTPSVDECGKCTACITSCPTGAIIADGVVDARKCISYLTIEYDGVIPEEFRDAIGNRIYGCDDCQLVCPWNRHAELTEQADFHRREDFQEADLVSLSSWDEATFLKKMEGSAIRRIGHTQWLRNIFVAMGNAPFQQRIIETLEFHQGKNDMLDVHIEWALNKQLQQLPNASGVQKNSSKISTKKHRLIRIVEKGLPRDA

SEQ ID NO: 81994 - protein, 370 aa, Vibrio mangrovi
  REGION 1..370: note = tr|A0A1Y6IZH2|A0A1Y6IZH2_9VIBR Epoxyqueuosine reductase OS=Vibrio mangrovi OX=474394 GN=queG PE=3 SV=1
MDYQALADKIKIWAQELGFEKVGICDVDLTEHEAELQRWLNAGYHGDMDWMARHGMLRARPHELHPGTVRVISVRMNYLPPLALFAGNLNTPTHAYISRYALGRDYHKLLRKQLKKLGDKIRQETGELNDRPFVDSAPILERPLAQKSGLGWTGKHSLILDKEAGSWFFLGELLIDIPLPVDQPSQNQCGSCSACITSCPTGAIIADGVVDARRCISYLTIEYSGVIPEEFRKAMGNRIYGCDDCQLVCPWNRFSSLTNQPDFHRRNVFSHPDLIELFSWKEETFLQNTEGSAIRRIGHQQWLRNIAIAMGNAPYSKNIVLALEKRLGETELLDVHIRWALEQQRNSPAEKDRKHDRLIRIIQKGLPRDS

SEQ ID NO: 81995 - protein, 355 aa, Vibrio maritimus
  REGION 1..355: note = tr|A0A090U5M8|A0A090U5M8_9VIBR Epoxyqueuosine reductase OS=Vibrio maritimus OX=990268 GN=queG PE=3 SV=1
MDLDKLASDIKVWAQELGFQKAGISDIDLLDQEAMLKQWLEAGYHGDMAWMETHQDLRIHPDKLHPNTCRIISVRMDYLPEEAGFASNLENQHAGYISRYALGRDYHKLIRNQLKKLGQRIEKEVSELGYRPFVDSAPVLERPIAEKAGLGWTGKHSLLLDKDAGSWFFLGELFVDLPLPVDAPIDNQCGKCSACITSCPTGAILEDGVIDARRCISYLTIEYKGVIPESLRVAMGNRIYGCDDCQLVCPWNRFAELGQQPDFQRRQAFNDTDLCTLLNWDETTFLKNMEGSAIRRIGHEQWQRNIIIAIGNAPYSQRYIDALEQVQGQSELLDEHIQWLYNNKPTNYPTHQVTL

SEQ ID NO: 81996 - protein, 375 aa, Vibrio maritimus
  REGION 1..375: note = tr|A0A090S772|A0A090S772_9VIBR Epoxyqueuosine reductase OS=Vibrio maritimus OX=990268 GN=queG PE=3 SV=1
MDLNKLASDIKVWAQELGFQKAGISDIDLRDQETVLKSWLEAGYHGDMAWMETHQDLRIHPDKLHPNTCRIISVRMDYLPENAGFATNLEDKHSGYISRYALGRDYHKLIRNKLKKLGQRIEQEVSELGYRPFVDSAPVLERPIAEKAGLGWTGKHSLLLDKDAGSWFFLGELFIDLPLPVDAPVENQCGKCSACVTSCPTNAILDNGVIDARRCISYLTIEYKGVIPESLRSAMGNRIYGCDDCQLVCPWNRFADLGQQPDFQRRPAFIDTDLATLLTWDEATFLKYMEGSAIRRIGHEQWQRNLIIAIGNAPYSERYIEALASIQGQSELLDEHIVWARKQLLDQLPGSVDSQLATKNQRLIRIVRKGLPRDA

SEQ ID NO: 81997 - protein, 375 aa, Vibrio mediterranei
  REGION 1..375: note = tr|A0A2C9PFB2|A0A2C9PFB2_9VIBR Epoxyqueuosine reductase OS=Vibrio mediterranei OX=689 GN=queG PE=3 SV=1
MDLNKLASDIKQWGQELGFQKVGISDIDLQDQEAVLKNWLAAGYHGDMAWMETHQDLRIHPDKLHPNTCRIISVRMDYLPEDANFASNLEDKHSGYISRYALGRDYHKLIRNLLKKLGQKIEQEVSELGYRPFVDSAPVLERPLAEKAGLGWIGKHSLLLDKEAGSWFFLGELFIDLPLPTDNPVNNECGKCRACVTSCPTGAILENGVIDARRCISYLTIEYKGVIPLEFREAMGNRIYGCDDCQLVCPWNRHAELSQRQDFQRRDSFADTNLDILLSWDEATFLKNMEGSAIRRIGHEQWQRNIIIAMGNAPFSQTYIEQLEQIEGQSDLLDPHIEWALQKQLGQLPVNLDTSLHTKNQRLIRIVKKGLPRDA

SEQ ID NO: 81998 - protein, 375 aa, Vibrio mediterranei
  REGION 1..375: note = tr|A0A3G4VHI3|A0A3G4VHI3_9VIBR Epoxyqueuosine reductase OS=Vibrio mediterranei OX=689 GN=queG PE=3 SV=1
MDLNKLASDIKQWGQELGFQKVGISDIDLQDQETVLKNWLAAGYHGDMAWMETHQDLRIHPDKLHPNTCRIISVRMDYLPEDANFASNLEDKHSGYISRYALGRDYHKLIRNLLKKLGQKIEQEVSELGYRPFVDSAPVLERPLAEKAGLGWIGKHSLLLDKEAGSWFFLGELFIDLPLPTDNPVNNECGKCRACVTSCPTGAILENGVIDARRCISYLTIEYKGVIPLEFREAMGNRIYGCDDCQLVCPWNRYAELSQRQDFQRRNSFADTNLDILLSWDEATFLKNMEGSAIRRIGHEQWQRNIIIAMGNAPFSQTYIEQLEQIEGQSDLLDPHIGWALQKQLGQLPVNLDTSLHTKNQRLIRIVKKGLPRDA

SEQ ID NO: 81999 - protein, 369 aa, unidentified
  source 1..369: note = Vibrio metoecus
  REGION 1..369: note = tr|A0A0Q0U3S7|A0A0Q0U3S7_9VIBR Epoxyqueuosine reductase OS=Vibrio metoecus OX=1481663 GN=queG PE=3 SV=1
MDYQQLADKIKQWAIELGFEKVGICDVDLSEHEHALQRWLDAGYHGEMDWMARHGMMRARPAELLPGTLRVISARINYLPPQAQFASNLNNPNQAYISRYALGRDYHKLVRSQLKKLGEKIEQEVGQLSYRPFVDSAPILERPLAQKAGLGWTGKHSLILDKETGSWFFLGELLVDIPLPVDEPSDNQCGKCTACITSCPTNAIVAEGVVDARRCISYLTIEFDGVIPLEFRSAMGNRIYGCDDCQLVCPWNRFAPLTQQNDFHRRQGLTNADLVTLFEWDETTFLKNMEGSAIRRIGHQQWRRNLIIAMGNAPYSPRIIETLQQHLGQSELLDEHIHWALAEQTNKSEPSRQHTRLIRIIEKGLPRDA

SEQ ID NO: 82000 - protein, 369 aa, unidentified
  source 1..369: note = Vibrio metoecus
  REGION 1..369: note = tr|A0A0Q0N9P4|A0A0Q0N9P4_9VIBR Epoxyqueuosine reductase OS=Vibrio metoecus OX=1481663 GN=queG PE=3 SV=1
MDYQQLADKIKQWAIELGFEKVGICDVDLSEHEHALQRWLDAGYHGEMDWMARHGMMRARPAELLPGTLRVISARINYLPPQAQFASNLNDPNQAYISRYALGRDYHKLVRSQLKKLGEKIEQEVGQLSYRPFVDSAPILERPLAQKAGLGWTGKHSLILDKETGSWFFLGELLVDIPLPVDEPSDNQCGKCTACITSCPTNAIVAEGVVDARRCISYLTIEFDGVIPLEFRSAIGNRIYGCDDCQLVCPWNRFAPLTQQNDFHRRQSLNNADLVTLFEWNEASFLKNMEGSAIRRIGHQQWRRNLIIAMGNAPYSPRIIETLQQHLGQSELLDEHIHWALAEQTNKSEPSRQHTRLIRIIEKGLPRDA

SEQ ID NO: 82001 - protein, 370 aa, Vibrio metschnikovii
  REGION 1..370: note = tr|A0A380NT75|A0A380NT75_VIBME Epoxyqueuosine reductase OS=Vibrio metschnikovii OX=28172 GN=queG PE=3; SV = 1
MDLHLLAEQIKRWAKELGFDKAGICDVDLSQHEAALQAWLDAGYHGEMEWMARHGMLRARPAELLPGTLRVISVRINYLPPQAQFAANLSDPTQAYISRYALGRDYHKLVRNQLKKLADKIEQEVGQLGYRPFVDSAPILERPLAQKAGLGWTGKHSLILDKEAGSWFFLGELLVDIPLPVDTPSENQCGQCRACMTSCPTGAIVEEGVVDARRCISYLTIEYSGVIPEEFRTAIGNRIYGCDDCQLVCPWNRFADLTQEDDFHRRDVLNNADLVALFSWDEKTFLHHMQGSAIRRIGHQQWQRNLIIAMGNAPYSQRIIDALEQKTGESELLDEHIEWALTQQREQLASITNKQQRLIRIIEKGLPRDA

SEQ ID NO: 82002 - protein, 370 aa, Vibrio metschnikovii; identical to SEQ ID NO: 82001
  REGION 1..370: note = tr|C9P986|C9P986_VIBME Epoxyqueuosine reductase; OS = Vibrio metschnikovii CIP 69.14 OX=675813 GN=queG PE=3; SV = 1

SEQ ID NO: 82003 - protein, 369 aa, Vibrio mimicus
  REGION 1..369: note = tr|A0A2J9V0F5|A0A2J9V0F5_VIBMI Epoxyqueuosine reductase OS=Vibrio mimicus OX=674 GN=queG PE=3 SV=1
MDYQQLADKIKQWAIELGFEKVGICDVDLSEHEQALQSWLDAGYHGEMDWMARHGMMRARPAELLPGTLRVISARINYLPPQAQFASNLSDPSQAYISRYALGRDYHKLVRNQLKKLGEKIEQEVGQLGYRPFVDSAPILERPLAQKAGLGWTGKHSLILDKETGSWFFLGELLVDIPLPVDEPSENQCGKCTACITSCPTNAIVAEGVVDARRCISYLTIEYSGVIPVEFRSAMGNRIYGCDDCQLVCPWNRFAPLTQQSDFHRRQSLTNADLVTLFEWDETTFLKHMEGSAIRRIGHQQWRRNLIVAMGNAPYSPRIVDTLQQHLGLSELLDEHIHWALAEQTKSSPTPRQHERLIRIIEKGLPRDA

SEQ ID NO: 82004 - protein, 369 aa, Vibrio mimicus
  REGION 1..369: note = tr|D2YE76|D2YE76_VIBMI Epoxyqueuosine reductase; OS = Vibrio mimicus VM603 OX=671074 GN=queG PE=3 SV=1
MDYQQLADKIKQWAIELGFEKVGICDVDLSEHEQTLQSWLDAGYHGEMDWMAKHGMMRARPAELLPGTLRVISARINYLPPQAQFASNLSDPSQAYISRYALGRDYHKLVRNQLKKLGEKIEQEVGQLGYRPFVDSAPILERPLAQKAGLGWTGKHSLILNKETGSWFFLGELLVDIPLPVDEPSENQCGKCTACITSCPTNAIVAEGVVDARRCISYLTIEYSGVIPVEFRSAMGNRIYGCDDCQLVCPWNRFAPLTQQSDFHRRQSLTNADLVTLFEWDEATFLKHMEGSAIRRIGHQQWRRNLIVAMGNAPYSPRIVDTLQQHLGLSELLDEHIHWALAEQTKSSPTPRQHERLIRIIEKGLPRDA

SEQ ID NO: 82005 - protein, 375 aa, Vibrio mytili
  REGION 1..375: note = tr|A0A0C3I8X4|A0A0C3I8X4_9VIBR Epoxyqueuosine reductase OS=Vibrio mytili OX=50718 GN=queG PE=3 SV=1
MNYEQLAKQIKIWGKELGFQKVGICDIDLSEHESALQNWLDAGYHGSMDWMARHGMMRARPAELLPGTIRVISVRMDYLPPDAQFASNLANKNHAYISRYALGRDYHKLVRKQLNKLGKLIEEEVGQFGYRPFVDSAPILERPLAQKAGLGWTGKHSLILDKDCGSWFFLGELLVDLPLPVDKPTQDQCGKCNACITSCPTQAIVADNVVDARRCISYLTIEFDGVIPEEFRKPIGNRIYGCDDCQLVCPWNRYAELTEQEDFHRRESFHTPDLVQMFEWDEATFLKNMEGSAIRRIGHLQWLRNLAIALGNADYSQRVIDALDRRRGSNTLLDEHIDWALTQQLNQIPTNDLQSVETKKNRLIRIIEKGLPRDA

SEQ ID NO: 82006 - protein, 375 aa, Vibrio natriegens
  REGION 1..375: note = tr|A0A1B1EFL7|A0A1B1EFL7_VIBNA Epoxyqueuosine reductase OS=Vibrio natriegens OX=691 GN=queG PE=3 SV=1
MNYEQLAQQIKIWGKELGFQKVGICDVDLSEHEAALQQWLDAGYHGSMDWMARHGMMRARPHELLPGTIRVISARMDYLPPEAQFASNLANKNHAYISRYALGRDYHKLVRKQLNKLGKLIEEEVGKFGYRPFVDSAPILERPLAQKAGLGWTGKHSLILDKDCGSWFFLGELLIDLPLPVDKPSVEQCGKCKACITSCPTQAIVDDKVVDARRCISYLTIEFDGIIPEEFRKPMGNRIYGCDDCQLVCPWNRYADITEQEDFHRRDSFQHPDLVDMFGWDEAAFLKNMEGSAIRRIGHLQWLRNIAVALGNAEYSQRVIDALVSRQGESDLLDEHIIWALNQQLNQTPVNETESVETKKNRLIRIVEKGLPRDA

SEQ ID NO: 82007 - protein, 373 aa, Vibrio navarrensis
  REGION 1..373: note = tr|A0A099MBI2|A0A099MBI2_9VIBR Epoxyqueuosine reductase OS=Vibrio navarrensis OX=29495 GN=queG PE=3 SV=1
MDYQQLAQQIKIWGAELGFQKVGICDVDLREHEAELQKWLDAGYHGSMDWMARHGMMRARPDELLPGTIRVISVRINYLPPQAQFAANLADKTQAYISRYALGRDYHKLVRKQLSELGKRIENAVGAFGYRPFVDSAPILERPLAQKAGLGWTGKHSLILDKEAGSWFFLGELLVDLPLPVDEPSTDDCGKCKACITSCPTQAIVDDKIVDARRCISYLTIEFSGVIPEEFRKAMGNRIYGCDDCQLVCPWNREAELTEQSDFHRRDSLRQADLVNLFLWDEPTFLKKMEGSAIRRIGHLQWLRNLAIAMGNAPYSLKIVQALQERKGQNELLDVHIDWALAEQLNQSAGSSTIDIKNQRLIRIVEKGLPRDA

SEQ ID NO: 82008 - protein, 375 aa, unidentified
  source 1..375: note = Vibrio neocaledonicus
  REGION 1..375: note = tr|A0A4P8G3L5|A0A4P8G3L5_9VIBR Epoxyqueuosine reductase OS=Vibrio neocaledonicus OX=1208308 GN=queG PE=3; SV = 1
MNYEQLAQQIKVWGKELGFQKVGICDVDLSEHEAALQKWLDAGYHGSMDWMARHGMMRARPHELLPGTVRVISVRMDYLPPEAQFASNLANKSHAYISRYALGRDYHKLVRKQLNKLGKLIEQEVGQYGYRPFVDSAPILERPLAQKAGLGWTGKHSLILDQDCGSWFFLGELLIDLPLPVDEPSVDQCGKCKACITSCPTQAIVEDKVVDARRCISYLTIEFDGVIPEEFRKPMGNRIYGCDDCQLVCPWNRYADITEQDDFHRRDSFKNPDLVDMFNWDEATFLKNMEGSAIRRIGHIQWLRNIAVALGNAEYSQRIIDALESRQGENKLLDEHIKWALTEQLNQLPTESNSSIETKKQRLIRIVEKGLPRDA

SEQ ID NO: 82009 - protein, 370 aa, Vibrio neptunius
  REGION 1..370: note = tr|A0A0F4NRY2|A0A0F4NRY2_9VIBR Epoxyqueuosine reductase OS=Vibrio neptunius OX=170651 GN=queG PE=3 SV=1
MNYQELANKIKVWAQELGFQKAGICDIDLSEHESALQKWLDAGYHGEMDWMARHGMMRARPAELLPGTVRVISVRMDYLPPEALFAANLADPTQAYISRYALGRDYHKLVRNQLKKLGQKIEQEVGQFGYRPFVDSAPILERPLAQKAGLGWTGKHSLILDKDCGSWFFLGELLIDLPLPIDEAHQGDCGKCTACITSCPTQAIIEEGVVDARRCISYLTIEFDGVIPKEFRKPMGNRIYGCDDCQLVCPWNRFSELTEHEDFHRRQALTSPDLVTLFAWDEKTFLKNMEGSAIRRIGHIQWLRNLSIAMGNAPYSANIIEALEQRIGLSEVLDEHIRWAIEQQIAQIPHSSTKLNRLIRIVQKGLPRDA

SEQ ID NO: 82010 - protein, 372 aa, Vibrio nereis
  REGION 1..372: note = tr|A0A0M0HIR7|A0A0M0HIR7_VIBNE Epoxyqueuosine reductase OS=Vibrio nereis OX=693 GN=queG PE=3 SV=1
MNYQELANKIKLWAQELGFQKVGICDVDLSEHEGALQKWLDAGYHGEMDWMARHGMMRARPAELLPGTIRVISARMDYLPPEAQFASNLSAPTQAYISRYALGRDYHKLVRNQLKKLGQKIEQEVGKFGYRPFVDSAPILERPLAQKAGLGWTGKHSLILDKDCGSWFFLGELLIDLPLPIDEPHQGDCGKCKACITSCPTQAIVEDGVVDARRCISYLTIEYDGVIPEEFRKPMGNRIYGCDDCQLVCPWNRFSEITEQNDFHRRASFNNPDLVALFLWEEEAFLKNMEGSAIRRIGHLQWMRNLSIAMGNAPYSQSIVDALESRKGLSEVLDIHIQWAIEQQQSQIPHQTLSNKQERLIRIVQKGLPRDA

SEQ ID NO: 82011 - protein, 370 aa, Vibrio nigripulchritudo
  REGION 1..370: note = tr|U4K1W5|U4K1W5_9VIBR Epoxyqueuosine reductase; OS = Vibrio nigripulchritudo OX=28173 GN=queG PE=3 SV=1
MDYSELAIKIKQWATELGFQKVGICDVDLSEHEKPLQDWLDAGYHGEMDWMARHGMMRARPAELLPGTVRAISARMNYLPPDAQFASNLEDSTQGYISRYALGRDYHKLVRNQLKKLGQRIEAEVGQFGYRPFVDSAPILERPIAQKAGLGWTGKHSLILDEGSGSWFFLGELLIDLPLPVDEPSTDQCGTCKACITSCPTGAIVSEGVIDSRLCISYLTIELSGKIPVELRSKMGNRIYGCDDCQLVCPWNREADITDQKDFHRRDAFGSADLLTLMSWTEEEFLKKMEGSAIRRIGHIQWMRNVAVAMGNAPFSQDIVYALEGRLGIDDNLDDHIEWAIETQLSKTPVKDRKKERLIRIIQKGLPRDA

SEQ ID NO: 82012 - protein, 391 aa, Vibrio nigripulchritudo
  REGION 1..391: note = tr|U4EA20|U4EA20_9VIBR Epoxyqueuosine reductase; OS = Vibrio nigripulchritudo FTn2 OX=1238441 GN=queG PE=3; SV = 1
MNQLESSPIFHAVGAKNHSKAMDYSELAIKIKQWATELGFQKVGICDVDLSEHEKPLQDWLDAGYHGEMDWMARHGMMRARPAELLPGTVRAISARMNYLPPDAQFASNLEDSTQGYISRYALGRDYHKLVRNQLKKLGQRIEAEVGQFGYRPFVDSAPILERPIAQKAGLGWTGKHSLILDEGSGSWFFLGELLIDLPLPVDEPSTDQCGTCKACITSCPTGAIVSEGVIDSRLCISYLTIELSGKIPVELRSKMGNRIYGCDDCQLVCPWNREADITDQKDFHRRDAFGSADLLTLMSWTEEEFLKKMEGSAIRRIGHIQWMRNVAVAMGNAPFSQDIVYALEGRLGIDDNLDDHIEWAIETQISKTPVKDRKKERLIRIIQKGLPRDA

SEQ ID NO: 82013 - protein, 370 aa, Vibrio orientalis
  REGION 1..370: note = tr|C9QNB5|C9QNB5_VIBOR Epoxyqueuosine reductase; OS = Vibrio orientalis CIP 102891 = ATCC 33934 OX=675816; GN = queG PE=3 SV=1
MNYQELVEKIKIWGQELGFQKVGICDVDLSAHEQELQRWLDAGYHGDMDWMARHGMMRARPNELLPGTVRVISARMDYLPPEARFASNLADPSQAYVSRYSLGRDYHKLIRNQLKKLGQKIEQEVGQFGYRPFVDSAPILERPLAQKAGLGWTGKHSLVLDKDCGSWFFLGELLIDLPLPVDEPSVDECGKCKACITSCPTQAIVADGVVDARRCISYLTIEFDGVIPEEFRHAMGNRIYGCDDCQLVCPWNRFSDITEQSDFHRREAFEDSDLVTLFMWDEETFLKNMEGSAIRRIGHLQWLRNLSVAMGNAPFSQAIIDALQARIGLTEVLDEHIHWALAEQQSQLPISTTKLNRLIRIVEKGLPRDA

SEQ ID NO: 82014 - protein, 375 aa, Vibrio owensii
  REGION 1..375: note = tr|A0A3G2PS28|A0A3G2PS28_9VIBR Epoxyqueuosine reductase OS=Vibrio owensii OX=696485 GN=queG PE=3 SV=1
MNFEQLAQQIKIWGKELGFQKVGICDVDLSEHEAALQKWLDAGYHGSMDWMARHGMMRARPNELLPGTVRVISVRMDYLPPEAKFASNLANKNHAYISRYALGRDYHKLVRKQLNKLGKLIEQEVGQYGYRPFVDSAPILERPLAQKAGLGWTGKHSLILDKDCGSWFFLGELLIDLPLPVDEPSVDQCDKCKACITSCPTQAIVDDKIVDARRCISYLTIEFDGVIPEEFRKPMGNRIYGCDDCQLVCPWNRYAEVTVQEDFHRRDSFEDPDLITMFNWDEATFLKQMEGSAIRRIGHLQWLRNISVALGNAEYSQKAIDALESRRGESELLDEHINWALEQQFSQFPTNESDSIETKKKRLIRIVEKGLPRDA

SEQ ID NO: 82015 - protein, 375 aa, Vibrio owensii; identical to SEQ ID NO: 82014
  REGION 1..375: note = tr|A0A0C1YTB1|A0A0C1YTB1_9VIBR Epoxyqueuosine reductase OS=Vibrio owensii CAIM 1854 = LMG 25443; OX = 1229493 GN=queG PE=3 SV=1

SEQ ID NO: 82016 - protein, 370 aa, unidentified
  source 1..370: note = Vibrio palustris
  REGION 1..370: note = tr|A0A1R4B8F4|A0A1R4B8F4_9VIBR Epoxyqueuosine reductase OS=Vibrio palustris OX=1918946 GN=queG PE=3 SV=1
MDYHALVANIKSWAYELGFAKVGICDVDLSAHEEALQQWLDAGYHGDMDWMERHGMMRARPAELLPGTVRVISARMNYLPQDAHFATNLSDTTQAYVSRYALGRDYHKLVRNQLKKLGEKIKEEVGALGYRPFVDSAPVLERPLAQKAGLGWTGKHSLILDENDGSWFFLGELLIDLPLPIDEPSENQCGKCRACVTSCPTNAIVADGVVDARRCISYLTIEYAGVIPEEFRKPMGNRIYGCDDCQLVCPFNRFADLTTQADFQRREMFQDPDLLRLFSWDEKTFLQKMEGSAIRRIGHQQWRRNLIIAMGNAPYSQRIIDTLSDTIGQSELLDIHIEWALQQQEAQLPFSDRKKERLIRIVQKGLQRDA

SEQ ID NO: 82017 - protein, 373 aa, unidentified
  source 1..373: note = Vibrio panuliri
  REGION 1..373: note = tr|A0A1Q9HDK7|A0A1Q9HDK7_9VIBR Epoxyqueuosine reductase OS=Vibrio panuliri OX=1381081 GN=queG PE=3 SV=1
MNYQELADKIKVWAKELGFQKVGICDVDLKEHEAELQKWLDSGYHGSMDWMARHGMMRARPDELLPGTIRVISARMDYLPPEAQFASNLSNPNHAYISRYALGRDYHKLVRNQLKKLGQRIEAEVEQLGYRPFVDSAPILERPLAQKAGLGWSGKHSLILDKECGSWFFLGELLVDIPLPVDKPSENQCGACKACMTSCPTAAIVDEGIVDARRCISYLTIEFDGVIPEEFRKAMGNRIYGCDDCQLVCPWNRFADVTQQEDFYRRSCFQTPELVELFHWDETTFLKNMEGSPIRRIGHQQWLRNLSIALGNAPFSQKIIESLKSRKGLSELLDEHIDWAIEQQLAQVHEKNGIKIKHERLIRIVQKGLPRDA

SEQ ID NO: 82018 - protein, 375 aa, Vibrio parahaemolyticus
  REGION 1..375: note = tr|A0A0D1VR49|A0A0D1VR49_VIBPH Epoxyqueuosine reductase OS=Vibrio parahaemolyticus OX=670 GN=queG PE=3; SV = 1
MNYEQLAQQIKVWGKELGFQKVGICDVDLSEHEAALQKWLDAGYHGSMDWMARHGMMRARPNELLPGTVRVISVRMDYLPPEAQFASNLANKNHAYISRYALGRDYHKLVRKQLNKLGKLIEEEVGQFGYRPFVDSAPILERPLAQKAGLGWTGKHSLILDKECGSWFFLGELLIDLPLPVDTPSVDQCEKCRACITSCPTQAIVEDKVVDARRCISYLTIEFDGVIPEEFRKPMGNRIYGCDDCQLVCPWNRYADVTEQEDFHRRESFHNPDLVELFQWDEATFLKNMEGSAIRRIGHEQWLRNISVALGNAEYSQRVIDALNARLGESKLLDEHIEWALTQQLNHIPSVDAEPIETKKKRLIRIVEKGLPRDA

SEQ ID NO: 82019 - protein, 376 aa, Vibrio parahaemolyticus
  REGION 1..376: note = tr|A0A0D1ENL2|A0A0D1ENL2_VIBPH Epoxyqueuosine reductase OS=Vibrio parahaemolyticus VP766 OX=1288782; GN = queG PE=3 SV=1
MNYEQLAQQIKVWGKELGFQKVGICDVDLSEHEAALQKWLDAGYHGSMDWMTRHGMMRARPNELLPGTVRVISVRMDYLPPEAQFASNLANKNHAYISRYALGRDYHKLVRKQLNKLGKLIEEEVGQFGYRPFVDSAPILERPLAQKAGLGWTGKHSLILDKECGSWFFLGELLIDLPLPVDTPSVDQCEKCRACITSCPTQAIVEDKVVDARRCISYLTIEFDGVIPEEFRKPMGNRIYGCDDCQLVCPWNRYADVTKQEDFHRRESFHNPDLVELFQWDEATFLKNMEGSAIRRIGHEQWLRNISVALGNAEYSQRVIDALNARLGESKLLDEHIEWALLTQQLNHIPSVDAEPIETKKKRLIRIVEKGLPRDA

SEQ ID NO: 82020 - protein, 370 aa, Vibrio pectenicida
  REGION 1..370: note = tr|A0A427U8C8|A0A427U8C8_9VIBR Epoxyqueuosine reductase OS=Vibrio pectenicida OX=62763 GN=queG PE=3 SV=1
MNYQELANKIKVWANELGFQQAGICDIDLREHETALQNWLNAGYHGDMDWMARHGMMRARPEELVPGTLRVISVRMDYLPPEAQFATNLSEPNHAYISRYALGRDYHKLVRKQLKKLGQKIEQEVGQYGYRPFVDSAPILERPLAQKAGLGWTGKHSLILDKDCGSWFFLGELLVDLPLPIDPPHQGDCGKCSSCKTSCPTQAIISDGVVDARRCISYLTIEFDGVIPEEFRKAIGNRIYGCDDCQLVCPWNRFAELTQEEDFHRKTALLSPDLITLFSWNEEAFLKNMQGSAIRRIGHLQWLRNLSIAMGNAPYSANIIDALKQRYGINDILDEHLDWAIEQQITQIPTSSTKLDRLIRIVQKGLPRDA

SEQ ID NO: 82021 - protein, 370 aa, Vibrio penaeicida
  REGION 1..370: note = tr|A0A3S0PIP7|A0A3S0PIP7_9VIBR Epoxyqueuosine reductase OS=Vibrio penaeicida OX=104609 GN=queG PE=3 SV=1
MDYSELAVKIKQWAIELGFQKVGICDVDLKEHEKPLQDWLDAGYHGEMDWMARHGMMRARPDELLPGTVRVISARMNYLPPDAQFASNLNDTTQGYISRYALGRDYHKLVRNQLKKLGQRIEQEAGKFGYRPFVDSAPLLERPLAQKAGLGWTGKHSLILDEGSGSWFFLGELLIDLPLPIDEPSTDQCGSCKACITSCPTGAIISEGVIDSRLCISYLTIELSGKIPVELRAKMGNRIYGCDDCQLVCPWNREADITDQSDFYRRDAFGSSDLITLISWSEQEFLKKMEGSAIRRIGHIQWMRNIAVAMGNAPFSQGIVYALRERIGIDDNLDEHIQWAIDSQMAKTPIKDRKKERLIRIIQKGLPRDA

SEQ ID NO: 82022 - protein, 372 aa, Vibrio ponticus
  REGION 1..372: note = tr|A0A3N3E3K4|A0A3N3E3K4_9VIBR Epoxyqueuosine reductase OS=Vibrio ponticus OX=265668 GN=queG PE=3 SV=1
MDYQELADKIKIWAKQLGFQKVGICDVDLKEHEAELQKWLEAGYHGSMDWMARHGMMRARPDELLPGTVRVISARMDYLPPEAQFASNLDNPNHAYISRYALGRDYHKLLRNQLKKLGQMIEQEVASMNYRPFVDSAPILERPLAQKAGLGWSGKHSLILDKECGSWFFLGELLIDLPLPVDTPSDNQCGHCKACITSCPTGAIVEDGVVDARRCISYLTIEFDGVIPLEFRKAMGNRIYGCDDCQLVCPWNRFASITEEQDFHRRKALHSPELVDLFSWDEETFLKNMEGSAIRRIGHQQWLRNIAIAMGNAPFSQAIIESLESRKGLSELLDIHINWAIEEQLSQIAESSRTTKHQRLIRIVQKGLPRDA

SEQ ID NO: 82023 - protein, 373 aa, Vibrio ponticus
  REGION 1..373: note = tr|A0A090P7V1|A0A090P7V1_9VIBR Epoxyqueuosine reductase OS=Vibrio ponticus OX=265668 GN=queG PE=3 SV=1
MNYQELADKIKIWAKELGFQKVGICDVNLQEHEAELQKWLDAGYHGTMDWMARHGMMRARPDELLPGTVRVISARMDYLPPQAQFAANLNNPNHAYISRYALGRDYHKLIRNQLKKLGQLIEQEVEALNCRPFVDSAPILERPLAQKAGLGWSGKHSLILDKECGSWFFLGELLIDLPLPVDTPTDDQCGNCKACITSCPTGAIVADGVVDARRCISYLTIENSESIPVEFRKAMGNRIYGCDDCQLVCPWNRFASVTEEQDFHRRKALQSPDLVELFNWDEATFLKNMEGSAIRRIGHQQWLRNLSIAMGNAPYSQRILQTLEARLGLSALLDEHINWAMDEQLAQIGERSSIQIKHERLIRIVEKGLPRDA

SEQ ID NO: 82024 - protein, 374 aa, Vibrio proteolyticus
  REGION 1..374: note = tr|U3BSG3|U3BSG3_VIBPR Epoxyqueuosine reductase; OS = Vibrio proteolyticus NBRC 13287 OX=1219065 GN=queG PE=3; SV = 1
MDFQHLADKIKIWGQELGFQKVGICDVDLKQHEATLQQWLDNGYHGEMDWMARHGMMRARPDELLPGTIRVISVRMNYLPPEAEFASNLSDPTQAYISRYSLGRDYHKLVRNQLKKLGQRIEQEVGQFGYRPFVDSAPILERPLAQKAGLGWTGKHSLILDKDAGSWFFLGELLIDLPLPTDQPSTDQCGKCTACITSCPTNAIVAEGVVDARRCISYLTIEYAGVIPLEFRKAMGNRIYGCDDCQLVCPWNRFSSLTEQSDFHRRPVFKNADLVNLFQWDEATFMKNMEGSPIRRIGHIQWLRNLAIALGNAPYSQRILEALEARRDEHVLLTPHIEWALNEQLAQLPASLSDVNRKTQRLIRIVQKGMPRDA

SEQ ID NO: 82025 - protein, 375 aa, unidentified
  source 1..375: note = Vibrio qinghaiensis
  REGION 1..375: note = tr|A0A223MUX6|A0A223MUX6_9VIBR Epoxyqueuosine reductase OS=Vibrio qinghaiensis OX=2025808 GN=queG PE=3; SV = 1
MDYQVLADKIKIWARELGFEKVGICDIDLSEHEEPLQKWLDAGFHGEMDWMARHGMMRARPHELLPGTVRVISARMNYLPPDARFASDLNNPNYAYISRYALGRDYHKLVRNQLKKLGEKIEQEVGALGYRPFVDSAPILERPLAQKAGLGWAGKHSLILDKESGSWFFLGELLIDLPLPVDTPSSNQCGKCTACITSCPTQAIVEDGVVDARRCISYLTIEYDGVIAEEFRKAMGNRIYGCDDCQLVCPWNRFSNLTQQSDFHRRQALDEPDLVELFAWDEATFLRYMEGSAIRRIGHQQWLRNLSIALGNAPYSQRIVTALNMRLGLSDLLDEHIHWALVEQQRKSAEPENSHSSNKQQRLIRIVEKGLPRDA

SEQ ID NO: 82026 - protein, 373 aa, unidentified
  source 1..373: note = Vibrio quintilis
  REGION 1..373: note = tr|A0A1M7YR15|A0A1M7YR15_9VIBR Epoxyqueuosine reductase OS=Vibrio quintilis OX=1117707 GN=queG PE=3 SV=1
MMDYQILADKIKLWALELGFEKAGICDIDLSQHEAELQRWLDAGYHGDMEWMARHGMMRARPDELLPGTIRVISVRMTYLPPEAKFSLDLSTPTHAYISRYALGRDYHKLLRNQLKKLAEKIKQEAGELNYRPFVDSAPVLERPLAEKAGLGWTGKHSLILDKDTGSWFFLGEILVDIPLPVDQPVSNQCGQCKACITSCPTNAIVDDGVVDARRCISYLTIEYAGVIPEEFREAMGNRIYGCDDCQLVCPWNRFSPLTGQPDFHRREILATPDLVDLFLWDEQTFLKNMEGSAIRRIGHIQWLRNLAVAMGNAPYAKNIIQALTQRLGLSELLDTHIHWAISQQNKKRDIRKQNRKHDRLIRIIQKGLPRDA

SEQ ID NO: 82027 - protein, 373 aa, unidentified
  source 1..373: note = Vibrio renipiscarius
  REGION 1..373: note = tr|A0A0C2NGB6|A0A0C2NGB6_9VIBR Epoxyqueuosine reductase OS=Vibrio renipiscarius OX=1461322 GN=queG PE=3; SV = 1
MNYQELADNIKIWAKELGFQKVGICDVNLQEHEAALQQWLDAGYHGSMDWMARHGMMRARPNELLPGTVRVISARMDYLPPQAQFASNLDDPTQAYISRYALGRDYHKLLRNQLKKLGQRIELEVGAFGYRPFVDSAPILERPLAQKAGLGWTGKHSLILDKECGSWFFLGELLIDLPLPVDTPSEEQCGKCKACITSCPTNAIVDDGIVDARRCLSYLTIEYDGVIPEEFRKPMGNRIYGCDDCQLVCPWNRFSPLTDHDDFHRRQSLKNPDLIELFSWDEARFLKNMEGSAIRRIGHGQWLRNISVAMGNAPYSQHIVEALKMRKGLSLVLDEHIEWALEQQLKQVREECGINITHQRLIRIINKGLPRDA

SEQ ID NO: 82028 - protein, 375 aa, Vibrio rotiferianus
  REGION 1..375: note = tr|A0A2K7SSB2|A0A2K7SSB2_9VIBR Epoxyqueuosine reductase OS=Vibrio rotiferianus OX=190895 GN=queG PE=3; SV = 1
MNYEQLAQQIKIWGKELGFQKVGICDVDLSEHEAALQKWLDAGYHGSMDWMARHGMMRARPDELLPGTVRVISVRMDYLPPEARFASNLANTNHAYISRYALGRDYHKLVRKQLNKLGKLIEQEVGQFGYRPFVDSAPILERPLAQKAGLGWTGKHSLILDKDCGSWFFLGELLIDLPLPVDEPSVDQCDKCKACITSCPTQAIVDEKIVDARRCISYLTIEFDGVIPEEFRKPMGNRIYGCDDCQLVCPWNRYAEITEQEDFHRRESFEEPDLVTMFNWDESTFLKQMEGSAIRRIGHLQWLRNISVALGNAEYSQLIIEALEARQGENKLLDEHIEWALEQQFNQIPANQSDSIDTKKKRLIRVVEKGLPRDA

SEQ ID NO: 82029 - protein, 371 aa, Vibrio ruber
  REGION 1..371: note = tr|A0A1R4LPG6|A0A1R4LPG6_9VIBR Epoxyqueuosine reductase OS=Vibrio ruber DSM 16370 OX=1123498 GN=queG; PE = 3 SV=1
MDYQALADKIKIWAQELGFEKVGICDVDLTEHEAELQRWLDAGYHGEMDWMARHGMLRARPQELHPGTIRVISVRMNYLPPQAHFASNLDTPTHAYISRYALGRDYHKLVRKQLKKLGDKIRHEVGELNDRPFVDSAPILERPLAQKAGLGWTGKHSLILDQDAGSWFFLGELLVDIPLPVDQPSQNQCGQCRACITSCPTGAIVADGVVDARRCISYLTIEFSGIIPLEFRKAIGNRIYGCDDCQLVCPWNRSASLTSQSDFHRRDVFSHPDLVELFEWEEETFLQNTEGSAIRRIGHQQWLRNIAVAMGNAPYSERIVLALEKRLGETELLDVHIRWSLEQHQQKQQQAENRKHQRLIRIIQKGLPRDA

SEQ ID NO: 82030 - protein, 372 aa, Vibrio rumoiensis
  REGION 1..372: note = tr|A0A1E5DZJ8|A0A1E5DZJ8_9VIBR Epoxyqueuosine reductase OS=Vibrio rumoiensis 1S-45 OX=1188252 GN=queG; PE = 3 SV=1
MNYDQLASNIKTWGQELGFQKVGITDIDLSDHEVQLQRWLDAGYHGTMDWMARHGMMRARPEELHPGTTRVISVRMDYLPPEAQFASNLADTTQAYISRYALGRDYHKLMRNQLKKLGERIEEEVGKLGYRPFVDSAPILERPLAQKAGLGWAGKHSLILDKEAGSWFFLGELFVDIPLPIDKPQTDQCGKCTACITSCPTGAIVENGVIDARLCISYLTIEFDGIIPEHLRSKMGNRIYGCDDCQLVCPWNREADVTKQNAFHRKDIFQDSSLLTLFQWNEPLFLKNMEGSAIRRIGHQQWLRNLAIALGNAPFSPDITEALKTRLGLSELLDEHIHWALAQQHDKNQHLARNTKLDRLVRIIGKGLPRDA

SEQ ID NO: 82031 - protein, 375 aa, Vibrio sagamiensis; identical to SEQ ID NO: 81934
  REGION 1..375: note = tr|A0A511QHN0|A0A511QHN0_9VIBR Epoxyqueuosine reductase OS=Vibrio sagamiensis NBRC 104589 OX=1219064; GN = queG PE=3 SV=1

SEQ ID NO: 82032 - protein, 373 aa, Vibrio scophthalmi
  REGION 1..373: note = tr|A0A1B1NSD8|A0A1B1NSD8_9VIBR Epoxyqueuosine reductase OS=Vibrio scophthalmi OX=45658 GN=queG PE=3 SV=1
MNYQELADNIKIWANDLGFQKVGICDVNLQEHEAALQKWLDAGYHGCMDWMARHGMMRARPDELLPGTVRVISVRMDYLPPKAQFATNLADPTQAYISRYALGRDYHKLIRNQLKKLGQRIEQEVGSFGYRPFVDSAPILERPLAQKAGLGWTGKHSLILDKECGSWFFLGELLIDLPLPVDTPSEDQCGKCKACMTSCPTNAIIEEGIVDARRCISYLTIEYDGVIPEEFRKPMGNRIYGCDDCQLVCPWNRFSSLTDQDDFHRRQSLQNPDLIALFAWDEASFLKNMEGSAIRRIGHVQWLRNLSIAMGNAPYSQDIVEALQMRIGISPVLDEHIDWALAQQRQQIKEKNGIDITHQRLIRVINKGIPRDA

SEQ ID NO: 82033 - protein, 373 aa, Vibrio scophthalmi
  REGION 1..373: note = tr|F9RN86|F9RN86_9VIBR Epoxyqueuosine reductase; OS = Vibrio scophthalmi LMG 19158 OX=870967 GN=queG PE=3 SV=1
MNYQELADNIKIWANDLGFQKVGICDVNLQEHEATLQKWLDAGYHGSMDWMARHGMMRARPDELLPGTVRVISVRMDYLPPKAQFATNLADPTQAYISRYALGRDYHKLIRNQLKKLGQRIEQEVGSFGYRPFVDSAPILERPLAQKAGLGWTGKHSLILDKECGSWFFLGELLIDLPLPVDTPSEDQCGKCKACMTSCPTNAIIEEGIVDARRCISYLTIEYDGIIPEEFRKPMGNRIYGCDDCQLVCPWNRFSSLTEQDDFHRRQSLQNPDLIALFAWDEASFLKNMEGSAIRRIGHVQWLRNLSIAMGNAPYSQDIVEALQMRIGISPVLDEHIEWAIAQQRQQIKEKSGIDITHQRLIRVINKGIPRDA

SEQ ID NO: 82034 - protein, 375 aa, Vibrio shilonii
  REGION 1..375: note = tr|A6D8D8|A6D8D8_9VIBR Epoxyqueuosine reductase; OS = Vibrio shilonii AK1 OX=391591 GN=queG PE=3 SV=1
MDLNKLASDIKQWGQELGFQKVGISDIDLQDQETVLKNWLAAGYHGDMAWMETHQDLRIHPDKLHPNTCRIISVRMDYLPEDANFASNLEDKHSGYISRYALGRDYHKLIRNLLKKLGQKIEQEVSELGYRPFVDSAPVLERPLAEKAGLGWIGKHSLLLDKEAGSWFFLGELFIDLPLPTDNPVNNECGKCRACVTSCPTGAILENGVIDARRCISYLTIEYKGVIPLEFREAMGNRIYGCDDCQLVCPWNRYAELSQRQDFQRRNSFADTNLDILLSWDEATFLKNMEGSAIRRIGHEQWQRNIIIAMGNAPFSQTYIEQLEQIEGQSDLLDPHIEWALQKQLGQLPVNLDTSLHTKNQRLIRIVKKGLPRDA

SEQ ID NO: 82035 - protein, 372 aa, Vibrio sinaloensis
  REGION 1..372: note = tr|A0A0A5HUH0|A0A0A5HUH0_9VIBR Epoxyqueuosine reductase OS=Vibrio sinaloensis OX=379097 GN=queG PE=3 SV=1
MNYQELADKIKIWAQELGFQKVGICDVDLSEHEAELQKWLDAGYHGEMDWMARHGMMRARPDELLPGTIRVISTRMNYLPPEAQFASNLSDTTQAYISRYALGRDYHKLVRNQLKKLGQRIEEEVGQFGYRPFVDSAPILERPLAQKAGLGWTGKHSLILDKECGSWFFLGELLIDLPLPIDTPSEEACGKCKACITSCPTSAIISEGVVDARRCISYLTIEFDGVIPEEFRKPMGNRIYGCDDCQLVCPWNRFSDITKQSDFHRRSTLTNADLVQLFLWDEATFLKNMEGSAIRRIGHIQWMRNLSIAMGNAPFSPRIIDALRARAGINDVLDVHIDWAIEQQLGQESIAGTNTKQQRLIRIVEKGLPRDA

SEQ ID NO: 82036 - protein, 372 aa, Vibrio sinaloensis
  REGION 1..372: note = tr|E8M4K7|E8M4K7_9VIBR Epoxyqueuosine reductase; OS = Vibrio sinaloensis DSM 21326 OX=945550 GN=queG PE=3 SV=1
MNYQELADKIKLWGQELGFQKVGICDVDLSEHEAELQKWLDAGYHGSMDWMARHGMMRARPSELLPGTVRVISARMNYLPPEAQFASNLSDTTQAYISRYALGRDYHKLVRNQLKKLGQKIEQEVGQFGYRPFVDSAPILERPLAQKSGLGWTGKHSLILDKECGSWFFLGELLIDLPLPVDTASINECGKCSACITSCPTSAIVADGIVDARRCISYLTIEYDGVIPEEFRKSMGNRIYGCDDCQLVCPWNRFSDLTQQKDFHRREALESADLITLFMWDENTFLKNMEGSAIRRIGHLQWLRNLSVAMGNAPFSQEIVEVLSSRKGLSDVLDVHIEWALSQQLAQTPLKNATNRQQRLIRIIQKGLPRDA

SEQ ID NO: 82037 - protein, 376 aa, Vibrio sp.
  REGION 1..376: note = tr|A0A3D1Z6N4|A0A3D1Z6N4_VIBSX Epoxyqueuosine reductase OS=Vibrio sp. OX=678 GN=queG PE=3 SV=1
MNYQELANKIKQWGKELGFQQVGITDVDLSEHEAQLQRWLDAGYHGSMDWMARHGMMRARPQELHPGTVRVISVRMDYLPPEAQFASNLSDPTQAYISRYSLGRDYHKLIRNQLKKLGQRIEEEVGELGYRPFVDSAPILERPLAQKAGLGWAGKHSLILDKQAGSWFFLGELLVDIPLPIDEPQTDQCGQCRACMTSCPTGAIVEEGVIDARLCISYLTIELDGVIPEELRSKIGNRIYGCDDCQLVCPWNRAADVTNETSFHRRDIFNDADLIKLFQWNELQFLKNMEGSAIRRIGHIQWLRNISIALGNAPYESAILEALTTRLGLDDNLDIHIQWAIEQQNKKKNDIDANTARNTKLERLVRIIGKGLPRDA

SEQ ID NO: 82038 - protein, 369 aa, Vibrio sp.
  REGION 1..369: note = tr|A0A0H2MXA1|A0A0H2MXA1_9VIBR Epoxyqueuosine reductase OS=Vibrio sp. VPAP30 OX=1647102 GN=queG PE=3 SV=1
MNYQELTDKIKIWGQELGFQKVGICDVDLSEHEAELQKWLDAGYHGEMDWMARHGMMRARPAELLPGTLRVISVRMNYLPPQAQFAANLSDPTQAYISRYSLGRDYHKLVRNQLKKLGQKIEQEIGNFGYRPFVDSAPILERPLAQKSGLGWTGKHSLILDKECGSWFFLGELLIDLPLPVDKPSVEECGKCKACITSCPTQAIVADGIVDARRCISYLTIEFEGVIPEEFRKAMGNRIYGCDDCQLVCPWNRFSDLTDQQDFHRREALTNANLVELFKWDEATFLKNMEGSAIRRIGHLQWLRNLSVAMGNAPYSIDIIEALESRVGLSDTLDVHIRWAQQQQTQIPAQSTKLNRLIRIVEKGLPRDA

SEQ ID NO: 82039 - protein, 371 aa, unidentified
  source 1..371: note = Vibrio spartinae
  REGION 1..371: note = tr|A0A1N6M4M6|A0A1N6M4M6_9VIBR Epoxyqueuosine reductase OS=Vibrio spartinae OX=1918945 GN=queG PE=3 SV=1
MDYQALADKIKIWAQALGFEKIGICDVDLTEHEAELQRWLDAGYHGDMDWMARHGMLRARPQELHPGTIRVISVRMNYLPPQAHFASNLDSPTHAYISRYALGRDYHKLVRKQLKKLGDKIRQEVGELNARPFVDSAPILERPLAQKAGLGWTGKHSLILDQDAGSWFFLGELLVDIPLPVDQPSQNQCGHCRACVTSCPTGAIVADGVVDARRCISYLTIEFSGIIPLEFRKAIGNRIYGCDDCQLVCPWNRSASLTEQSDFHRRDVFAHPDLVELFAWEEETFLQNTEGSAIRRIGHQQWLRNIAIAMGNAPYSERIVLALENRLGETELLDVHIRWSLEQHQQKQRQEQNRQHERLIRIIQKGLPRDA

SEQ ID NO: 82040 - protein, 380 aa, Vibrio splendidus
  REGION 1..380: note = tr|A0A2N7ETP1|A0A2N7ETP1_VIBSP Epoxyqueuosine reductase OS=Vibrio splendidus OX=29497 GN=queG PE=3 SV=1
MNLDHLAEKIKIWGKELGFQKVGICDVDLSEHEAPLQAWLDAGNHGEMDWMARHGMMRARPDELHPGTIRVISARMNYLPPEAQFASNLSDTTQGYISRYSLGRDYHKLFRNQLKKLGQRIEKEVEGLDSRPFVDSAPILERPLAQKAGLGWTGKHSLILDKDAGSWFFLGELLVNIPLPVDEPSVDECGKCTACITSCPTGAIIADGVVDARKCISYLTIEYDGVIPEEFRDAIGNRIYGCDDCQLVCPWNRHAELTEQTDFHRREDFQEADLVSLSSWDEATFLKKMEGSAIRRIGHTQWLRNIFVAMGNAPFQQRIVETLESHQGKNEMLDVHIEWALNKQLQQLPNASGVQRSSSKISTKKHRLIRIVEKGLPRDA

SEQ ID NO: 82041 - protein, 380 aa, Vibrio splendidus
  REGION 1..380: note = tr|A0A1E5B451|A0A1E5B451_VIBSP Epoxyqueuosine reductase OS=Vibrio splendidus ZS-139 OX=617140 GN=queG; PE = 3 SV=1
MNLDHLAEKIKIWGKELGFQKVGICDVDLSEHEAPLQAWLDAGNHGEMDWMARHGMMRARPNELHPGTIRVISARMNYLPPEAQFASNLSDTTQGYISRYSLGRDYHKLFRNQLKKLGQRIEKEVEGLDSRPFVDSAPILERPLAQKAGLGWTGKHSLILDKDAGSWFFLGELLVNIPLPVDTPSIDECGKCTACITSCPTGAIIADGVVDARKCISYLTIEYDGVIPEEYRDAIGNRIYGCDDCQLVCPWNRHAELTEQKDFHRREDFQEADLVSLSSWDEATFLKKMEGSAIRRIGHTQWLRNIFVAMGNAPFQQRIVETLESHQGKNDMLDVHIEWALEKQLQQLPNASSIQEGKNKVSTKKHRLIRIVEKGLPRDA

SEQ ID NO: 82042 - protein, 370 aa, Vibrio superstes
  REGION 1..370: note = tr|A0A511QXF3|A0A511QXF3_9VIBR Epoxyqueuosine reductase OS=Vibrio superstes NBRC 103154 OX=1219062; GN = queG PE=3 SV=1
MNLQHLADQIKLWGNELGFQKIGITDVDLSSHEEGLKKWIAHGYHGSMEWMERNEDKRLHPNKLHPGTLRVISVRLDYLPPEAHFASNLSDPTQAYISRYALGRDYHKLMRNKLKNLAKKIEDELGELNYRPFVDSAPVLERPLAEKAGLGWTGKHSLLLDEEAGSWFFLGELLIGLPLPVDAPVEKQCGKCRSCITSCPTGAIIEDGVIDARKCISYLTIEYDGIIERELSDAMGNRIYGCDDCQLVCPFNRHAQLTQQADFHRRESIKDSNLITLFLWSEQEFLKNFEGSAIRRIGHLQWLRNLAIALGNGAYSDEAITTLEGRLGLCNVLDHHINYAIERLKSQTPFTSTKQQRLIRIVQKGLPRDA

SEQ ID NO: 82043 - protein, 370 aa, Vibrio tapetis
  REGION 1..370: note = tr|A0A2N8ZFU6|A0A2N8ZFU6_9VIBR Epoxyqueuosine reductase OS=Vibrio tapetis subsp. tapetis OX=1671868; GN = yjeS PE=3 SV=1
MNYSELADKIKQWGIELGFQDIGICDIDLSEHEASLQRWLDAGYHGQMDWMARHGMMRARPAELLPGTLRAISVRMDYLPPEAQFASNLKNHNQGYISRYALGRDYHKLVRNQLKKLGQKIEQEVGELGYRPFVDSAPILERPLAQKAGLGWSGKHSLIINPSAGSWFFLGELLVDIPLPVDTPLEDQCGKCTACMTSCPTGAIVSEGVVDARKCISYLTIELDGVIPEELRSLIGNRIYGCDDCQLVCPWNKHGQITEKNDFHRRSILNSPELTQLFSWTEEEFMKRMEGSAIRRIGHTQWLRNIAVALGNAPYSQNNIDALNTRLSISDNLDIHIQWAIEQQLAQVPIKDRKKERLIRIVEKGLPRDA

SEQ ID NO: 82044 - protein, 386 aa, Vibrio tasmaniensis
  REGION 1..386: note = tr|A0A1A6IWG5|A0A1A6IWG5_9VIBR Epoxyqueuosine reductase OS=Vibrio tasmaniensis OX=212663 GN=queG PE=3; SV = 1
MNLDHLAEQIKIWGKELGFQKVGICDVDLSEHEAPLQAWLDAGNHGEMDWMARHGMMRARPDELHPGTIRVISARMNYLPPEAQFASNLNDTTQGYISRYSLGRDYHKLFRNQLKKLGQRIEKEVEGFDSRPFVDSAPILERPLAQKAGLGWTGKHSLILDKDAGSWFFLGELLVNIPLPVDTPSVDECGKCTACITSCPTGAIIADGVVDARKCISYLTIEYDGVIPEEFRDAIGNRIYGCDDCQLVCPWNRHAELTEQTDFHRREDFQEADLVSLSSWDEATFLKKMEGSAIRRIGHTQWLRNIFVAMGNAPFQQRIIETLESHQGKNDMLDVHIEWALQKQLQQLPNASGVQEDNYVQNNSSKISTKKHRLIRIVEKGLPRDA

SEQ ID NO: 82045 - protein, 392 aa, Vibrio tasmaniensis
  REGION 1..392: note = tr|A0A1E5ER83|A0A1E5ER83_9VIBR Epoxyqueuosine reductase OS=Vibrio tasmaniensis 1F-187 OX=1191322 GN=queG; PE = 3 SV=1
MNLDHLAEKIKIWGKELGFQKVGICDVDLSEHEAPLQAWLDAGNHGEMDWMARHGMMRARPNELHPGTIRVISARMNYLPPEAQFASNLSDTTQGYISRYSLGRDYHKLFRNQLKKLGQRIEKEVEGLDSRPFVDSAPILERPLAQKAGLGWTGKHSLILDKDAGSWFFLGELLVNIPLPTDEPSVDECGKCTACITSCPTGAIIADGVVDARKCISYLTIEYDGVIPEEFRDAIGNRIYGCDDCQLVCPWNRHAELTEQTDFHRREDFREADLVSLSSWDEATFLKKMEGSAIRRIGHTQWLRNIFVAMGNAPFQQRIVETLESHRGNNEMLDVHIEWALNKQLQQLPNASSMQEDSSTQKNSCVQKDSSKILTKKHRLIRIVEKGLPRDA

SEQ ID NO: 82046 - protein, 376 aa, unidentified
  source 1..376: note = Vibrio thalassae
  REGION 1..376: note = tr|A0A240EFQ5|A0A240EFQ5_9VIBR Epoxyqueuosine reductase OS=Vibrio thalassae OX=1243014 GN=queG PE=3 SV=1
MMDLNKLASDIKQWGQELGFQKVGISDIDLQDQAAILKNWLAAGYHGDMAWMATHQDLRIHPDKLHPNTCRIISVRMDYLPEDAHFAANLEDKHSGYISRYALGRDYHKLIRNLLKKLGQKIEQEVSELGYRPFVDSAPVLERPIAEKAGLGWIGKHSLLLDKEAGSWFFLGELFIDLPLPTDSPVDNECGKCRACITSCPTGAILENGVIDARRCISYLTIEYKGVIPPEFREAMGNRIYGCDDCQLVCPWNRHAEISRQQDFQRRASFADTNLAVLLSWDESTFLKNMEGSAIRRIGHEQWQRNIIIAMGNAPFSQNYIEKLQQIQGKSELLDSHIEWALQRQMGQVPMKLDTSIHTKNQRLIRIVKKGLPRDA

SEQ ID NO: 82047 - protein, 380 aa, unidentified; identical to SEQ ID NO: 81990
  source 1..380: note = Vibrio toranzoniae
  REGION 1..380: note = tr|A0A109DBB7|A0A109DBB7_9VIBR Epoxyqueuosine reductase OS=Vibrio toranzoniae OX=1194427 GN=queG PE=3; SV = 1

SEQ ID NO: 82048 - protein, 370 aa, Vibrio tubiashii
  REGION 1..370: note = tr|A0A0A5I5Q8|A0A0A5I5Q8_9VIBR Epoxyqueuosine reductase OS=Vibrio tubiashii OX=29498 GN=queG PE=3 SV=1
MNYQALADKIKIWGQELGFQKVGICDVDLSEHETELQKWLDAGYHGDMDWMARHGMMRARPAELLPGTVRVISVRMDYLPPEAQFAANLSDPTQAYISRYSLGRDYHKLVRNQLKKLGQKIEHEVGNYIYRPFVDSAPVLERPLAQKAGLGWTGKHSLILDKEGGSWFFLGELLVDLPLAVDEPSTNECGKCRACITSCPTQAIVDDGIVDARRCISYLTIEFDGVIPEEFRKAMGNRIYGCDDCQLVCPWNRFSELTEREDFHRRETLKTPNLIDLFMWDEATFLKNMEGSAIRRIGHQQWLRNLSIAMGNAPYSQSIIEALKSRLGLSETLDTHIQWAIEQQVEQLPSQSTKLNRLIRIVEKGLPRDA

SEQ ID NO: 82049 - protein, 370 aa, Vibrio tubiashii
  REGION 1..370: note = tr|F9T155|F9T155_9VIBR Epoxyqueuosine reductase; OS = Vibrio tubiashii ATCC 19109 OX=1051646 GN=queG PE=3 SV=1
MNYQELADKIKIWGQELGFQKVGICDVDLSEHEAELQKWLDAGYHGEMDWMARHGMMRARPAELLPGTVRVISVRMNYLPPEAQFAANLSDPTQAYISRYSLGRDYHKLIRNQLKKLGQKIEQEVGSFGHRPFVDSAPILERPLAQKAGLGWTGKHSLILDKECGSWFFLGELLIDLPLPVDEPSVDECGKCKACITSCPTQAIVDNGIVDARRCISYLTIEFDGVIPEEFRKAMGNRIYGCDDCQLVCPWNRFSDLTAQPDFHRREALTNANLVELFKWDEATFLKNMEGSAIRRIGHLQWLRNLSVAMGNAPYSINIIEALENRLGLSETLDVHIQWALEQQQAQTPTQSTKLNRLIRIVEKGLPRDA

SEQ ID NO: 82050 - protein, 144 aa, Vibrio variabilis
  REGION 1..144: note = tr|A0A090SSL0|A0A090SSL0_9VIBR Iron-sulfur cluster-binding protein OS=Vibrio variabilis OX=990271; GN = JCM19239_835 PE=4 SV=1
MDLNKLASDIKVWAQELGFQKAGISDIDLRDQETVLKSWLEAGYHGDMAWMETHQDLRIHPDKLHPNTCRIISVRMDYLPEDAGFATNLEDKHSGYISRYALGRDYHKLIRNKLKKLGQRIEQEVSELGYRLCRLGTCFRATDC

SEQ ID NO: 82051 - protein, 232 aa, Vibrio variabilis
  REGION 1..232: note = tr|A0A090STQ5|A0A090STQ5_9VIBR Epoxyqueuosine (OQ) reductase QueG OS=Vibrio variabilis OX=990271; GN = JCM19239_836 PE=4 SV=1
MLKKAGLGWTGKHSLLLDKDAGSWFFLGELFIDLPLPVDAPVENQCGKCSACVTSCPTNAILDNGVIDARRCISYLTIEYKGVIPESLRPAMGNRIYGCDDCQLVCPWNRFADLGQQPDFQRRPAFNDTDLATLLTWDEATFLKYMEGSAIRRIGHEQWQRNLIIAIGNAPYSERYIEALASIQGQSELLDEHIVWARKQLLDQLPGSVDSQLATKNQRLIRIVRKGLPRDA

SEQ ID NO: 82052 - protein, 373 aa, Vibrio vulnificus
  REGION 1..373: note = tr|A0A2S3S625|A0A2S3S625_VIBVL Epoxyqueuosine reductase OS=Vibrio vulnificus OX=672 GN=queG PE=3 SV=1
MDYQQLAQQIKQWGKELGFEKVGICDIDLTEHEAQLQKWLDAGYHGSMDWMARHGMMRARPAELLPGTVRVISVRMNYLPPQAQFATDLADPTQGYISRYALGRDYHKLVRKQLSALAKKIEAEVGQFGYRPFVDSAPILERPLAQKAGLGWTGKHSLILDKDAGSWFFLGELLVDLPLPVDQASEEACGKCQACITSCPTQAIVDNKVVDARRCISYLTIEHDGIIAPEFRKAIGNRIYGCDDCQLVCPWNRYADLTQHDDFHRRASFNNASLITLFQWDEPTFLKNMEGSAIRRIGHLQWLRNIAIAMGNAPFSPQIVTTLESRKGMSELLDEHINWALEEQAAQAGHLSLDAKKQRLIRIVDKGLPRDAR

SEQ ID NO: 82053 - protein, 373 aa, Vibrio vulnificus
  REGION 1..373: note = tr|Q7MGZ8|Q7MGZ8_VIBVY Epoxyqueuosine reductase; OS = Vibrio vulnificus (strain YJ016) OX=196600 GN=queG PE=3; SV = 1
MDYQQLAQQIKQWGKELGFEKVGICDIDLTEHEAQLQKWLDAGYHGSMDWMARHGMMRARPAELLPGTVRVISVRMNYLPPQAQFAADLADPTQGYISRYALGRDYHKLVRKQLSALAKKIEAEVGQFGYRPFVDSAPILERPLAQKAGLGWTGKHSLILDKDAGSWFFLGELLIDLPLPVDQASEEACGKCQACITSCPTQAIVDNKVVDARRCISYLTIEHDGIIAPEFRKAIGNRIYGCDDCQLVCPWNRYADLTQQGDFHRRSPLNNASLITLFQWDEPTFLKNMEGSAIRRIGHLQWLRNIAVAMGNAPFSPQIVTALESRKGMSELLDEHINWALEEQATQAGHFSLDVKKQRLIRIVDKGLPRDAR

SEQ ID NO: 82054 - protein, 373 aa, unidentified
  source 1..373: note = Vibrio xiamenensis
  REGION 1..373: note = tr|A0A1G8GQ24|A0A1G8GQ24_9VIBR Epoxyqueuosine reductase OS=Vibrio xiamenensis OX=861298 GN=queG PE=3 SV=1
MDYQQLAQQIKLWATELGFQKVGICDVDLSEHEAELQKWLDAGFHGEMDWMARHGMLRARPNELLPGTIRVISVRMDYLPQQAAFSANLSRRDHAYISRYALGRDYHKLVRNQLKKLGQKIEQQVDALGYRPFVDSAPILERPLAQKAGLGWTGKHSLILDKDAGSWFFLGELLVDIPLPVDEPQVNQCGKCQACITSCPTNAIIEDGVVDARRCISYLTIEFDGVIDEEFRHAIGNRIYGCDDCQLVCPWNRFAPLSEQDDFQRREVLKNPDLVSLFLWSEETFLDHMQGSAIRRIGHIQWLRNISIAMGNADYSPEIVDALERRKGINDMLDIHIQWALEQQLNQIPTPGTIDTKQQRLIRIVQKGLPRDA

SEQ ID NO: 82055 - protein, 380 aa, unidentified
  source 1..380: note = Vibrionales bacterium
  REGION 1..380: note = tr|A5L7H8|A5L7H8_VIBBS Epoxyqueuosine reductase; OS = Vibrionales bacterium (strain SWAT-3) OX=391574 GN=queG; PE = 3 SV=1
MNLDRLAEKIKIWGKELGFQKVGICDVDLSEHEAPLQAWLDAGHHGEMDWMARHGMMRARPNELHPGTIRVISARMNYLPPEAQFASNLSDTTQGYISRYSLGRDYHKLFRNQLKKLGQKIEKEVEGLDSRPFVDSAPILERPLAQKAGLGWTGKHSLILDKDAGSWFFLGELLVNIPLPVDEPSVDECGKCTACITSCPTGAIIADGVVDARKCISYLTIEYDGVIPEEFREAIGNRIYGCDDCQLVCPWNRHADITEQKDFHRREDFKEADLVLLASWDEATFLKKMEGSAIRRIGHTQWLRNIYVAMGNAPFQQRIVETLESHRGNSDMLDVHIEWALEKQLQQLPSIIEVQKGNSKVATKKHRLIRIVEKGLPRDA

SEQ ID NO: 82056 - protein, 374 aa, unidentified
  source 1..374: note = Vibrionales bacterium
  REGION 1..374: note = tr|A0A366XJX1|A0A366XJX1_9GAMM Epoxyqueuosine reductase OS=Vibrionales bacterium C3R12 OX=2267228; GN = queG PE=3 SV=1
MNYDQLAIQIKIWARELGFQKVGICDVDLREHEGPLQKWLDNGYHGDMDWMARHGMMRARPDELLPGTVRVISARMNYLPPEAMFASNLSDPNLGYISRYSLGRDYHKLVRNKLKKLGQLIEQEVGQFGHRPFVDSAPILERPLAQKAGLGWTGKHSLILDKEAGSWFFLGELLIDLPLPVDTPSEDECGKCKACITSCPTNAIVDEKVVDGRRCISYLTIEFDGVIPEEFRVAIGNRIYGCDDCQLVCPWNRFSDLTDQTDFHRRTSFEEPDLLSLFSWDEDMFLKKMEGSAIRRIGHLQWLRNISIALGNAPYKLAIVEALESRFGLSDVLDTHIQWAIQQQLQQLPVDSARHSTKKQRLIRIVQKGLPRDA

SEQ ID NO: 82057 - protein, 310 aa, unidentified
  source 1..310: note = Vibrionimonas magnilacihabitans
  REGION 1..310: note = tr|A0A2S8SBD7|A0A2S8SBD7_9BACT Epoxyqueuosine reductase OS=Vibrionimonas magnilacihabitans OX=669455; GN = queG PE=3 SV=1
MSRIEAYSHTVKSVARQLGFDYCGIAKAEKLNDDAKRLEQWLHQGMHGSMQYMENHFDMRTDPSLLVPGARSVITLLKNYYPSQQQSAHTPHISKYAFGKDYHEVIRAQLKELLQALNEKIGEIHGRGFVDSAPVLERSWATKSGAGWIGKNGNLITKHSGSFYFIATLIVDITLDYDDPFAKDYCGSCSRCIDACPTGAIEDNKVINGSKCISYYTIELKDALLPEQMKDQFKDWMFGCDICQDVCPWNRFSKPHHEINFTPIPEILNLSTKQWEEMTEESFKNIFRHSPLKRTKFSGIQRNLRFITRA

SEQ ID NO: 82058 - protein, 309 aa, unidentified
  source 1..309: note = Vicingus serpentipes
  REGION 1..309: note = tr|A0A5C6S002|A0A5C6S002_9FLAO Epoxyqueuosine reductase OS=Vicingus serpentipes OX=1926625 GN=queG PE=3; SV = 1
MIKSTEYTQQIKTEATRLGFSFCGIAKAEYLEEESPRLEKWLSQNMHGKMQYMENYFEKRLDPTKLVEGSKSVVTLMYNYFPEKEQRDDSFNISKYAYGQDYHAIIKKKLKEFVSFIHEEVGEVNAQIYVDSAPVLERAWAKKSGLGWIGKNAMLIHPKNGSFFFLAEVILDLELEYDNPIKDYCGTCTACIDACPTEAILPGKVVDGSKCISYFTIELKDEIIPNEVKGKFNDWMFGCDICQDVCPWNRFSKPHNEKLFNPHPKLLEYSKNEWMDLTEEIYQEIFKKSAVKRTKFKGIKRNIDFLNKN

SEQ ID NO: 82059 - protein, 380 aa, Virgibacillus chiguensis
  REGION 1..380: note = tr|A0A1M5PPU1|A0A1M5PPU1_9BACI Epoxyqueuosine reductase OS=Virgibacillus chiguensis OX=411959 GN=queG; PE = 3 SV=1
MDTDQLKQEIIAYSKQIGIDKIGFASADVFTELKERLRRQQELDYQSGFEKGSIDERTEPMRLLPEAKSIISIALAYPSRMKGAPRSTKEERRGLFARASWGVDYHIVMRERLEKLASFIQERVPDGKNKVMVDTGELSDRAVAERAGIGFSGKNTSIITPEFGSFVYLGELITNVPFTPDEPVDDSCGSCTKCIDACPTGAIVQGGQLNAKRCIAFLTQTKDFLPDEFRSKIGNRVYGCDTCQMVCPKNLKIDFHHHREFEPEHEVAKPKLIPMLKLSNREFKQTFGHISGSWRGKKPIQRNSLIALGHYKDKTAVADMITVMKNDPRPVIRGTAAWSLGKIGTKEAFQAIREAMQEEKDEQVLVEMEKGLAFEDVYHS

SEQ ID NO: 82060 - protein, 380 aa, Virgibacillus dokdonensis
  REGION 1..380: note = tr|A0A2K9J156|A0A2K9J156_9BACI Epoxyqueuosine reductase OS=Virgibacillus dokdonensis OX=302167 GN=queG; PE = 3 SV=1
MDTDKLKQEIIEYSKQIGIDKIGFASADVFTELKERLRRQQELDYQSGFEKGSIEERTEPTRLLPEAKSIISIALAYPSRMKGAPRSTKEERRGLFARASWGVDYHIVMRERLEKLTSFIQERVPNGKNKVMVDTGELSDRAVAERAGIGFSGKNTSIITPEFGSFVYLGELITNVPFTPDEPVDDSCGPCTKCIDACPTGAIVQGGQLNAKRCIAFLTQTKDFLPDEFRSKIGNRVYGCDTCQMVCPKNLKVDFHHHPEFEPEHEVAKPKLIPMLKLSNREFKQTFGHISGSWRGKKPIQRNSLIALGHYKDTTAVADMITVMKNDPRPVIRGTAAWSLGKISTKEAFQAIREAMLEEKDEQVLVEMEKGLAFENVYHS

SEQ ID NO: 82061 - protein, 380 aa, Virgibacillus dokdonensis; identical to SEQ ID NO: 82059
  REGION 1..380: note = tr|A0A3E0WMM0|A0A3E0WMM0_9BACI Epoxyqueuosine reductase OS=Virgibacillus dokdonensis OX=302167 GN=queG; PE = 3 SV=1

SEQ ID NO: 82062 - protein, 381 aa, Virgibacillus halodenitrificans
  REGION 1..381: note = tr|A0A1J0GYR5|A0A1J0GYR5_VIRHA Epoxyqueuosine reductase OS=Virgibacillus halodenitrificans OX=1482; GN = queG PE=3 SV=1
MDINKLKQEVIEYSKEIGIDKIGFASADVFSELKERLKRQQTLGYQSGFEKGSVDERTEPTRLLPEAQSIISIALAYPSRMKDAPKSTKEERRGIFARASWGIDYHVVMREKLDKLADFLKEKVPDVSNRVMVDTGELSDRAVAERAGIGFSGKNTAIITPEFGSFVYLGELITNIPFLPDSPVEDSCGDCTKCLDACPTGALVQGGQLNAQRCIAFLTQTKDFLPDEFRTKIGNRVYGCDTCQVVCPKNKKVDFHHHPEFEPDHEIAKPKLKPMLRISNREFKNTFGSIAGSWRGKKPLQRNALIALGHYKDITAVEEVIEVMQTDPRPVIRGTAAWSLGKIGTERAYNAIHEAMKKEKDEQVIYEMEKGLAFEKEASRS

SEQ ID NO: 82063 - protein, 381 aa, unidentified
  source 1..381: note = Virgibacillus indicus
  REGION 1..381: note = tr|A0A265N790|A0A265N790_9BACI Epoxyqueuosine reductase OS=Virgibacillus indicus OX=2024554 GN=queG PE=3; SV = 1
MDTRQLKQEIIEYSKEIGIDKIGFASADVFGELKERLKRQQSLKYQSGFEKGSNEERTEPERLLPGAQSILSIAIAYPSRMKDAPISTKEDRRGIFARASWGIDYHVVLRDRLEKLSAFINEKLPDSVNKVMVDTGELSDRAVAERAGIGFSGKNTSIITPEFGSFVYLGELITNIPFIPDDPVEDSCGDCRKCLDACPTGALVQGGQLNAQRCIAFLTQTKDFLPDEFRTKIGTRIYGCDTCQVVCPRNKKVDFHIHPEFEPENEIAKPKLKPMLRISNREFKDTFGHVSGSWRGKKPLQRNALIALGHYKDKTAVEEMIGVMNNDPRPVIRGTAAWALGKIGTEEAYEAIKTAMEKEQDEQVLYEMEKGLDFLKEPSAK

SEQ ID NO: 82064 - protein, 376 aa, unidentified
  source 1..376: note = Virgibacillus massiliensis
  REGION 1..376: note = tr|A0A024QDZ8|A0A024QDZ8_9BACI Epoxyqueuosine reductase OS=Virgibacillus massiliensis OX=1462526 GN=queG; PE = 3 SV=1
MQTDLLKQEIIDYSKQIGIDKIGFASADVFGELKERLKRQQALNYQSGFEKGTIEERTEPTRLLPEAKSIISIALAYPSRMKDAPRSTKEERRGLFARASWGVDYHIVMRERLNKLAAFIQDKVPDGKNKVMVDTGELSDRAVAERAGIGFSGKNTSIITPEFGSFVYLGELITNVPFVPDEPVDDSCGSCTKCIDACPTGAIVQGGQLNAQRCIAFLTQTKDFLPDEFRSKIGNRVYGCDTCQVVCPKNHKVDFHIHPEFEPEHEVSKPKLIPMLKLSNREFKATFGHISGSWRGKKPIQRNTLIALGHYKDKTAVKEIIDVMTKDPRPVIRGTAAWSLGKIGTEEAFHAIKIAMEQETDEQVLFEMEKGLAFQN

SEQ ID NO: 82065 - protein, 381 aa, Virgibacillus necropolis
  REGION 1..381: note = tr|A0A221MG61|A0A221MG61_9BACI Epoxyqueuosine reductase OS=Virgibacillus necropolis OX=163877 GN=queG; PE = 3 SV=1
MNREKLKQEIIDYSKKIGIDKIGFASADVFSELKERLKRQQNLAYYSGFEKGSVEERTEPERLLPEAQSIISIAIAYPSRMENPPKSTKEERRGIFCRASWGTDYHVILRDRLEKLSAFIKEKVPEVKDKLMVDTGELSDRAVAERAGIGFSGKNTSIITPEFGSYVYLGELVTNIPFIPDEPVDDSCGECTKCLDACPTGALIQGGQLNAQRCIAFLTQTKDYLPDEFRTKIGNRVYGCDTCQVVCPKNKKIDFHIHPETEPDPEIAKPKLQPMLRISNREFKETFGHISGSWRGKKPLQRNALIGLAHYKDVSAVTEIIQVMQHDPRPVIRGTAAWSLGKIGTAEAFAAIEHALAIEKDEQVRYEMQKGLDFRHEVSAR

SEQ ID NO: 82066 - protein, 381 aa, Virgibacillus pantothenticus
  REGION 1..381: note = tr|A0A0L0QTJ4|A0A0L0QTJ4_VIRPA Epoxyqueuosine reductase OS=Virgibacillus pantothenticus OX=1473 GN=queG; PE = 3 SV=1
MHTDPLKQEIIAYSKQIGIDKIGFASADVFTELKERLRRQQELDYQSGFEKGSIEERTEPTRLLPEAKSIISIALAYPTRMKGAPRSTKEERRGLFARASWGVDYHVVMRERLEKLAAFIQERVPDGKNKVMVDTGELSDRAVAERAGIGFSGKNTSIITPEFGSFVYLGELITNVPFTPDEPVDDSCGSCTKCIDACPTGAIVQGGQLNAKRCIAFLTQTKDFLPDEFRSKIGNRVYGCDTCQMVCPKNLKVDFHIHPEFEPEHEVAKPKLIPMLKLSNREFKQTFGHISGSWRGKKPIQRNSLIALGHYKDTTAVADIIEVMKSDPRPVIRGTAAWSLGKIGTKEAFQAIKEAMLEEEDEQVLVEMEKGLAFEPLKDTD

SEQ ID NO: 82067 - protein, 381 aa, unidentified
  source 1..381: note = Virgibacillus phasianinus
  REGION 1..381: note = tr|A0A220TZ44|A0A220TZ44_9BACI tRNA epoxyqueuosine(34) reductase QueG OS=Virgibacillus phasianinus OX=2017483 GN=queG PE=4 SV=1
MNHEAVKQEIIEYSKKIGIDKIGFASADVFSELKERLKRQQDLAYYSGFEKGSIEERTEPERLLPEAKSIISIAIAYPSRMKNAPKSTKEARRGIFCRASWGTDYHVILRDRLAKLSSFIKEKFPESEDKLMVDTGELSDRAVAERAGIGFSGKNTSIITPEFGSFVYLGELITNIPFIPDSPVDDSCGDCTKCLDACPTGALIQGGQLNAQRCIAFLTQTKDYLPDEFRTKIGNRVYGCDTCQVVCPKNQKIDFHIHPETEPEPEIAKPRLQPMLRISNREFKETFGHIAGAWRGKKPLQRNALIGLAHYKDESAVGEIIQVMENDPRPVIRGTAAWSLGKIGTSEAYAAIEHALKTEQDEGVRYEMEKGLDFQHDISAK

SEQ ID NO: 82068 - protein, 381 aa, unidentified
  source 1..381: note = Virgibacillus profundi
  REGION 1..381: note = tr|A0A2A2IEK3|A0A2A2IEK3_9BACI Epoxyqueuosine reductase OS=Virgibacillus profundi OX=2024555 GN=queG; PE = 3 SV=1
MNTEQLKQEIIDYSKEIGIDKIGFASADVFGELKERLKRQQSLKYQSGFEKGSVEERTEPQRLLPEAQSILSIAIAYPTRMENAPKGTKEDRRGIFARASWGIDYHVVLRDRLEKLSAFIQEKVPDVQNKVMVDTGELSDRAVAERAGIGFSGKNTAIITPEFGSFVYLGELITNIPFVPDEPVEDSCGDCTKCLDACPTGALVQGGQLNAQRCIAFLTQTKDFLPDEFRTKIGNRVYGCDTCQVVCPRNKKIDFHIHPEFEPENEIAKPKLKPMLRISNREFKETYGHIAGSWRGKKPLQRNALIALAHFRDETAVEEIIAVLTNDPRPVIRGTAAWALGKIGTEKAYEAIKSAMEKEQDEQVLYEMEKGLDFEKELSLK

SEQ ID NO: 82069 - protein, 381 aa, Virgibacillus salinus
  REGION 1..381: note = tr|A0A1H1E6T0|A0A1H1E6T0_9BACI Epoxyqueuosine reductase OS=Virgibacillus salinus OX=553311; GN = SAMN05216231_2751 PE=4 SV=1
MNTDHLKQEIIDYSKDIGIDKIGFASADVFGELKERLRRQQSLGYQSGFEKGSVDERTEPERLLPESKSILSIAIAYPSRIKDSPKSTKDERRGIFCRASWGVDYHVVLREKLEKLSAFIEEKFPDAVNKVMVDTGELSDRAVAERAGIGFSGKNTSIITPEFGSYVYLGELITNIPFVPDKPLADGCGSCTKCLDACPTGALVQGGQLNAQRCLAFLTQTKDFMPDEFRSQIGNFIYGFDTCQVVCPYNQKVDFHNHPELEPESDVAKPKLKPMLRISNREFKETFGHIAGSWRGKKPLQRNALIALGHYKDVTAVEEMIAVMKNDVRPVIRGTAAWSLGKIGTNEAFEAITEAIEKETDEQVLFEMKKGLNFQQEFSTT

SEQ ID NO: 82070 - protein, 381 aa, Virgibacillus soli
  REGION 1..381: note = tr|A0A0Q9Y6R1|A0A0Q9Y6R1_9BACI Epoxyqueuosine reductase OS=Virgibacillus soli OX=480284 GN=queG PE=3 SV=1
MDYSQLKQDIIDYSKEIGIDKIGFASSDPFIEMKNRLIRQQELEYHSGFEHKNIEERTDPSLIFDQPRSIIAIALAYPSRMKDPPRGKKGERRGLFCRASWGIDYHQLVREKLSQLAIYIKERVPETAIKSMVDTGELVDRAVAERAGIGWSGKNCSIITPEFGSYVYLGEMITNLPFEPDEPLQDQCGDCTMCLDACPTGALVQPGQLNAKRCIAFLTQTKDFLPDEFRTKIGNRLYGCDTCQSVCPKNKGMDFHHHDAMEPEPEIVKPLLDPLLELSNRQFKEIFGEMSGSWRGKKPIQRNAIIALAHFKEKESVDKLIKVMEEDVRPVIRGTAAWALGKIGGEKAKLALHQAQSKEQDVSVLNEIEKGLQFFRLENEV

SEQ ID NO: 82071 - protein, 382 aa, Virgibacillus sp.
  REGION 1..382: note = tr|A0A268I1D4|A0A268I1D4_9BACI tRNA epoxyqueuosine(34) reductase QueG OS=Virgibacillus sp. 7505 OX=2022548 GN=queG PE=4 SV=1
MDTEQLKQELIAYSKKIGVDKIRFTTADVFQELKERLKQQQEKNYQSGFEKGTIEERTEPKKLMPSAQSIIAIALAYPSRLPNAPKSTKEEPRGLFCRASWGMDYHEVLRDRMNKLTAFLAERVEGFTYRSMVDTGELSDRAVAERAGIGFSAKNSFVITPEFGSYVYLGEVITNIPFLPDEAVEDSCGTCTKCIDSCPTGALVQGGQLNAQRCIAYLTQTKDFLPDEFRSKIGNRIYGCDTCQLVCPKNKGMDFHLHEEMEPDPEVVKPLLKPLLKMSNKEFKAKFGLISGSWRGKKPIQRNAILAIAHYKTTSAVPDLIELMEQDPRPVIRGTAAWAIGKIGLPEGFDAVRKAMDKEQDEQVLEEMRKGLQFEEEYAEAH

SEQ ID NO: 82072 - protein, 381 aa, Virgibacillus sp.
  REGION 1..381: note = tr|A0A075JKZ7|A0A075JKZ7_9BACI Epoxyqueuosine reductase OS=Virgibacillus sp. SK37 OX=403957 GN=queG PE=3; SV = 1
MDINKLKQEVIEYSKEIGIDKIGFASTDVFSELKERLKRQQELGYQSGFEKGSVDERTEPTRLLPEAQSIISIALAYPSRMKDAPKSTKEERRGIFARASWGVDYHVVMRDRLDRLAAFLKEKVPDVSNKVMVDTGELSDRAVAERAGIGFSGKNTAIITPEFGSFVYLGELITNIPFLPDSPVEDSCGECTKCLDACPTGALVQGGQLNAQRCIAFLTQTKDFLPDEFRTKIGNRVYGCDTCQVVCPKNKKVDFHHHPEFEPDHEIAKPKLKPMLRISNREFKETFGSIAGSWRGKKPLQRNALIALGHYKDITAVEELIEVMKTDPRPVIRGTAAWSLGKIGTERAYTAINDAMNKETDERVIYEMKKGLAFEKEASRN

SEQ ID NO: 82073 - protein, 378 aa, Viridibacillus arenosi
  REGION 1..378: note = tr|W4EPF2|W4EPF2_9BACL 4Fe-4S ferredoxin-type domain-containing protein OS=Viridibacillus arenosi FSL R5-213 OX=1227360 GN=C176_18121 PE=4 SV=1
MIVNVLQEELIEYAKTIGIDKIGFTSAAPFIELKNLLRRQQELNFQSGFEESDIEKRTEPTLLLEEAQSIIAIAIAYPSRMKNAPKGKRGERRGIFCRASWGMDYHTVLREKLALLEAFLQEKVPHAKMRSMVDTGELSDRAVAERAGIGWSAKNCSIITPEFGSYVYLGEMITNIPFAPDEPITDQCGDCTLCIDVCPTGAIVQAGQLNSNRCVAFLTQTKGFLPDEFRTKIGNRIYGCDTCQTVCPKNKGKLNWLHDSFKPDPEIAKPLLEPLLTISNKDFKAKFGYISGSWRGKKPIQRNAIIALAHFKEESALPKLIEVLQNDERPVIRGTAAWAIGKMGVVDAKEILQVALQKEQDPEVIIEIEKGLAFLAQK

SEQ ID NO: 82074 - protein, 378 aa, Viridibacillus arvi
  REGION 1..378: note = tr|A0A0M0LA28|A0A0M0LA28_9BACL Iron-sulfur cluster-binding protein OS=Viridibacillus arvi OX=263475; GN = AMD00_20010 PE=4 SV=1
MIVNDLQEELIEYAKTIGIDKIGFTSAAPFIELKNLLRRQQELNFQSGFEESDIEKRTEPTLLLEEAQSIIAIAIAYPSRMENAPKGKRGERRGIFCRASWGMDYHTVLREKLALLEAFLQEKVPQAKMRSMVDTGELSDRAVAERAGIGWSAKNCSIITPEFGSYVYLGEMITNIPFAPDEPMTDQCGDCTLCIDVCPTGAIVQAGQLNSSRCVAFLTQTKGFLPDEFRAKIGNRIYGCDTCQTVCPKNKGKLNWLHDAFKPDPEIAKPLLEPLLTISNKEFKAKFGYISGSWRGKKPIQRNAIIALAHFKEESAMPKLIEVLQNDERPVIRGTAAWAIGKMGVVEAKEILQVALQKEQDPEVIIEIEKGLAFLAQK

SEQ ID NO: 82075 - protein, 378 aa, Viridibacillus sp.
  REGION 1..378: note = tr|A0A2N0F2U0|A0A2N0F2U0_9BACL Epoxyqueuosine reductase OS=Viridibacillus sp. OK051 OX=1884360; GN = BD698_2204 PE=4 SV=1
MIVNDLQAELIEYAKTIGIDKIGFTSAAPFIELKSLLRRQQELNFQSGFEESDIEKRTEPNLLLEEAQSIVAIAIAYPSRMENAPKGKRGERRGIFCRASWGMDYHTVLREKLALLEAFLQEKVPYAKMRSMVDTGELSDRAVAERAGIGWSAKNCSIITPEFGSYVYLGEMITNLPFAPDEPMADQCGDCTLCIDVCPTGAIVQGGQLNSSRCVAFLTQTKGFLPDEFRAKIGNRIYGCDTCQTVCPKNKGKLNWLHDAFKPDPDIAKPLLEPFLTISNREFKEKFGHISGSWRGKKPIQRNAIIALAHFKEVSAMPKLLEILQQDTRPVIRGTAAWAIGKIGGAEAEEVLQAALQKEQDSEVIIEIEKGLAFLEEN

SEQ ID NO: 82076 - protein, 307 aa, unidentified
  source 1..307: note = Vitellibacter aquimaris
  REGION 1..307: note = tr|A0A137RJN3|A0A137RJN3_9FLAO Epoxyqueuosine reductase OS=Vitellibacter aquimaris OX=1548749 GN=queG; PE = 3 SV=1
MNDKSKNTAKIKSKAKRLGFLSCGISKAEFLEEEAPRLENWLNKNMHGEMAYMENHFDKRLDPTILVPDSKSVISLLLNYFPSEAQVENTYKISKYAYGTDYHFIIKDKLKQLMDFISEEIGEVRGRAFVDSAPVLDKAWAAKSGLGWIGKHSNLLTKQLGSFYFIAELIIDLDLEYDTPVTDHCGSCTACIDACPTNAIVADRVVDGSKCISYYTIELKNEIPTSEKGKFEDWMFGCDICQDVCPWNRFSKPNNEPLFNPHPELLSMTKKDWEEITEDVFQKLFKKSAVKRTKFLGLKRNINFLKD

SEQ ID NO: 82077 - protein, 339 aa, unidentified
  source 1..339: note = Vitiosangium sp.
  REGION 1..339: note = tr|A0A2T4VPX2|A0A2T4VPX2_9DELT tRNA epoxyqueuosine(34) reductase QueG OS=Vitiosangium sp. GDMCC 1.1324 OX=2138576 GN=queG PE=4 SV=1
MSPLPTAHLRQLSKQVGFDLVGFARAEPIPPRTLLDWLEAGCAADMDWMTTRAAERLDVSQLLPGARTVIAFATNYYRDEPRAADSPIARYARGRDYHSTLRDKLKAFRKRFSEAYPEVNHYGSVDSGPLMEKVWAARAGLGYVGKNGCFITEPYGSWVLLSALILDAEVDTYAEGPAGDRCGHCRKCIMSCPTGALLGNGRVDARACLSYQTIENRHAEVPESFRVEMDNIIFGCDICQDVCPLNRSPVFTPNERFAPRAVAELGVLELAALTPEQYEQLIPGTALARAKYDGLRRNAVYALGAAKQADARLLLEKLSQDPSEQVRHAAQWALRHLDV

SEQ ID NO: 82078 - protein, 372 aa, Vitreoscilla filiformis
  REGION 1..372: note = tr|A0A221KGF1|A0A221KGF1_VITFI Epoxyqueuosine reductase OS=Vitreoscilla filiformis OX=63 GN=queG PE=3; SV = 1
MVQDQEATRAEQVIGQQVVSALLQRAKALGFSQIGIADVSLESAEPGLLAWLEAGFHGSMAYMAQHGLKRARPAELLPGTVRVITARMDYLPERPGTDWRVLEHTRLAQPAQAALSVYARGRDYHKVLRQRLQRLADGLADDLGALPHWQARVFTDSAPVLEVELASRSGLGWRGKHTLTVSREAGSLFFLGEIFVNVPLPVTPPVSAHCGACTACLTACPTGAIVAPYRLDARRCISYLTIEHAGPIDVHLRPLLGNRIYGCDDCQLVCPWNKFARTTPLPDFAPRPALDGPPLLTLWAWDEPQFLRQTEGSPIRRIGYGRWRRNLAIALGNALAAGDAASDTIRHALWAARSSADDLVGEHIDWALAQAV

SEQ ID NO: 82079 - protein, 351 aa, Vitreoscilla sp.
  REGION 1..351: note = tr|A0A2L0PMV2|A0A2L0PMV2_VITS1 Epoxyqueuosine reductase OS=Vitreoscilla sp. (strain C1) OX=96942 GN=queG; PE = 3 SV=1
MNSNELTLAIRQHAQQLGLLDCKITTPNLSPEHDEKLSLWLAQGFKGEMSFFHKHGISRNHAEYVLPEVKSVIMVALPYWTEDFDQTRAILADEKAAYISRYALGRDYHKVLRSRLKNLGQYIEQLVPDVIYRPVVDSAPLSEVSFATQAGLGWRGKHSLLLQKQTGSLYFLGALLTNLALEPNEEIPSHCGQCSRCMQACPTQAIVAPYTVDARRCISYLTIELNDIIPVEFRKAMGNRIYGCDDCQLVCPFNRFTKPSQEADFQVRHGLDQVSLVELLAWDETMFQSRMAGSPIYRIGYHKWLSNIIIALGNVSKSATIASLMVPLCTHPNHLIAEAAKWTLLQHDYPE

SEQ ID NO: 82080 - protein, 346 aa, Vogesella indigofera
  REGION 1..346: note = tr|A0A495BNP8|A0A495BNP8_VOGIN Epoxyqueuosine reductase OS=Vogesella indigofera OX=45465 GN=queG PE=3; SV = 1
MASQIKGWAKELGFADARITRAALPAETEASLLAWLAAGNHGEMEYMARHGVLRVRPAELVPGTVRVISLRMHYWPAAARDAEAVLADGTRAYLSRYALGRDYHKVVRNRLQKLADRITQAVGEHGYRVFTDSAPLAEVALAAQAGQGWRGKHTLLLNKKQGSLFFLGEILTDLPLPEDDSEDGHCGSCTRCLDVCPTGAIMAPYQVDARRCISYLTIELKGAIPEPLRPLIGNRVYGCDDCQLTCPWNRFVVHSAEDDFAVRHGLDDVSLLELFGWDEATFASRMAGSPIYRIGYAKWLSNLAIGLGNAPYAAEIVVALQQRQDHAEEVVRESVVWALAQQQGRT

SEQ ID NO: 82081 - protein, 359 aa, Vogesella sp.
  REGION 1..359: note = tr|A0A0J5GGR4|A0A0J5GGR4_9NEIS Epoxyqueuosine reductase OS=Vogesella sp. EB OX=1526735 GN=queG PE=3 SV=1
MSEISCKSENYRQLASQIKGWAKELGFADARITRAVLPAETEASLLAWLAAGNHGEMAYMARHGVLRVRPAELVPGTVRVISLRMHYWPAAARAAEAVLADGTRAYLSRYALGRDYHKVVRNRLQKLAERITQAVGEHGYRVFTDSAPLAEVALAAQAGQGWRGKHTLLLNKKQGSLFFLGEILTDLPLPEDDSEDGHCGSCTRCLDVCPTGAIVAPYQVDARRCISYLTIELKGVIPEPLRPLIGNRVYGCDDCQLACPWNRFVVHSAEDDFAVRHGLDDVSLLELFGWDEATFASRMAGSPIYRIGYAKWLSNLAIGLGNAPHAAEIVVALQQRQDHAEEVVRESVAWALAQQQGRA

SEQ ID NO: 82082 - protein, 364 aa, Vogesella sp.
  REGION 1..364: note = tr|A0A1C6MDA1|A0A1C6MDA1_9NEIS Epoxyqueuosine reductase OS=Vogesella sp. LIG4 OX=1192162 GN=queG PE=3; SV = 1
MNEMSVQNENYRHLASQIKLWASELGFADARITRAELPAEAETALAAWLAEGCHGEMDYMARHGMLRLRPAELVPGTLRVISLRMHYWPAGACDADTVLADGNSAYVSRYALGRDYHKVIRNRLQKLAERISAADPAHQFRVFTDSAPLAEVALAAQAGQGWRGKHTLLLNKQQGSLFFLGEILTNLPLPEDDSEPGHCGRCTRCIDICPTGAIVAPYKVDARRCISYLTIELQGVIPEPLRPLIGNRVYGCDDCQLACPWNRFAVPTAEADFAVRHGLDNVSLLELFGWDEATFLARMAGSPIYRIGYAKWLSNLAIGLGNAPYDAAIVVALQQREGSENDWVRESVAWALQRQLQAAAEEGK

SEQ ID NO: 82083 - protein, 386 aa, Vulcanibacillus modesticaldus
  REGION 1..386: note = tr|A0A1D2YSL5|A0A1D2YSL5_9BACI tRNA epoxyqueuosine(34) reductase QueG OS=Vulcanibacillus modesticaldus OX=337097 GN=BHF71_11015 PE=4 SV=1
MSIEVKEKLIDFANKIGIDKIGFTSADPFWELKDILIRHRELGYESGFEERDIDKRVDPKLTMKDAKSIIAIAIAYPTKISEPLKSSKGMYRGFVARSAWGIDYHLILREKMKVLGEYLKSLVPDAKYVYMTDTGVLSDHAVAQRAGIGWIGKNSLLITPEYGSYVYLGEIITNVELPSDTPLKEQCGECNRCLTTCPTKAIVSPKQVNSKKCLSYLTQTKVFLDERWMEKLGNRLFGCDTCQQVCPKNKGINYTHHEQTLPEPELAKPLLKPLLTIKNKEFKNTWGKSAASWRGKKPIQRNAIIGLAHFKDVTALPQLIQLLMEDNRSTIRQTAAWAIGRIGGNKAKEGLQMAKNKENDTKVLQEIVKSLKMLSNQEILDSQKSE

SEQ ID NO: 82084 - protein, 358 aa, unidentified
  source 1..358: note = Vulcaniibacterium tengchongense
  REGION 1..358: note = tr|A0A3N4W5J2|A0A3N4W5J2_9GAMM Epoxyqueuosine reductase OS=Vulcaniibacterium tengchongense OX=1273429; GN = queG PE=3 SV=1
MNPAAASAPTPDHAALARRIRALAAEFGFQRCGIAGVELGEDEAHLRDWLAQGLYGSMEWMARHGDLRARPQALHPGTIRVISVGLDYGRDADEAWATLEDGERAYVARYALGRDYHKLMRQRLQRLADRIAEEVGPFGHRVFVDSAPVLERALARNAGLGWIGKNTCLIDRDGGSFFFLGEIYVDLPLPVDAPATAHCGTCRRCIDVCPTRAIVAPYRLDARRCIAYLTIEHAGPIPEELRAPIGNRIFGCDDCQLVCPWNKFAQRTDEPDFRARNDLDRASLAQLFAWSEEEFLQRTEGSAIRRSGYERWLRNIAVALGNAPSTPEVVAALRSRAAHPSPLVREHVEWALRRHGAG

SEQ ID NO: 82085 - protein, 370 aa, unidentified
  source 1..370: note = Vulgatibacter incomptus
  REGION 1..370: note = tr|A0A0K1PAH2|A0A0K1PAH2_9DELT Epoxyqueuosine (OQ) reductase QueG OS=Vulgatibacter incomptus OX=1391653; GN = AKJ08_0501 PE=4 SV=1
MMLSAEDRGALLRRLGREAGFDLVGLAPARALDPSPFEQYFAEGLHADMEWMRDERRVDPRLLLPGAKTVAVFALSYFDPAASPGRVARYARGTDYHSILRRKLRKLRKALAAADPGVRTYGSVDWGPIAEKPWAQAAGLGWIGKNGCLITRSHGSWVVLGALVLDQECLPYDEPHRDFCGDCAACLPSCPTRAFPRPYVVDASRCLSYQTIENRGAVPDELKEGTSGWIFGCDACQEVCPWNRRFAEPTREAGFLPRTQALWDVPLARLISMDHAEWSGRARGTAMARPKHFGTVRNALLAAGESGDLSLVDACATRLDDPHEGVRDAAEWAVRRLGSDPDELRRAAEALPPCGAGLDDTSSHGDDGAP

SEQ ID NO: 82086 - protein, 303 aa, Waddlia chondrophila
  REGION 1..303: note = tr|D6YVS8|D6YVS8_WADCW Uncharacterized protein; OS = Waddlia chondrophila (strain ATCC VR-1470 / WSU 86-1044) OX=716544 GN=wcw_0873 PE=4 SV=1
MHYQKIKEKAFELGYDDVGITDAIIPEEDIQAYRKWLDKGFQAKLSYMENEIRCTPEKLLPGAKTAIIFISYYKQPPLPFRKDAGLIASYARGRKYHNVHHSRLKKFVNWFEQEQGQQGSCKAFSDSTPILEKALAVRAGLGWFGKNTLLIHRKFGTFTLLSGVLTTADIQDKTMNLRLPRCGSCTRCLDSCPTGALKEPYLMDASKCLSNHLIESKDPLPEEISKKNPGYLFGCDICQDVCPHNIRKPPSESKDFAPESGMGAYITLDELCSLELEPEKLYGTPLQRRGISGLKHTASRLFS

SEQ ID NO: 82087 - protein, 303 aa, Waddlia chondrophila; identical to SEQ ID NO: 82086
  REGION 1..303: note = tr|F8LA89|F8LA89_9BACT Putative electron transport protein yjeS OS=Waddlia chondrophila 2032/99 OX=765953; GN = yjeS PE=4 SV=1

SEQ ID NO: 82088 - protein, 322 aa, unidentified
  source 1..322: note = Waddliaceae bacterium
  REGION 1..322: note = tr|A0A2E3M0F3|A0A2E3M0F3_9BACT tRNA epoxyqueuosine(34) reductase QueG OS=Waddliaceae bacterium; OX = 2026802 GN=queG PE=4 SV=1
MKPITLDELKEKAFEFGWDDMGSCKAEIPASDISFYLSWIKHAFHGELHYMEKEMRCYPQEILPGAKTAIIFLSHYKQEHVPFFKNKGVVASYARHRDYHNVHRKRLKRYIRWLEERSGQEGIARGFSDSKPVLEKALAVQAGLGWMGKNSLLIHRKFGTFTLLSGIFTTLELPIYLGPDLRKPKCGTCTRCLDACPTKAIVAPYTVNASKCLSYHLIESKGPVAKEASEKNPGYIFGCDICQDVCPHNVRPPLASHPDFTENGVGAYLTESDIDQFIKEPERLYGTPLNRRGASGLKHSAQALFSRPLESPPSEDKAHEEF

SEQ ID NO: 82089 - protein, 314 aa, Weeksella virosa
  REGION 1..314: note = tr|F0NYU4|F0NYU4_WEEVC Epoxyqueuosine reductase; OS = Weeksella virosa (strain ATCC 43766 / DSM 16922 / JCM 21250 / NBRC 16016 / NCTC 11634 / CL345/78) OX=865938; GN = que G PE=3 SV=1
MILAEKLSTLEMRSQLIKNKAKELGFLSCGIAKAEFLEQEAPRLEAWLKNNYHGDMSYMENNFDMRLDPRLLVDGAKTVISLAYNYYQPIDRNPDSYKIAMYAQGEDYHFVVKEKVRDLLHYIQEEIGNVNGRAFTDSAPILEHAWAQKAGIGWIGKNSLLLSKQKGSFFFLAELIVDLEMSYDNAIETDHCGNCTRCIDACPTEAILPNKTVNGSQCISYFTIELKGEIPTEMKGKFDDWIFGCDICQEVCPWNRFSLPTQEKKFIGHEKINNFSKTDWEEITEEVFKEMFRKSPVKRTKFTGLKRNIDFLKK

SEQ ID NO: 82090 - protein, 348 aa, Wenxinia marina
  REGION 1..348: note = tr|A0A0D0QF54|A0A0D0QF54_9RHOB Epoxyqueuosine reductase OS=Wenxinia marina DSM 24838 OX=1123501 GN=queG; PE = 3 SV=1
MDRHALKQALDAEARAAGFAAMGVCRPDAVPQAAGRLATFLKEGRHGDMCWMAERTHWRGDPAALWPQARSVVMLAESYAPEHDPLNVLDRPDRAAISVYAHGRDYHDLVKKRLKRVGRWLLERCPGEEIKVFVDTAPVMEKPLAQAAGLGWQGKHTNLLGRDFGNWVFLGAIFTTVELPPDPPEAEHCGSCRKCLDVCPTDAFPAPFQLDARRCISYLTIEHAGPIHEEFRPALGNRIYGCDDCLAVCPWNKFAVRAADQRYLAEDGPPRLAELAALDDAAFRKRFSGSAVKRIGRDRFVRNVLYAIGNSGDPRLADSARALADDPDPAVADAARWALSRLRQRGDT

SEQ ID NO: 82091 - protein, 336 aa, unidentified
  source 1..336: note = Wenxinia saemankumensis
  REGION 1..336: note = tr|A0A1M6FR22|A0A1M6FR22_9RHOB Epoxyqueuosine reductase OS=Wenxinia saemankumensis OX=1447782; GN = SAMN05444417_2455 PE=4 SV=1
MVAEARAAGFVSAGICHPDAAPETAERLAAFVGAGLHGQMGWMAERMHWRGDAAALWPAARSVVMLAESYRPEHDPMAVLDRPEKGAISVYAQGRDYHDLVKKRLKRVGRWLLERCPGEEIKVFVDTAPVMEKPLAQAAGLGWQGKHTNLLSRDFGNWVFLGAIFTTIELPPDPPETEHCGSCTRCLDICPTNAFPAPFRLDPRRCISYLTIEHDGPVDEELRALMGNRIYGCDDCLAICPWNKFAAQARETRYLRAGGAPDLAELVALDDAAFRARFSGSAIKRIGVERFRRNVLYAIGNSGRAELVPAAAAHVGAADAAVDDAARWAVARLAKA

SEQ ID NO: 82092 - protein, 345 aa, unidentified
  source 1..345: note = Wenzhouxiangella marina
  REGION 1..345: note = tr|A0A0K0XX17|A0A0K0XX17_9GAMM Epoxyqueuosine reductase OS=Wenzhouxiangella marina OX=1579979 GN=queG; PE = 3 SV=1
MERIRAWGAELGFDQVGISDLDLAAYEARLDAWLAEGLHGEMDWMAAHGRKRSRPELLQPGTRSVITVRMDYLPADATPVEELLESPERACISRYALGRDYHKVMRQRLKRLAQRIEQAIGPFGHRVFTDSAPVLEKPLAEKSGLGWIGKHTNLLNRHAGSWFFLGEIYTDLALPPDRPVRNHCGSCRRCIDVCPTQAIVAPYRVDARRCISYLTIELKGSIPEEFRKPMGNRIYGCDDCQMVCPWNRYAQHSRVDDFSPRADLDAGDLVTLFAWDEASFLQRTEGTAIRRIGHERWLRNLAVALGNAPTSAVVLNALEARRDHPSPLVREHVQWALEQHGKAAG

SEQ ID NO: 82093 - protein, 360 aa, unidentified
  source 1..360: note = Wenzhouxiangella sediminis
  REGION 1..360: note = tr|A0A3E1KCW7|A0A3E1KCW7_9GAMM Epoxyqueuosine reductase OS=Wenzhouxiangella sediminis OX=1792836 GN=queG; PE = 3 SV=1
MSHGRDYRQDEPDTGELVEKIRQWGRELGFAEVGVADTDLSGYEARLDEWLAEGRQGEMDWMAAHGRKRSRPALLHPDTRSVIVARMDYLPESARPVEELLEQPDRAVVSRYALGRDYHKLIRKRLKKLADRIEREIGPFGHRVFTDSAPVLEKPLAEKAGLGWIGKHTVLLNRHAGSWFFLGEIYTDLELPPDRPVSQHCGSCRRCIDVCPTQAITEPFQLDARRCISYLTIELKGSIPVELRPLMGNRVFGCDDCQMVCPWNRYAQHTGEADFAPRKDLDAGDLVELFGWDETTFLERTEGNPIRRTGYERWLRNLAVALGNATTSERVVGALRARRKHPSGLVREHVEWALARHDAD

SEQ ID NO: 82094 - protein, 363 aa, unidentified
  source 1..363: note = Wenzhouxiangella sp.
  REGION 1..363: note = tr|A0A372BSE7|A0A372BSE7_9GAMM Epoxyqueuosine reductase OS=Wenzhouxiangella sp. 15181 OX=2301224 GN=queG; PE = 3 SV=1
MSIMSHDCDYRQGELDSGELVEKIRQWGLELGFAEVGIADTDLSVYEQRLDAWLAEGRHGEMDWMAAHGRKRSRPALLHPDTRSVIVARMDYLPESARPVEELLDQPDRAVVSRYALGRDYHKLIRKRLKKLAQRIEREIGPFGHRVFTDSAPVLEKPLAEKAGLGWIGKHTLLLSRHAGSWFFLGEIYTDLELPADEPVTPHCGTCRRCIDVCPTQAITGPYQLDARRCISYLTIELKGSIPEELRPLMGNRVFGCDDCQMVCPWNRYAQHTGEADFAPRKDLDAGDLVELFGWDEATFLDRTEGNPIRRTGYECWLRNLAVALGNAPTSSEVVEALRARRDHSSELVREHVAWALDRHATE

SEQ ID NO: 82095 - protein, 318 aa, unidentified
  source 1..318: note = Westiellopsis prolifica
  REGION 1..318: note = tr|A0A4Q9J6S2|A0A4Q9J6S2_9CYAN Epoxyqueuosine reductase OS=Westiellopsis prolifica IICB1 OX=1970206; GN = queG PE=3 SV=1
MNQLPGTNSAEVKQQAVELGFHKVGIAAVDGTDEQQMERLQAWIELGYHADMEWMTSLKRQDIKLVMSEVRSLICVALNYYTPHQRPRGEEYAKISRYAWGRDYHKVMHKKLKALSGWLQGQGENIQARYYADTGPVQDKVWAQKAGIGWIAKNGNVITREYGSWVFLGEVLTNLELEPDKPHTQHCGNCTRCLEACPTDAITSPFVVDANRCIAYHTIENRQEKLPEAIASNLQGWIAGCDICQDVCPWNQRFASPTDVEEFQPYPGNIAPKLVELAQISDHEWDERFPASALRRIKPEMLRRNARANLNAFQQAQE

SEQ ID NO: 82096 - protein, 311 aa, unidentified
  source 1..311: note = Williamwhitmania taraxaci
  REGION 1..311: note = tr|A0A1G6KNF8|A0A1G6KNF8_9BACT Epoxyqueuosine reductase OS=Williamwhitmania taraxaci OX=1640674; GN = SAMN05216323_10264 PE=4 SV=1
MENSPPKSLKENICIKAAELGFEAVGFAKAEHLSSEKERLNNWLNQGFQAGMGYMEKHFEMRLNPTLLVEEAKTVISLLYSYNQGEEQATDAPRVARYAWFRDYHKELKQRMKVLMEFISLELGTPVNGRYFTDSAPVLERAWAVRSGLGWIGKNSLLIHPKLGSFTLLAELILDLELEPDQPFGPGLCGACTRCIDSCPTSAIVAAGVVNSNLCISYLTIEHKGEFTQEQHTMVDGHAFGCDICQEVCPWNKKPLRVLSGKADLNRGLLSLTPAQWQSIDPEQFEKIFFGSAVKRAGYSGIIRNLNQQKQ

SEQ ID NO: 82097 - protein, 309 aa, Winogradskyella arenosi
  REGION 1..309: note = tr|A0A368ZJA8|A0A368ZJA8_9FLAO Epoxyqueuosine reductase OS=Winogradskyella arenosi OX=533325 GN=queG; PE = 3 SV=1
MINNKTRYTELIKSEAKRLGFLSCGISQAGFLEVEAPRLERWLKDNNNGEMRYMENHFDKRLDPTLLVEGSKSMVSLLLNYYPEDTQTEDSYKISKYAYGNDYHHVIKHKLKSLLYFIQDEIGEVGGRAFVDSAPVLDKAWAAKSGLGWIGKHSNLLTQKVGSFYFIAELIIDLELDYDTPVTDHCGTCTACLDACPTEAITAPYVVDGSKCISYFTIELKENIPSEFKGQFEDWMFGCDICQDVCPWNRFSKPHNEPLFNPHPELLEMTKKDWEEITEDTFSKVFQKSAVKRTKFSGLERNIRFLKED

SEQ ID NO: 82098 - protein, 308 aa, unidentified
  source 1..308: note = Winogradskyella aurantia
  REGION 1..308: note = tr|A0A265V0N0|A0A265V0N0_9FLAO Epoxyqueuosine reductase OS=Winogradskyella aurantia OX=1915063 GN=queG; PE = 3 SV=1
MIENKSKYSQLIKAEAKRLGFLSCGISKAEFLEEEAPRLEAWLNKNRHGEMRYMENHFDKRLDPTLLVEGSKSVVSLLLNYYPSELQNENSYKISKYAYGTDYHFVIKDKLKSLLQVIKDEIGDVHGRAFVDSAPVLDKAWAAKSGLGWIGKHSNLLTQQVGSFYFIAELIIDLDLDYDTPVTDHCGTCTACIDACPTEAITEPYVVDGSKCISYFTIELKDNIPTEFKGQFDDWMFGCDVCQDVCPWNRFSKPHNEPLFNPHPELLEMTKKDWEEITEDTFRKVFKNSAVKRTKFSGLERNIRFLKS

SEQ ID NO: 82099 - protein, 306 aa, Winogradskyella epiphytica
  REGION 1..306: note = tr|A0A2V4X1S8|A0A2V4X1S8_9FLAO Epoxyqueuosine reductase OS=Winogradskyella epiphytica OX=262005 GN=queG; PE = 3 SV=1
MDNRNKYTQIIKAEAKRLGFLSCGISKAEFLEEEAPRLEAYLNNNMNGEMRYMENHFDKRLDPTLLVEGSKSVVSLLLNYYPSEFQNEDSYKLSKYAYGTDYHFVIKDKLKSLLQFIQEEIGEVEGRAFVDSAPVLDKAWAAKSGLGWVGKHTLLLTKNVGSFYFIAELIIDLELEYDHATTDHCGTCTKCIDACPTEAITEPYVVDGSKCISYFTIELKENLPTEFKGKFDDWMFGCDICQDVCPWNRFSKSHNEPLFNPHPDLLEMTKKDWEEITEDTFRKVFKKSAVKRTKYAGLTRNIEFLK

SEQ ID NO: 82100 - protein, 308 aa, Winogradskyella eximia
  REGION 1..308: note = tr|A0A3D9H4C0|A0A3D9H4C0_9FLAO Epoxyqueuosine reductase OS=Winogradskyella eximia OX=262006 GN=queG PE=3; SV = 1
MINNTSKYSKIIKAEAKRLGFLSCGISKAEFLEAEAPRLETWLNKNMNGEMRYMENHFDKRLDPTLLVEGSKSVVSLLLNYFPSETQTDDSYKLSKYAYGNDYHHVIKNKLKSLLYFIQEEIGEVGGRAFVDSAPVLDKAWAAKSGLGWIGKHSNLLTQQVGSFYFIAELIIDLELEYDYATTDHCGTCTKCIDACPTEAITEPYVVDGSKCISYFTIELKENIPTEFKGQFNDWMFGCDICQDVCPWNRFSKPHKEPLFNPHPELLDMSKKDWEEITEDTFKKVFQKSAVKRTKFSGLERNIEFLKP

SEQ ID NO: 82101 - protein, 308 aa, unidentified
  source 1..308: note = Winogradskyella jejuensis
  REGION 1..308: note = tr|A0A1M5LVS8|A0A1M5LVS8_9FLAO Epoxyqueuosine reductase OS=Winogradskyella jejuensis OX=1089305 GN=queG; PE = 3 SV=1
MIENKTKYTEFIKTEAKRLGFLSCGISKAQFLEEEAPRLEAWLNKNMHGEMRYMENHFDKRLDPTLLVEDSKSLVSLLLNYFPSEIQNENAYKLSKYAYGTDYHFVIKDKLKELLSAIQDEIGEVNGRAFVDSAPVLDKAWAAKSGLGWIGKHSNLLSQKTGSFYFIAELIIDLELDYDTPTTDHCGTCTACIDACPTEAITEPYVVDGSKCISYFTIELKDNIPSEFKGKFDDWMFGCDVCQDVCPWNRFSKPHNEPLFNPHPELLSMTKNDWEEITEDTFRKVFKKSAVKRTKFSGLQRNIKFLKH

SEQ ID NO: 82102 - protein, 308 aa, Winogradskyella pacifica
  REGION 1..308: note = tr|A0A3D9ME23|A0A3D9ME23_9FLAO Epoxyqueuosine reductase OS=Winogradskyella pacifica OX=664642 GN=queG; PE = 3 SV=1
MLNHKAKYSEIIKAEAKRLGFLSCGISKAEFLETEAPRLEAWLNKNMNGEMGYMENHFDKRLDPTLLVEGSKSVISLLLNYYPSETQTEDSYKLSKYAYGNDYHHVIKYKLKSLLYFIQDEIGEVGGRAFVDSAPVLDKAWAAKSGLGWIGKHSNLLTQQVGSFYFIAELIIDLELEYDHATTDHCGTCTKCIDACPTEAITEPYVVDGSKCISYFTIELKENLPSEFKDKFDDWMFGCDVCQDVCPWNKFSKPHNEPLFNPHPELLDMTKKDWEEITEDTFKKVFQKSAVKRTKFSGLERNIRFLRD

SEQ ID NO: 82103 - protein, 308 aa, unidentified
  source 1..308: note = Winogradskyella psychrotolerans
  REGION 1..308: note = tr|S7X1A1|S7X1A1_9FLAO Epoxyqueuosine reductase; OS = Winogradskyella psychrotolerans RS-3 OX=641526 GN=queG; PE = 3 SV=1
MLNHKAKYSEMIKAEAKRLGFLSCGISKAEFLETEAPRLEAWLKKNMNGEMHYMENHFDKRLDPTLLVEGSKSVISLLLNYYPSETQTDDSYKLSKYAYGNDYHHVIKHKLKSLLYFIQDEIGEVGGRAFVDSAPVLDKAWAAKSGLGWIGKHSNLLTQQVGSFYFIAELIIDLELEYDHATTDHCGTCTACIDACPTEAITEPYVVDGSKCISYFTIELKENLPSEFKGKFDDWMFGCDVCQDVCPWNKFSKPHNEPLFNPHPELLDMTKKDWEEITEDTFKKVFQKSAVKRTKFSGLERNIKFLKD

SEQ ID NO: 82104 - protein, 308 aa, Winogradskyella sp.
  REGION 1..308: note = tr|A0A520L1N0|A0A520L1N0_9FLAO Epoxyqueuosine reductase OS=Winogradskyella sp. OX=1883156 GN=queG PE=3; SV = 1
MINNKIKHTELIKTEAKRLGFLSCGMSKAEFLEDEAPRLEAWLNKNMHGDMRYMENHFDKRLDPTLLVEGSKSVVSLLLNYYPLEFQNSDSYKLSKYAYGTDYHFVIKDKLKELLHIIQEQIGEVNGRAFVDSAPVLDKAWAAKSGLGWIGKHSNLLSQKTGSFYFIAELIIDLELEYDSPVTDHCGTCTACIDACPTEAITEPYVVDGSKCISYFTIELKENIPTEFKGKFDDWMFGCDVCQDVCPWNRFSKSHNEPLFNPNPELLSMTKKDWEEITEDTFRKVFKKSAVKRTKFSGLQRNIKFLKD

SEQ ID NO: 82105 - protein, 308 aa, Winogradskyella sp.
  REGION 1..308: note = tr|A0A1H1TKI8|A0A1H1TKI8_9FLAO Epoxyqueuosine reductase OS=Winogradskyella sp. RHA_55 OX=1249933 GN=queG; PE = 3 SV=1
MLNNKATYSAIIKAEAKRLGFLSCGISKAEFLEEEAPRLETWLNKNMNGDMHYMENHFDKRLDPTLLVEGSKSVVSLLLNYYPSQKQTADSYKLSKYAYGNDYHHVIKHKLKSLLYFIQDEIGDVNGRAFVDSAPVLDKAWAAKSGLGWIGKHSNLLTQQVGSFYFIAELIIDLELAYDHATTDHCGTCTKCIDACPTDAITEPYVVDGSKCISYFTIELKENLPKAYKGTFDDWMFGCDICQDVCPWNRFSKAHNEPLFNPHPELLDMTKKDWDEITEDTFKKVFQKSAVKRTKYSGLKRNIKFLKE

SEQ ID NO: 82106 - protein, 308 aa, Winogradskyella thalassocola
  REGION 1..308: note = tr|A0A1G7VK20|A0A1G7VK20_9FLAO Epoxyqueuosine reductase OS=Winogradskyella thalassocola OX=262004; GN = queG PE=3 SV=1
MLNHKAKYSEIIKAEAKRLGFLSCGISKAEFLETEAPRLEAWLNKNMNGEMQYMENHFDKRLDPTLLVEGSKSVISLLLNYYPSETQTDTSYKLSKYAYGNDYHHVIKHKLKSLLYFIQDEIGEVGGRAFVDSAPVLDKAWAAKSGLGWIGKHSNLLTQQIGSFYFIAELIIDLELEYDHATTDHCGTCTKCIDACPTEAITEPYVVDGSKCISYFTIELKENLPSEFKGKFDDWMFGCDVCQDVCPWNKFSKPHNEPLFNPHPQLLDMTKKDWEEITEDTFKKVFQKSAVKRTKFAGLERNIEFLKP

SEQ ID NO: 82107 - protein, 308 aa, unidentified
  source 1..308: note = Winogradskyella wandonensis
  REGION 1..308: note = tr|A0A4R1KTN3|A0A4R1KTN3_9FLAO Epoxyqueuosine reductase OS=Winogradskyella wandonensis OX=1442586; GN = queG PE=3 SV=1
MIDNKTKYTEFIKTEAKRLGFLSCGISKAQFLEEEAPRLEAWLNKNMHGEMRYMENHFDKRLDPTLLVEDSKSVVSLLLNYYPEETQTENSFKLSKYAYGTDYHFVIKDKLKELLSSIQDEIGEVHGRAFVDSAPVLDKAWAAKSGLGWIGKHSNLLSQKTGSFYFIAELIIDLELDYDTPTTDHCGTCTACIDACPTEAITEPYVVDGSKCISYFTIELKDNIPLEFKGKFEDWMFGCDVCQDVCPWNRFSKSHQEPLFNPHPELLYMTKKDWEEITEDTFRKVFKKSAVKRTKFSGLQRNIKFLKD

SEQ ID NO: 82108 - protein, 356 aa, unidentified
  source 1..356: note = Woeseia oceani
  REGION 1..356: note = tr|A0A193LKS3|A0A193LKS3_9GAMM Epoxyqueuosine reductase OS=Woeseia oceani OX=1548547 GN=queG PE=3 SV=1
MTSINTKNDLDALKKRIQAWSASLGFQQTGISNVDLGAAEDRLHAWLAKHYHGEMAYMERHGLKRSRPDMLVPGTLRVISVRMDYFPDEQQRAKDLLDHPRKAYVSRYALGRDYHKLMRKRLQKLARLIEDDIGDFGYRVFVDSAPVLEKPLAEKSGLGWIGKHTNVINRQAGSWFFLGELYTDLPLAEDVAESSHCGSCRACIDVCPTAAIVAPYELDARRCISYLTIEMKGSIPEDLRKPIGNRVYGCDDCQLFCPWNKFAKPTAEGDFAPRHSLDDADMAALFRWDEATWLSNTEGSAIRRIGFEQWLRNLAVGLGNAETSTAVIEALQSRRDHGSALVREHVNWALQQHNVL

SEQ ID NO: 82109 - protein, 370 aa, unidentified
  source 1..370: note = Woeseia sp.
  REGION 1..370: note = tr|A0A2E6E8N2|A0A2E6E8N2_9GAMM Epoxyqueuosine reductase OS=Woeseia sp. OX=1980636 GN=queG PE=3 SV=1
MTKPIKTPDNKKLAANIKRWGRELGFQQVGISDVDLSRAEKLLETWLEKGFHGEMSYMSEHGQKRSRPEQLIPGTLSVISVRINYLPDEEDDLVELLDHPDRAYISRYALGRDYHKVLRGRLKKLAKTIEKNIGPHGYRVFVDSAPVLEKPLAQKAGLGWIGKHTNLINRDAGSWFFLGELFVDIPLPPDIPEIEHCGSCRKCIDICPTNAIVAPYELDARRCISYLTIELKGDIPIEFRPLIGNRIYGCDDCQLYCPWNKFAEPTGEKDFSPRNDLNSISLIALFEWTETEWKKKTEGSAIRRISYEQWLRNIAVALGNAKSSEKVIAALRSRLETDSEMVRNHVQWALDQHNRHSNNIHPARKNTSAN

SEQ ID NO: 82110 - protein, 358 aa, unidentified
  source 1..358: note = Woeseia sp.
  REGION 1..358: note = tr|A0A2E6ZK02|A0A2E6ZK02_9GAMM Epoxyqueuosine reductase OS=Woeseia sp. OX=1980636 GN=queG PE=3 SV=1
MQVLDKEHETIDFLSLKKKIISWSDEVGFQKTGISDINLSLAEERLTNWLKLKFHGSMKYMEKHGSKRYRPQELVPGTIRIISVRMDYLPQEQDEAINQLNDNQNAYVSRYALGRDYHKVLRKKLKLLAKLIEENIGKFGYRIFVDSAPVLEKAIAEKSGLGWIGKHTNLIDKKSGSWFFLGELYTDLPLPVDADEVSHCGSCNVCIDVCPTKAIVGPYSLDARRCISYLTIENKGSIPVEFRKDIGNRIYGCDDCQLFCPWNKFAKPTGEKDFAPRHNLDNAQLTELFYWNEETWLAKTEGSAIRRIGFERWLRNIAVALGNADTTTQILKALKYRKNDKSPLIAEHVEWALDQHGK

SEQ ID NO: 82111 - protein, 353 aa, unidentified
  source 1..353: note = Woeseiaceae bacterium
  REGION 1..353: note = tr|A0A2D5N317|A0A2D5N317_9GAMM Epoxyqueuosine reductase OS=Woeseiaceae bacterium OX=2026806 GN=queG PE=3; SV = 1
MNKINTINKPKLIRNINLWGAELGFQQIGFSDINLKNAEKKLKKWLDMKFHGEMHYMEKHGLKRSRPDLLLPNTLSVISARMNYLATDNESAKLLLDHKKKAYISRYTLGRDYHKVLRQRLKKLAHKIDIHVKEFGYRVFVDSAPVLEKPLASKAGLGWIGKHTNLINKDNGSWFFLGEIYTNIKLPNSNSSKDHCGTCFKCIDVCPTKAIIAPYILDARRCISYLTIELKGSIPIEYRRLIGNRIFGCDDCQIFCPWNKFASKTEIKDFDTRHALDTLDLIDAFLWTEEIWLKKTEGSAIRRIGFEQWIRNVAIAMGNAKTNKKIIEALNSRKNSESELIREHVNWALDQHS

SEQ ID NO: 82112 - protein, 363 aa, unidentified
  source 1..363: note = Woeseiaceae bacterium
  REGION 1..363: note = tr|A0A2E8TNH9|A0A2E8TNH9_9GAMM Epoxyqueuosine reductase OS=Woeseiaceae bacterium OX=2026806 GN=queG PE=3; SV = 1
  VARIANT 23: note = Xaa can be any naturally occurring amino acid
  VARIANT 27: note = Xaa can be any naturally occurring amino acid
  VARIANT 270: note = Xaa can be any naturally occurring amino acid
  VARIANT 277: note = Xaa can be any naturally occurring amino acid
  VARIANT 286: note = Xaa can be any naturally occurring amino acid
  VARIANT 288: note = Xaa can be any naturally occurring amino acid
  VARIANT 290: note = Xaa can be any naturally occurring amino acid
  VARIANT 323: note = Xaa can be any naturally occurring amino acid
MKTEYPDNKSELIKKIKLWSDDXGFDXIGFSNTNLSDAESNLQKWLELKFHGEMSFMEKHGLKRSRPGMLIPDTISIISVRMNYLSLRNNENRKLLDHPKKAYISRYALGRDYHKVLRKKLNLLGKKISNELSSFGYRAFVDSAPVLEKPIAEKAGLGWIGKNTNLINKNSGSYFFLGEIYTDLILPSDKATGNHCGSCSACIDVCPTNAIVAPYILDARKCISYLTIELKGPIPIEYREAIGNRIFGCDDCQIFCPWNKFAQKTSIEDXNPRSNLXSIDLVEVFXWXEXLWKIKTEGSAIRRIGYELWLRNIAVALGNAKTXEDVLSALKSRKNDKSELVKEHVIWAINQHKKKLSDKNIVD

SEQ ID NO: 82113 - protein, 356 aa, Wohlfahrtiimonas chitiniclastica
  REGION 1..356: note = tr|A0A256BUN0|A0A256BUN0_9GAMM Epoxyqueuosine reductase OS=Wohlfahrtiimonas chitiniclastica OX=400946; GN = queG PE=3 SV=1
MTCDDPAFIQALKEKAEALGFTHISSQTPKPLTEVKAYYEAWLAKGYHGGMDYLSKHGDLRFNPMALMEHTKSILTIRLPYYHNNDEAMATLKEDQRAYIARYALGRDYHNVIRKRLTQLGQWIAEQFPDETVTFRAFTDSAPILERELAERSGLGFSGKNTLIIDREKGSYFFLGELFISLPIVIPSTVVDKHCGRCTKCIQKCPTGAIVSPYEVDARRCISYLTIEHFGAIDEELRPMMGNRIFGCDDCQLFCPWNRFANHEIVDDFKPRHSLNDIALLDLLRWSETTFLKKTEGMPIRRIGHARFIRNITVALGNANYDPRIVAALEALESDEAFVREHIDWALKQQHNKKGL

SEQ ID NO: 82114 - protein, 356 aa, Wohlfahrtiimonas chitiniclastica
  REGION 1..356: note = tr|L8Y005|L8Y005_9GAMM Epoxyqueuosine reductase; OS = Wohlfahrtiimonas chitiniclastica SH04 OX=1261130; GN = queG PE=3 SV=1
MTCDDPAFIQALKEKAEALGFTHISSQTPKPLTEVKAYYEAWLAKGYHGGMDYLSKHGDLRFNPMALMEHTKSILTIRLPYYHNNDEAMATLKEDQRAYIARYALGRDYHNVIRKRLTQLGQWIAEQFPDEAVTFRAFTDSAPILERELAERSGLGFSGKNTLIIDREKGSYFFLGELFISLPIVIPSTVVDKHCGRCTKCIQKCPTGAIVSPYEVDARRCISYLTIEHFGAIDEELRPMMGNRIFGCDDCQLFCPWNRFANHEIVDDFKPRHSLNDIALLDLLRWSETTFLKKTEGMPIRRIGHARFIRNITVALGNANYDPRIVAALEALESDEAFVREHIDWALKQQHNKKGL

SEQ ID NO: 82115 - protein, 356 aa, Wohlfahrtiimonas sp.
  REGION 1..356: note = tr|A0A256C4P9|A0A256C4P9_9GAMM Epoxyqueuosine reductase OS=Wohlfahrtiimonas sp. G9077 OX=1980118 GN=queG; PE = 3 SV=1
MTCDDLAFIQALKEKAEALGFTHISSQTPKPLTEVKAYYEAWLAKGYHGGMDYLSKHGDLRFNPMALMEHTKSILTVRLPYYHNNDEAMATLKEDQRAYIARYALGRDYHNVIRKRLTQLGQWIAEQFPDETVTFRAFTDSAPILERELAERSGLGFSGKNTLIIDREKGSYFFLGELFISLPIVIPSTVVDKHCGRCTKCIQKCPTGAIVSPYEVDARRCISYLTIEHFGAIDEELRPMMGNRIFGCDDCQLFCPWNRFANHEIVDDFKPRHSLNDIALLDLLRWSENTFLKKTEGMPIRRIGHARFIRNITVALGNANYDPRIVAALEALESDEAFVREHIDWALKQQYNKKGH

SEQ ID NO: 82116 - protein, 385 aa, Xanthobacter autotrophicus
  REGION 1..385: note = tr|A7IGB1|A7IGB1_XANP2 Epoxyqueuosine reductase; OS = Xanthobacter autotrophicus (strain ATCC BAA-1158 / Py2); OX = 78245 GN=queG PE=3 SV=1
MTETAGTPLEEIIAGLARTEGFDTVGITRADAIPQAGARLKDWVAGGAHGDMGWMAETLERRADPAVLWPAIRSVIMLGLNYGPADDPRAVLAQRSAGAISVYARAEDYHDIIKPKLKRVARALLAEAQRRGLDGDVKVFVDTAPLMEKPLAAAAGLGWQGRHTNLVSRDFGSWLFLGAIATTVELKPSAPEQDHCGSCRACLDACPTAAFPAPYVIDARRCVSYLTIEHKGPIPRELRPLMGNRIYGCDDCLAACPWNKFAELGREVKLAARAENDAPPLAELVALDDAAFRARFPKSPIKRVGRDRFVRNVLVAMGNSGDAALLPQVEARLGDASALVRGAAVWALGQLADPDTVFRRAREALPQEDDAVVRAEWAAASVEQP

SEQ ID NO: 82117 - protein, 470 aa, Xanthobacter tagetidis
  REGION 1..470: note = tr|A0A3L7A3B3|A0A3L7A3B3_9RHIZ Epoxyqueuosine reductase OS=Xanthobacter tagetidis OX=60216 GN=queG PE=3; SV = 1
MHRAPGARAHLQALHEPRAGRRAAGRHRLAHGARQSALSSEIYRLAFQGAQLARRGALQPGRPCRRRASLGGRLSGRRAVGRGRERTGLVCAGEVPPHLPPAPGGEHPRHAALQDLRGPGLLNPAPLEEIARRLSAEEGFDAFGIAAPDALGEASAHLKAWVAEGAHGDMGWMADTLERRADPRTLWPQVRALIMLGLNYGPAEDPRAVLAQRTKGAISVYARAEDYHEVIKPRLKRIARALLAEASARGVSADVKVFVDTAPLMEKPLAAAAGLGWQGKHTNLVSRDLGSWLFLGAIATTLELAPTGVERDHCGSCRACVEACPTAAFPAPYVIDARRCISYLTIEHKGPIPLELRPLMGNRIYGCDDCLAACPWNKFAVAGREAKLAARAENDAPDLAALVTLDDAAFRARFPKSAIKRVGRDRFVRNVLIAIGNSGDGSLRGVVEARLEDEAEVVRDAAGWALGRLG

SEQ ID NO: 82118 - protein, 373 aa, unidentified
  source 1..373: note = Xanthobacteraceae bacterium
  REGION 1..373: note = tr|A0A521VRG3|A0A521VRG3_9RHIZ Epoxyqueuosine reductase OS=Xanthobacteraceae bacterium OX=2021379; GN = queG PE=3 SV=1
MSATDLRGDLEREARRLGFDAIGITGADSIPRAAERLAAFLADDGHGDMGWLASDPARRGNPRVLWPEARSVIMLGVNYGPDEDPLAALGRKSSGAISVYARGDDYHDLIKSRLKQLARWLLARGGGDVKVFVDTAAVMEKPLAQAAGLGWQGKHTNLVSRGFGSWLFLGAIYTTLELPHEAPERDHCGACRACLDRCPTQAFPAPYRLDARRCISYLTIEHKGPIPREFRKAIGNRIYGCDDCLAVCPWNKFAQQGREVKLAARGALVAPALADLAALDDAAFRALFSKSPVKRIGRDRFIRNVLIAIGNSGDARLSAPARARLDDESALVRAMAVWALAQLMDEAEFAVLRAHRLPAETDAGVRAEWRRES

SEQ ID NO: 82119 - protein, 307 aa, unidentified
  source 1..307: note = Xanthomarina gelatinilytica
  REGION 1..307: note = tr|M7MMK8|M7MMK8_9FLAO Epoxyqueuosine reductase; OS = Xanthomarina gelatinilytica OX=1137281 GN=queG PE=3 SV=1
MNLKQQHTDFIKTEAKRLGFLSCGVSKAQFLEEEAPRLENWLNKQMHGQMHYMENHFDKRLDPTKLVEGSKSVISLLLNYFPEKTQDHETYKLSKYAYGTDYHFVIKDKLKSLLHAIQGEIGEVEGRAFVDSAPVLDKAWAAKSGLGWIGKHSNLLTQQVGSFYFIAELIIDLELEYDGITTDHCGTCTKCIDACPTKAIAEPYVVDGSKCISYFTIELKENIPTEFKGQFEDWMFGCDICQDVCPWNRFSKSHNEPLFNPHPDLLDMTKKDWEEITEETFKKVFKKSAVKRTKFSGLKRNINFLKD

SEQ ID NO: 82120 - protein, 307 aa, unidentified
  source 1..307: note = Xanthomarina gelatinilytica
  REGION 1..307: note = tr|A0A3C0F5D9|A0A3C0F5D9_9FLAO Epoxyqueuosine reductase OS=Xanthomarina gelatinilytica OX=1137281; GN = queG PE=3 SV=1
MNLKQQHTDFIKTEAKRLGFLSCGVSKAQFLEEEAPRLENWLNKQMHGQMHYMENHFDKRLDPNKLVEGSKSVISLLLNYFPEKTQDHETYKLSKYAYGTDYHFVIKDKLKSLLHAIQVEIGEVEGRAFVDSAPVLDKAWAAKSGLGWIGKHSNLLTQQVGSFYFIAELIIDLELEYDGITTDHCGTCTKCIDACPTKAITEPYVVDGSKCISYFTIELKENIPTQFKGQFEDWMFGCDICQDVCPWNRFSKSHNEPLFNPHPDLLDMTKKDWEEITEETFKKVFKKSAVKRTKFSGLKRNINFLKD

SEQ ID NO: 82121 - protein, 307 aa, unidentified; identical to SEQ ID NO: 82120
  source 1..307: note = Xanthomarina sp.
  REGION 1..307: note = tr|A0A2D8CZS0|A0A2D8CZS0_9FLAO Epoxyqueuosine reductase OS=Xanthomarina sp. OX=1931211 GN=queG PE=3 SV=1

SEQ ID NO: 82122 - protein, 357 aa, unidentified
  source 1..357: note = Xanthomonadaceae bacterium
  REGION 1..357: note = tr|A0A4Q6GMI8|A0A4Q6GMI8_9GAMM Epoxyqueuosine reductase OS=Xanthomonadaceae bacterium OX=1926873 GN=queG; PE = 3 SV=1
MSSLPQDALDPARIAQRIRALAHGLGFQRCGIAGIELGQDEAHLRDWLANGLYGSMDWMARHGDKRSRPDELIPGTLRVISVGLDYGRNDGDEAWDTLHDGERAYVARYALGRDYHKLMRTRLQKLADRIQQEVGPIGHRVFVDSAPVLERALARNAGLGWIGKHTCLIDKDGGSWFFLGEIYVDLPLPVDLPASALCGTCTRCIDVCPTQAIVAPYRLDARRCIAYLTIEHEGSIPEALRPAIGNRIFGCDDCQLVCPWNKFAKRTDEPDFRARNDLDIATLPQLFAWSEADFLSRTEGSAIRRSGYERWLRNIAVGLGNAPTTPAVLESLASRRDDASEVVREHVGWAMNQHAQD

SEQ ID NO: 82123 - protein, 354 aa, unidentified
  source 1..354: note = Xanthomonadaceae bacterium
  REGION 1..354: note = tr|A0A1E4JY75|A0A1E4JY75_9GAMM Epoxyqueuosine reductase OS=Xanthomonadaceae bacterium SCN 69-320; OX = 1660169 GN=queG PE=3 SV=1
MDYAELANAIRRWGAELGFQQIGIAGVELGADETHLLNWLAAGRHGEMDYMQRHGTRRSRPQELQPGTVRVVSARMDYAPPGISRGWDVLADASLGYVSRYALGRDYHKLMRQRLQQLADRIAAQTGPFGYRAFVDSAPVLERALAREAGLGWIGKHTCLINRHAGSWFFLGELYTDLPLPPDEAASAHCGSCTRCIDICPTQAIVAPYQVDARRCISYLTIELHGAIPLEFRAAMGNRIYGCDDCQLICPWNKFSQPSAEADFLPRHRLDGTALIELFGWSEEEFLRRTEGSAIRRIGHERWLRNIAVALGNARGVDGVVDALNARATHPSALVREHVCWALEQQTRHATAAG

SEQ ID NO: 82124 - protein, 364 aa, unidentified
  source 1..364: note = Xanthomonadales bacterium
  REGION 1..364: note = tr|A0A3N5JAW7|A0A3N5JAW7_9GAMM Epoxyqueuosine reductase OS=Xanthomonadales bacterium OX=2006849 GN=queG; PE = 3 SV=1
MSPQQLRELATQIKGWGRELGFQKLGICDLQLEEHERRLEQWLAQGFHGSMDYMERHGRRRSRPAELVPGTLRVISARMDYLPARARPAAALLREPGTGLVSRYALGRDYHKVLRKRLQRLAARIERQIGPFGYRVFVDSAPVLEKALAEKAGLGWIGKHSNLLDRQAGSWFFLGEIYTDLPLPVDPPAQNHCGDCVRCIEACPTGAIVGPYQVDARRCISYLTIELKGPIPVELRPLLGNRIYGCDDCQLVCPWNRFARPSGEEDFSPRHGLDSAELLQLFAWDENEFLRRTEGSAIRRTGYPGWLRNIAVALGNLPPATEAEWKAVIAALDARREHPSPLVREHVVWALESQLQKGSGFRDQ

SEQ ID NO: 82125 - protein, 338 aa, unidentified
  source 1..338: note = Xanthomonadales bacterium
  REGION 1..338: note = tr|A0A1G4A2D6|A0A1G4A2D6_9GAMM Epoxyqueuosine reductase OS=Xanthomonadales bacterium RIFOXYA1_FULL_69_10; OX = 1802656 GN=queG PE=3 SV=1
MAADMGFQRCGISDIALDEDAGHLRDWLARGLYGTMDWMARHGDLRARPEELTPGTVRVISVGLDYGQDDDAAWATLADGTRAYVARYALGRDYHKLMRRRLQQLADRIAEETGPFGYRVFVDSAPVLERALARNAGLGWIGKHTCLIDKDGGSWFFLGEIYVDIPLPADAPATAHCGTCTRCIDICPTRAITAPQRLDARRCISYLTIEHEGAIPIELREPIGNRIFGCDDCQLVCPWNKFARRTDEPDFRARNNLDRASLAELFAWSEDEFLQRTEGSAIRRSGHARWLRNIAVALGNAPTSPEVIGALQSRRGIADAVVREHVEWALARHGVAPL

SEQ ID NO: 82126 - protein, 355 aa, Xanthomonas alfalfae
  REGION 1..355: note = tr|A0A1S1XP13|A0A1S1XP13_9XANT Epoxyqueuosine reductase OS=Xanthomonas alfalfae OX=366650 GN=queG PE=3; SV = 1
MSAALAHPDPADAAARIRVLAREAGFQRCGITGIELGEDEVHLRSWLEEGLYGTMHWMTQHGDKRSRPQELVPGTLRVLSVGMDYGRKDDTEAWNTLHDGNRAYVARYALGRDYHKLMRNRLQKLAERIQGEIGAFGYRVFVDSAPVLERALARNAGLGWIGKHTCLIDRNGGSWFFLGEIYLDLPLPIDTPATAHCGTCTRCIDICPTQAIIAPYRLDARRCIAYLTIEHDGPIPEQMRKPIGNRIFGCDDCQLICPWNKFAKRTDEADFRARNDLDVATLPQLFAWNEDEFLRRTEGSPIRRSGHERWLRNIAVGLGNAPGTPEVLAALQARRHDDSALVREHVGWALAQHDL

SEQ ID NO: 82127 - protein, 355 aa, Xanthomonas arboricola
  REGION 1..355: note = tr|A0A0E3YLY2|A0A0E3YLY2_9XANT Epoxyqueuosine reductase OS=Xanthomonas arboricola OX=56448 GN=queG PE=3; SV = 1
MSAVLARPDPTDAAARIRALAREAGFQRCGITGIELGEDEAHLRSWLEEGLYGTMHWMAQHGDKRSRPQELVPGTLRVLSVGMDYGRKDDTEAWNTLHDGRRAYVARYALGRDYHKLMRNRLQKLAERIQGEVGAFGYRVFVDSAPVLERALARNAGLGWIGKHTCLIDRNGGSWFFLGEIYLDLPLPIDTPATAHCGTCTRCIDVCPTQAIIAPYRLDARRCIAYLTIEHDGAIPEQMRKPIGNRIFGCDDCQLVCPWNKFAQRTDEADFRARNELDVATLPQLFAWDEDEFLRRTEGSPIRRSGHQRWLRNIAVGLGNAPGTPEVLAALQARRHDASELVREHVGWALAQHGL

SEQ ID NO: 82128 - protein, 355 aa, Xanthomonas arboricola
  REGION 1..355: note = tr|W4SA94|W4SA94_9XANT Epoxyqueuosine reductase; OS = Xanthomonas arboricola pv. pruni str. MAFF 311562; OX = 1414836 GN=queG PE=3 SV=1
MSAVLARPDPTDAAARIRALAREAGFQRCGITGIELGEDEAHLRSWLEEGLYGTMHWMAQHGDKRSRPQELVPGTLRVLSVGMDYGRKDDTEAWNTLHDGRRAYVARYALGRDYHKLMRNRLQKLAERIQGEVGAFGYRVFVDSAPVLERALARNAGLGWIGKHTCLIDRNGGSWFFLGEIYLDLPLPIDTPATAHCGTCTRCIDVCPTQAIIAPYRLDARRCIAYLTIEHEGAIPEQMRKPIGNRIFGCDDCQLVCPWNKFAQRTDEADFRARNELDVATLPQLFAWDEDEFLRRTEGSPIRRSGHQRWLRNIAVGLGNAPGTPEVLAALEARRHDASELIREHVGWALAQHGL

SEQ ID NO: 82129 - protein, 355 aa, Xanthomonas axonopodis
  REGION 1..355: note = tr|A0A2S6Y124|A0A2S6Y124_9XANT Epoxyqueuosine reductase OS=Xanthomonas axonopodis pv. begoniae OX=473403; GN = queG PE=3 SV=1
MSAALARPDPADAAARIRVLAREAGFQRCGITGIELGEDEVHLRSWLAEGLYGTMHWMAQHGDKRSRPQELVPGTLRVLSVGMDYGRKDDTEAWNTLRDGNRAYVARYALGRDYHKLMRNRLQKLAERIQGEIGQFGFRVFVDSAPVLERALARNAGLGWIGKHTCLIDRNGGSWFFLGEIYLDLPLPIDTPATAHCGTCTRCIDICPTQAIIAPYRLDARRCIAYLTIEHDGAIPEDMRKPIGNRIFGCDDCQLICPWNKFAKRTDEADFRARNELDVATLPQLFAWNEGEFLRRTEGSPIRRSGHERWLRNLAVGLGNAPGTPEVLAALEARRHDDSALVREHVGWALAQHGL

SEQ ID NO: 82130 - protein, 355 aa, Xanthomonas axonopodis
  REGION 1..355: note = tr|M4TX30|M4TX30_9XANT Epoxyqueuosine reductase; OS = Xanthomonas axonopodis Xac29-1 OX=1304892 GN=queG PE=3; SV = 1
MSAVLARPDPADAAARIRVLAREAGFQRCGITGIELGEDEVHLRSWLEEGLYGTMHWMAQHGDKRSRPQELVPGTLRVLSVGMDYGRKDDTEAWNTLHDGSRAYVARYALGRDYHKLMRNRLQKLAERIQGEIGAFGFRVFVDSAPVLERALARNAGLGWIGKHTCLIDRNGGSWFFLGEIYLDLPLPIDTPATAHCGTCTRCIDICPTQAIIAPYRLDARRCIAYLTIEHDGAIPEDMRKPIGNRIFGCDDCQLICPWNKFAKRTDEADFRARNDLDVATLPQLFAWNEDEFLGRTEGSPIRRSGYERWLRNIAVGLGNAPGTPEVLAALEARRYDDSALVREHVGWALAQHGL

SEQ ID NO: 82131 - protein, 355 aa, Xanthomonas bromi
  REGION 1..355: note = tr|A0A1C3NMJ3|A0A1C3NMJ3_9XANT Epoxyqueuosine reductase OS=Xanthomonas bromi OX=56449 GN=queG PE=3 SV=1
MSAALARPDPHDAAARIRVLAREAGFQRCGITGIELGEDEAHLRSWLEEGLYGTMHWMAQHGDKRSRPQELVPGTLRVLSVGMDYGRKDDTEAWNTLHDGNRAYVARYALGRDYHKLMRNRLQKLAERIQGEIGAFGFRVFVDSAPVLERALARNAGLGWIGKHTCLIDRNGGSWFFLGEIYVDLPLPIDTPAIAHCGTCTRCIDICPTQAIIAPYRLDARRCIAYLTIEHDGAIPEDMRKPIGNRIFGCDDCQLICPWNKFAKRTDEADFRARNDLDVATLPQLFAWDQDEFLHRTEGSPIRRSGHERWLRNIAIGLGNAPGTPQVLAALEARRHDDSELVREHVGWALAQHGL

SEQ ID NO: 82132 - protein, 355 aa, Xanthomonas campestris
  REGION 1..355: note = tr|A0A2S4JLY3|A0A2S4JLY3_XANCA Epoxyqueuosine reductase OS=Xanthomonas campestris OX=339 GN=queG PE=3; SV = 1
MSAVLARPDPTDAAARIRTLAREAGFQRCGITGIELGEDEAHLRSWLAEGLYGTMHWMAQHGDKRSRPQELVPGTLRVLSVGMDYGRKDDTEAWDTLHDGRRAYVARYALGRDYHKLMRNRLQKLAERIQAEVGPFGYRVFVDSAPVLERALARNAGLGWIGKHTCLIDRRGGSWFFLGEIYLDLPLPIDTPATAHCGTCTRCIDICPTQAIIAPHRLDARRCIAYLTIEHDGAIPEDMRKPIGNRIFGCDDCQLICPWNKFAQRTDEPDFRARNDLDVATLPQLFAWDEAEFLRRTEGSPIRRSGHERWLRNIAVGLGNAPGSEDVLAALESRRHDDSALVREHVGWALAQHGL

SEQ ID NO: 82133 - protein, 355 aa, Xanthomonas campestris
  REGION 1..355: note = tr|A0A1T1QWU4|A0A1T1QWU4_XANCA Epoxyqueuosine reductase OS=Xanthomonas campestris pv. vitiscarnosae; OX = 487900 GN=queG PE=3 SV=1
MSAVLARPDPADAAARIRVLAREAGFQRCGITGIELGEDEVHLRSWLEEGLYGTMHWMAQHGDKRSRPQELVPGTLRVLSVGMDYGRKDDTEAWSTLRDGSRAYVARYALGRDYHKLMRNRLQKLAERIQGEIGAFGFRVFVDSAPVLERALARNAGLGWIGKHTCLIDRNGGSWFFLGEIYLDLPLPIDTPATAHCGTCTRCIDICPTQAIIAPYRLDARRCIAYLTIEHDGAIPEDMRKPIGNRIFGCDDCQLICPWNKFAKRTDEADFRARNDLDVATLPQLFAWNEDEFLGRTEGSPIRRSGYERWLRNIAVGLGNAPGTPEVLAALEARRYDDSALVREHVGWALAQHGL

SEQ ID NO: 82134 - protein, 355 aa, unidentified
  source 1..355: note = Xanthomonas cannabis
  REGION 1..355: note = tr|A0A0B2CR60|A0A0B2CR60_9XANT Epoxyqueuosine reductase OS=Xanthomonas cannabis pv. cannabis OX=1885894; GN = queG PE=3 SV=1
MSAVLARPDPTDAAARIRALARESGFQRCGIAGIELGEDEVHLRSWLEEGLYGTMHWMAQHGDKRSRPQELVPGTLRVLSVGMDYGRKDDTEAWNTLHDGNRAYVARYALGRDYHKLMRNRLQKLAERIQGEIGAFGYRVFVDSAPVLERALARNAGLGWIGKHTCLIDRNGGSWFFLGEIYLDLPLPIDTPATAHCGTCTRCIDICPTQAIIAPYRLDARRCIAYLTIEHDGPIPEQMRKPIGNRIFGCDDCQLICPWNKFAKRTDEPDFRARNALDVATLPQLFAWDEDEFLRRTEGSPIRRSGHERWLRNIAVGLGNAPGTPEVLAALETRRHHDSELVREHAGWALAQHGI

SEQ ID NO: 82135 - protein, 355 aa, Xanthomonas citri; identical to SEQ ID NO: 82133
  REGION 1..355: note = tr|A0A2K2RB10|A0A2K2RB10_XANCI Epoxyqueuosine reductase OS=Xanthomonas citri OX=346 GN=queG PE=3 SV=1

SEQ ID NO: 82136 - protein, 355 aa, Xanthomonas citri
  REGION 1..355: note = tr|A0A220WGS7|A0A220WGS7_XANCI Epoxyqueuosine reductase OS=Xanthomonas citri pv. vignicola OX=473426; GN = queG PE=3 SV=1
MSAVLARPDPADAAARIRVLAREAGFQRCGITGIELGEDEVHLRSWLEEGLYGTMHWMAQHGDKRSRPQELVPGTLRVLSVGMDYGRKDDAEAWNTLHDGNRAYVARYALGRDYHKLMRNRLQKLAERIQGEIGAFGFRVFVDSAPVLERALARNAGLGWIGKHTCLIDRNGGSWFFLGEIYLDLPLPIDTPATAHCGTCTRCIDICPTQAIIAPYRLDARRCIAYLTIENDGAIPEDMRKPIGNRIFGCDDCQLICPWNKFARRTDEADFRARNDLDVATLPQLFAWNEDEFLGRTEGSPIRRSGHERWLRNIAVGLGNASGTPEVLAALEARRDDDSALVREHVGWALAQHGL

SEQ ID NO: 82137 - protein, 355 aa, Xanthomonas codiaei
  REGION 1..355: note = tr|A0A2S7CTN4|A0A2S7CTN4_9XANT Epoxyqueuosine reductase OS=Xanthomonas codiaei OX=56463 GN=queG PE=3 SV=1
MSAVLARPDPTDAAARIRVLAREAGFQRCGIAGIELGEDEAHLRSWLAEGLYGTMHWMAQHGDKRSRPQELVPGTLRVLSVGMDYGRKDDTDAWNTLHDGTRAYVARYALGRDYHKLMRNRLQKLAERIQGEIGTFGYRVFVDSAPVLERALARNAGLGWIGKHTCLIDRNGGSWFFLGEIYLDLPLPIDTPATAHCGTCTRCIDICPTQAIIAPYRLDARRCIAYLTIEHDGAIPEDMRKPIGNRIFGCDDCQLICPWNKFAKRTDEADFRARNELDVATLPQLFAWDEAEFLQRTEGSPIRRSGHERWLRNIAVGLGNAPGTPEVLASLQARRHDESALVREHVGWALAQHGL

SEQ ID NO: 82138 - protein, 355 aa, Xanthomonas cucurbitae
  REGION 1..355: note = tr|A0A2S7DSB8|A0A2S7DSB8_9XANT Epoxyqueuosine reductase OS=Xanthomonas cucurbitae OX=56453 GN=queG PE=3; SV = 1
MSAVLARPDPTDAAARIRVLAREAGFQRCGITGIELGEDEAHLRSWLAEGLYGTMHWMAQHGDKRSRPQELVPGTLRVLSVGMDYGRKDDTEAWNTLHDGTRAYVARYALGRDYHKLMRNRLQKLAERIQGEIGTFGYRVFVDSAPVLERALARNAGLGWIGKHTCLIDRNGGSWFFLGEIYLDLPLPIDTPATAHCGTCTRCIDICPTQAIIAPYRLDARRCIAYLTIEHDGAIPEDMRKPIGNRIFGCDDCQLICPWNKFAKRTDEADFRARNDLDVATLPQLFAWDQDEFLQRTEGSPIRRSGHERWLRNIAVGLGNAPGTLEVLAALEARRHDESELVREHVGWALAQHGL

SEQ ID NO: 82139 - protein, 355 aa, Xanthomonas cynarae
  REGION 1..355: note = tr|A0A2S7BUP7|A0A2S7BUP7_9XANT Epoxyqueuosine reductase OS=Xanthomonas cynarae OX=109214 GN=queG PE=3; SV = 1
MSAVLARPDPTDAAARIRALAREAGFQRCGITGIELGEDEVHLRSWLEEGLYGTMHWMAQHGDKRSRPQELVPGTLRVLSVGMDYGRKDDTEAWNTLHDGRRAYVARYALGRDYHKLMRNRLQKLAERIQGEVGAFGYRVFVDSAPVLERALARNAGLGWIGKHTCLIDRNGGSWFFLGEIYLDLPLPIDTPATAHCGTCTRCIDICPTQAIIAPHRLDARRCIAYLTIEHDGAIPEEMRKPIGNRIFGCDDCQLICPWNKFAQRTDEADFRARNDLDVATLPQLFAWDTDEFLRRTEGSPIRRSGHERWLRNIAVGLGNAPGTPEVLAALEARRNDDSELVREHVGWALAQHGL

SEQ ID NO: 82140 - protein, 355 aa, Xanthomonas dyei
  REGION 1..355: note = tr|A0A2S7C8P8|A0A2S7C8P8_9XANT Epoxyqueuosine reductase OS=Xanthomonas dyei OX=743699 GN=queG PE=3 SV=1
MSAALAHPDPNHAAARIRALAREAGFQRCGITGIELGEDEAHLRSWLGEGLYGTMHWMAQHGDKRSRPQELVPGTLRVLSVGMDYGRKDDTEAWTTLHDGSRAYVARYALGRDYHKLMRNRLQKLAERIQGEIGAFGYRVFVDSAPVLERALARNAGLGWIGKHTCLIDRNGGSWFFLGEIYLDLPLPVDTPATAHCGSCTRCIDICPTQAIIAPYRLDARRCIAYLTIEHDGAIPEEMRKPIGNRIFGCDDCQLVCPWNKFAQRTDEADFRARNALDVATLPQLFAWDEGEFLQRTEGSPIRRSGHQRWLRNIAVGLGNAPGTPEVLAALEARRHDASELVREHVGWALAQHGI

SEQ ID NO: 82141 - protein, 355 aa, Xanthomonas euvesicatoria
  REGION 1..355: note = tr|A0A2S7EBS6|A0A2S7EBS6_XANEU Epoxyqueuosine reductase OS=Xanthomonas euvesicatoria pv. citrumelonis; OX = 189396 GN=queG PE=3 SV=1
MSAALAHPDPADAAARIRVLAREAGFQRCGITGIELGEDEVHLRSWLEEGLYGTMHWMAQHGDKRSRPQELVPGTLRVLSVGMDYGRKDDTEAWNTLHDGNRAYVARYALGRDYHKLMRNRLQKLAERIQGEIGPFGFRVFVDSAPVLERALARNAGLGWIGKHTCLIDRHGGSWFFLGEIYLDLPLPIDTPATAHCGTCTRCIDICPTQAIIAPYRLDARRCIAYLTIEHDGAIPEDMRKPIGNRIFGCDDCQLICPWNKFAKRTDEADFRARNDLDVATLPQLFAWNEDEFLRRAEGSPIRRSGHERWLRNIAVGLGNAPGTPEVLAALQARRHDDSALVREHVGWALAQHDL

SEQ ID NO: 82142 - protein, 355 aa, Xanthomonas euvesicatoria
  REGION 1..355: note = tr|A0A4U0TFC0|A0A4U0TFC0_XANEU Epoxyqueuosine reductase OS=Xanthomonas euvesicatoria pv. citrumelonis; OX = 189396 GN=queG PE=3 SV=1
MSAALAHPDPADAAARIRVLAREAGFQRCGITGIELGEDEVHLRSWLEEGLYGTMHWMAQHGDKRSRPQELVPGTLRVLSVGMDYGRKDDTEAWNTLHDGNRAYVARYALGRDYHKLMRNRLQKLAGRIQGEIGPFGFRVFVDSAPVLERALARNAGLGWIGKHTCLIDRHGGSWFFLGEIYLDLPLPIDTPATAHCGTCTRCIDICPTQAIIAPYRLDARRCIAYLTIEHDGAIPEDMRKPIGNRIFGCDDCQLICPWNKFAKRTDEADFRARNDLDVATLPQLFAWNEDEFLRRTEGSPIRRSGHERWLRNIAVGLGNAPGTPEVLAALQARRHDDSALVREHVGWALAQHDL

SEQ ID NO: 82143 - protein, 355 aa, unidentified
  source 1..355: note = Xanthomonas floridensis
  REGION 1..355: note = tr|A0A1A9M6L5|A0A1A9M6L5_9XANT Epoxyqueuosine reductase OS=Xanthomonas floridensis OX=1843580 GN=queG; PE = 3 SV=1
MSAVLARPDPTDAAARIRVLAREAGFQRCGITGIELGEDEAHLRSWLAEGLYGTMHWMAQHGDKRSRPQELVPGTLRVLSVGMDYGRKDDTEAWNTLHDGTRAYVARYALGRDYHKLMRNRLQKLAERIQGEIGTFGYRVFVDSAPVLERALARNAGLGWIGKHTCLIDRNGGSWFFLGEIYLDLPLPIDTPATAHCGTCTRCIDICPTQAIIAPYRLDARRCIAYLTIEHDGAIPEDMRKPIGNRIFGCDDCQLICPWNKFAKRTDEADFRARNDLDVATLPQLFAWNEAEFLQRTEGSPLRRSGHERWLRNIAVGLGNAPGTPEVLASLEARRHDASELVREHVGWALAQHGL

SEQ ID NO: 82144 - protein, 355 aa, Xanthomonas fragariae
  REGION 1..355: note = tr|A0A1Y6HJW4|A0A1Y6HJW4_9XANT Epoxyqueuosine reductase OS=Xanthomonas fragariae OX=48664 GN=queG PE=3; SV = 1
MCAVLARPNPDDAAARIRALAREAGFQRCGITGIELGEDEAHLRSWLEEGLYGTMHWMAQHGDKRSRPQELVPGTLRVLSVGMDYGRKDDTEAWNTLYDGCRAYVARYALGRDYHKLMRNRLQKLAERIQGEIGAFGYRVFVDSAPVLERALARNAGLGWIGKHTCLIDRNGGSWFFLGEIYLDLPLPIDTPATAHCGTCTRCIDICPTQAIIAPYRLDARRCIAYLTIEHDGAIPEDMRKQIGNRIFGCDDCQLICPWNKFAQRTDEADFRARNELDVATLPQLFAWDQDEFLRRTEGSPIRRSGHQRWLRNIAVGLGNAPRTSAVLTALEARRSDDSALVREHVGWALAQHGL

SEQ ID NO: 82145 - protein, 355 aa, Xanthomonas gardneri
  REGION 1..355: note = tr|A0A1L5Y240|A0A1L5Y240_9XANT Epoxyqueuosine reductase OS=Xanthomonas gardneri OX=90270 GN=queG PE=3; SV = 1
MSAVLARPDPTDAAARIRALAREAGFQRCGITGIELGEDEVHLRSWLEEGLYGTMHWMAQHGDKRSRPQELVPGTLRVLSVGMDYGRKDDTEAWNTLHDGRRAYVARYALGRDYHKLMRNRLQKLAERIQGEVGAFCYRVFVDSAPVLERALARNAGLGWIGKHTCLIDRNGGSWFFLGEIYLDLPLPIDTPATAHCGTCTRCIDICPTQAIIAPHRLDARRCIAYLTIEHDGAIPEEMRKPIGNRIFGCDDCQLICPWNKFAQRTDEADFRARNDLDVATLPQLFAWDTDEFLRRTEGSPIRRSGHERWLRNIAVGLGNAPGTPEVLAALEARRNDDSELVREHVGWALAQHGL

SEQ ID NO: 82146 - protein, 355 aa, Xanthomonas gardneri; identical to SEQ ID NO: 82139
  REGION 1..355: note = tr|F0CAC6|F0CAC6_9XANT Epoxyqueuosine reductase; OS = Xanthomonas gardneri ATCC 19865 OX=925777 GN=queG PE=3; SV = 1

SEQ ID NO: 82147 - protein, 355 aa, Xanthomonas hortorum; identical to SEQ ID NO: 82145
  REGION 1..355: note = tr|A0A248Y7W4|A0A248Y7W4_9XANT Epoxyqueuosine reductase OS=Xanthomonas hortorum OX=56454 GN=queG PE=3; SV = 1

SEQ ID NO: 82148 - protein, 355 aa, Xanthomonas hortorum
  REGION 1..355: note = tr|A0A2S7E4I7|A0A2S7E4I7_9XANT Epoxyqueuosine reductase OS=Xanthomonas hortorum pv. hederae OX=453603; GN = queG PE=3 SV=1
MSAVLARPDPTDAAARIRALAREAGFQRCGITGIELGEDEAHLRSWLEEGLYGTMHWMAQHGDKRSRPQELVPGTLRVLSVGMDYGRKDDTEAWNTLHDGRRAYVARYALGRDYHKLMRNRLQKLAERIQGEVGAFGYRVFVDSAPVLERALARNAGLGWIGKHTCLIDRNGGSWFFLGEIYLDLPLPIDTPATAHCGTCTRCIDICPTQAIIAPYRLDARRCIAYLTIEHDGAIPEEMRKPIGNRIFGCDDCQLICPWNKFAQRTDESDFRARNDLDVATLPQLFAWGTDEFLRRTEGSPIRRSGHERWLRNIAVGLGNAPGTPEVLAALEARRNDDSELVREHVGWALAQHGL

SEQ ID NO: 82149 - protein, 375 aa, unidentified
  source 1..375: note = Xanthomonas hyacinthi
  REGION 1..375: note = tr|A0A2S7F163|A0A2S7F163_9XANT Epoxyqueuosine reductase OS=Xanthomonas hyacinthi OX=56455 GN=queG PE=3; SV = 1
MSSSAAPIDPHAAAARIRALAREFGFQRCGIAGIELQQDEAHLRDWLAQGLYGTMQWMAQHGDKRARPAELIPGTLRVISVGLDYGRNDDDSAWDTLRDGECAYVARYALGRDYHKLMRNRLQKLAERIQGEIGRFGHRVFVDSAPVLERALARDAGLGWIGKHTCLIDRNGGSWFFLGEIYVDLPLPIDPPASAHCGTCTRCIDVCPTQAIIAPYRLDARRCIAYLTIEHDGAIPEELRPAIGNRIFGCDDCQLVCPWNKFAKRSDEPDFRARNDLDRATLAQLFAWDEDEFLRRTEGSAIRRSGHERWLRNLAVALGNAPSTPQVLAALGTRAQHASPLVREHVQWALARHAQQARVGDVAAPQPSAHNDVRG

SEQ ID NO: 82150 - protein, 355 aa, unidentified
  source 1..355: note = Xanthomonas manihotis
  REGION 1..355: note = tr|A0A0W7XEW4|A0A0W7XEW4_XANMN Epoxyqueuosine reductase OS=Xanthomonas manihotis OX=43353 GN=queG PE=3; SV = 1
MSAALARPDPADAAARIRMLAREAGFQRCGITGIELGEDEVHLRSWLAEGLYGTMHWMAQHGDKRSRPQELVPGTLRVLSIGMDYGRKDDTEAWNTLHDGNRAYVARYALGRDYHKLMRNRLQKLAERIQGEIGQFGFRVFVDSAPVLERALARNAGLGWIGKHTCLIDRNGGSWFFLGEIYLDLPLPIDTPATAHCGTCTRCIDICPTQAIIAPYRLDARRCIAYLTIEHDGAIPEDMRKPIGNRIFGCDDCQLICPWNKFAKRTDEADFRARNELNVATLPQLFAWNEDDFLRRTEGSPIRRSGHERWLRNIAVGLGNAPGTPEVLAALEARRHDDSALVREHVGWALAQHGL

SEQ ID NO: 82151 - protein, 355 aa, Xanthomonas melonis
  REGION 1..355: note = tr|A0A2S7DGD4|A0A2S7DGD4_9XANT Epoxyqueuosine reductase OS=Xanthomonas melonis OX=56456 GN=queG PE=3 SV=1
MSAVLARPDPADAAARIRVLAREAGFQRCGIAGIELGEDEAHLRSWLAEGLYGTMHWMAQHGDKRARPQELVPGTLRVLSVGMDYGRKDDTEAWNTLHDGKRAYVARYALGRDYHKLMRNRLQKLAERIQGEIGAFGYRVFVDSAPVLERALARNAGLGWIGKHTCLIDRNGGSWFFLGEIYLDLPLPIDTPATAHCGSCTRCIDICPTQAIIAPYRLDARRCIAYLTIEHEGAIPEQMRKPIGNRIFGCDDCQLVCPWNKFAKRSDEADFRARNDLDVATLPQLFAWDQAEFLQRTEGSPIRRSGHERWLRNIAVSLGNAPGTPEVVSALEARRHHDSALVREHVGWALAQHGL

SEQ ID NO: 82152 - protein, 355 aa, unidentified
  source 1..355: note = Xanthomonas nasturtii
  REGION 1..355: note = tr|A0A3E1KRT7|A0A3E1KRT7_9XANT Epoxyqueuosine reductase OS=Xanthomonas nasturtii OX=1843581 GN=queG PE=3; SV = 1
MSAVLARPDPTDAAARIRALAREAGFQRCGITGIELGEDEAHLRSWLAEGLYGTMHWMAQHGDKRSRPQELVPGTLRVLSVGMDYGRKDDTEAWNTLHDGNRAYVARYALGRDYHKLMRNRLQKLAERIQGEIGAFGFRVFVDSAPVLERALARNAGLGWIGKHTCLIDRNGGSWFFLGEIYLDLPLPIDTPATAHCGTCTRCIDICPTQAIIAPYRLDARRCIAYLTIEHDGAIPEQMRKPIGNRIFGCDDCQLICPWNKFAKRTDEADFRARNDLDVATLPQLFAWDEAEFLRRTEGSPIRRSGHERWLRNIAVGLGNAPGTPEVLAALQARRHDDSELVREHVGWALAQHGL

SEQ ID NO: 82153 - protein, 355 aa, Xanthomonas oryzae
  REGION 1..355: note = tr|A0A0M1K503|A0A0M1K503_9XANT Epoxyqueuosine reductase OS=Xanthomonas oryzae OX=347 GN=queG PE=3 SV=1
MSAVFARPDPADAAARIRVLAREAGFQRCGITGIELGEDEVHLRSWLEEGLYGTMHWMAQHGDKRSRPQELVPGTLRVLSVGMDYGRKDDTEAWNTLHDGTRAYVARYALGRDYHKLMRNRLQKLAERIQGEIGAFGFRVFVDSAPVLERALARNAGLGWIGKHTCLIDRNGGSWFFLGEIYIDVPLPIDTPATAHCGTCTRCIDICPTQAIIAPYRLDARRCIAYLTIEHDGAIPEDMRKPIGNRIFGCDDCQLICPWNKFAKRTDEADFRARNELDVATLPQLSAWDEDEFLRRTEGSPIRRSGHERWLRNIAVGLGNAPGTPEVLAALEARRHDDSALVREHVGWALSQHGL

SEQ ID NO: 82154 - protein, 355 aa, Xanthomonas oryzae
  REGION 1..355: note = tr|G7TCQ9|G7TCQ9_XANOB Epoxyqueuosine reductase; OS = Xanthomonas oryzae pv. oryzicola (strain BLS256); OX = 383407 GN=queG PE=3 SV=1
MSAVLARPDPADAAARMRVLAREAGFQRCGITGIELGEDEVHLRSWLEEGLYGTMHWMAQHGDKRSRPQELVPGTLRVLSVGMDYGRKDDTEAWNTLHDGKRAYVARYALGRDYHKLMRNRLQKLAERIQGEIGAFGFRVFVDSAPVLERALARNAGLGWIGKHTCLIDRNGGSWFFLGEIYLDVPLPIDTPATAHCGTCTRCIDICPTQAIIAPYRLDARRCIAYLTIEHDGAIPEDMRKPIGNRIFGCDDCQLICPWNKFAKRTDEADFRARNELDVATLPQLFAWDEDEFLRRTEGSPIRRSGHERWLRNIAVGLGNAPGTPEVLAALEARRHDDSALVREHVGWALSQHGL

SEQ ID NO: 82155 - protein, 355 aa, Xanthomonas perforans
  REGION 1..355: note = tr|A0A0G8Y8F2|A0A0G8Y8F2_9XANT Epoxyqueuosine reductase OS=Xanthomonas perforans OX=442694 GN=queG PE=3; SV = 1
MSAALAHPDPADTAARIRVLAREAGFQRCGITGIELGEDEVHLRSWLEEGLYGTMHWMAQHGDKRSRPQELVPGTLRVLSVGMDYGRKDDTEAWNTLHDGNRAYVARYALGRDYHKLMRNRLQKLAERIQGEIGPFGFRVFVDSAPVLERALARNAGLGWIGKHTCLIDRHGGSWFFLGEIYLDLPLPIDTPATAHCGTCTRCIDICPTQAIIAPYRLDARRCIAYLTIEHDGAIPEDMRKPIGNRIFGCDDCQLICPWNKFAKRTDEADFRARNDLDVATLPQLFAWNEDEFLRRTEGSPIRRSGHERWLRNIAVGLGNAPGTPEVLAALQARRHDDSALVREHVGWALAQHDL

SEQ ID NO: 82156 - protein, 355 aa, Xanthomonas phaseoli
  REGION 1..355: note = tr|A0A1V9HGG0|A0A1V9HGG0_9XANT Epoxyqueuosine reductase OS=Xanthomonas phaseoli pv. dieffenbachiae; OX = 92828 GN=queG PE=3 SV=1
MSAALARPDPADAAARIRVLAREAGFQRCGITGIELGEDEVHLRSWLAEGLYGTMHWMAQHGDKRSRPQELVPGTLRVLSVGMDYGRKDDTEAWNTLHDGNRAYVARYALGRDYHKLMRNRLQKLAERIQGEIGQFGFRVFVDSAPVLERALARNAGLGWIGKHTCLIDRNGGSWFFLGEIYLDLPLPIDTPATAHCGTCTRCIDICPTQAIIAPYRLDARRCIAYLTIEHDGAIPEDMRKPIGNRIFGCDDCQLICPWNKFAKRTDEADFRARNELDVATLPQLFAWNEGDFLRRTEGSPIRRSGHERWLRNIAVGLGNAPGTPEVLAALEARRHDDSALVREHVGWALAQHGL

SEQ ID NO: 82157 - protein, 355 aa, Xanthomonas phaseoli
  REGION 1..355: note = tr|A0A1V9HBA4|A0A1V9HBA4_9XANT Epoxyqueuosine reductase OS=Xanthomonas phaseoli pv. syngonii LMG 9055; OX = 1437878 GN=queG PE=3 SV=1
MSAALARPDPADAAARIRVLAREAGFQRCGITGIELGEDEVHLRSWLAEGLYGTMHWMAQHGDKRSRPQELVPGTLRVLSVGMDYGRKDDTEAWNTLYDGNRAYVARYALGRDYHKLMRNRLQKLAERIQGEIGQFGFRVFVDSAPVLERALARNAGLGWIGKHTCLIDRNGGSWFFLGEIYLDLPLPIDTPATAHCGTCTRCIDICPTQAIIAPYRLDARRCIAYLTIEHDGANPEDMRKPIGNRIFGCDDCQLICPWNKFAKRTDEADFRARNELDVATLPQLFAWNEGDFLRRTEGSPIRRSGHERWLRNIAVGLGNAPGTPEVLAALEARRHDDSALVREHVGWALAQHGL

SEQ ID NO: 82158 - protein, 355 aa, Xanthomonas pisi
  REGION 1..355: note = tr|A0A2S7D1L8|A0A2S7D1L8_9XANT Epoxyqueuosine reductase OS=Xanthomonas pisi OX=56457 GN=queG PE=3 SV=1
MSAAVTRPDPTDAAARIRALAREAGFQRCGITGIELGEDEAHLRSWLEEGLYGTMHWMAQHGDKRSRPQELVPGTLRVLSVGMDYGRKDDTEAWTTLHDGTRAYVARYALGRDYHKLMRNRLQKLAERIQGEIGAFGYRVFVDSAPVLERALARNAGLGWIGKHTCLIDRNGGSWFFLGEIYLDLPLPIDTPATAHCGTCTRCIDICPTQAIIAPYRLDARRCIAYLTIEHEGAIPEQMRKPIGNRIFGCDDCQLVCPWNKFAQRTDEADFRARNALDVATLPQLFAWDEAEFLRRTEGSPIRRSGHARWLRNIAVGLGNAPGTPEVLAALEARRHDACELVREHVGWALAQHGL

SEQ ID NO: 82159 - protein, 355 aa, unidentified
  source 1..355: note = Xanthomonas prunicola
  REGION 1..355: note = tr|A0A2N3RHT8|A0A2N3RHT8_9XANT Epoxyqueuosine reductase OS=Xanthomonas prunicola OX=2053930 GN=queG PE=3; SV = 1
MSAVLARPTPADAAARIRVLAREAGFQRCGITGIELGADEVHLRSWLEEGLYGTMHWMAQHGDKRSRPQELVPGTLRVLSVGMDYGRKDDTEAWNTLHDGTRAYVARYALGRDYHKLMRNRLQKLAERIQGEIGAFGFRVFVDSAPVLERALARNAGLGWIGKHTCLIDRNGGSWFFLGEIYLDLPLPIDTPATAHCGTCTRCIDICPTQAIIAPYRLDARRCIAYLTIEHDGAIPEDMRKPIGNRIFGCDDCQLICPWNKFAKRTDEADFRARNALDVATLPQLFAWDEDEFLRRTEGSPIRRSGHERWLRNIAVGLGNAPGTPEVFTALEARRHDDAALVREHVGWALAQHGL

SEQ ID NO: 82160 - protein, 368 aa, Xanthomonas sacchari
  REGION 1..368: note = tr|A0A2P5Z9Q8|A0A2P5Z9Q8_9XANT Epoxyqueuosine reductase OS=Xanthomonas sacchari OX=56458 GN=queG PE=3; SV = 1
MSARLDIADPHAAAARIRALARTFGFQRCGIAGIELQQDEAHLRDWLQQGLYGTMHWMAQHGDKRSRPAELIPGTLRVISVGLDYGRNDDDSAWDTLHDGERAYVARYALGRDYHKLMRNRLQKLAERIQDEIGPFGHRVFVDSAPVLERALARDAGLGWIGKHTCLIDRNGGSWFFLGEIYVDLPLPIDPPASAHCGTCTRCIDVCPTQAIVAPYRLDARRCIAYLTIEHDGAIPEELRPAIGNRIFGCDDCQLICPWNKFAKRSDEPDFRARNDLDKATLAQLFAWEEDEFLRRTEGSAIRRSGHERWLRNIAVALGNAPTTPQVMAALGARAQHPSPLVREHVQWALARHAATSTQPDAAADVRG

SEQ ID NO: 82161 - protein, 374 aa, Xanthomonas sacchari
  REGION 1..374: note = tr|A0A5D1A6F4|A0A5D1A6F4_9XANT Epoxyqueuosine reductase OS=Xanthomonas sacchari OX=56458 GN=queG PE=3; SV = 1
MSARLDIADPHAAAARIRALARTFGFQRCGIAGIELQQDEAHLRDWLEQGLYGTMHWMVQHGDKRSRPAELIPGTLRVISVGLDYGRNDDDSAWDTLRDGARAYVARYALGRDYHKLMRNRLQKLAERIQDEIGPFGHRVFVDSAPVLERALARDAGLGWIGKHTCLIDRNGGSWFFLGEIYVDLPLPIDPPASAHCGTCTRCIDVCPTQAIVAPYRLDARRCIAYLTIEHDGAIPEELRAAIGNRIFGCDDCQLICPWNKFAKRSDEPDFRARNDLDKATLAQLFAWEEDEFLRRTEGSAIRRSGHERWLRNLAVALGNAPTTPQVLAALGARAQHPSPLVREHVQWALARHTQAPADVAAPASPAPKADVRG

SEQ ID NO: 82162 - protein, 355 aa, Xanthomonas sp.
  REGION 1..355: note = tr|A0A3A5EMF6|A0A3A5EMF6_9XANT Epoxyqueuosine reductase OS=Xanthomonas sp. CFBP 7698 OX=2082399 GN=queG; PE = 3 SV=1
MSAVLARPDPTDAAARIRALAREAGFQRCGIAGIELGEDEVHLRSWLEEGLYGTMHWMAQHGDKRSRPQELVPGTLRVLSVGMDYGRKDDTEAWNTLHDGNRAYVARYALGRDYHKLMRNRLQKLAERIQGEIGAFGFRVFVDSAPVLERALARNAGLGWIGKHTCLIDRNGGSWFFLGEIYLDLPLPIDTPATAHCGTCTRCIDICPTQAIIAPYRLDARRCIAYLTIEHDGPIPEEMRKPIGNRIFGCDDCQLICPWNKFAKRTDEPDFRARNALDVATLPQLFAWDEDEFLRRTEGSPIRRSGHERWLRNIAVGLGNAPGTPEVLAALEARRHDDSELVREHVGWALAQHGL

SEQ ID NO: 82163 - protein, 374 aa, Xanthomonas sp.
  REGION 1..374: note = tr|A0A0J6G1Y8|A0A0J6G1Y8_9XANT Epoxyqueuosine reductase OS=Xanthomonas sp. NCPPB 1128 OX=1775876 GN=queG; PE = 3 SV=1
MSARLDIADPHAAAARIRALARTFGFQRCGIAGIELQQDEAHLRDWLEQGLYGTMHWMAQHGDKRSRPAELIPGTLRVISVGLDYGRNDDDSAWDTLRDGERAYVARYALGRDYHKLMRNRLQKLAERIQDEIGPFGHRVFVDSAPVLERALARDAGLGWIGKHTCLIDRNGGSWFFLGEIYVDLPLPIDPPASAHCGTCTRCIDVCPTQAIVAPYRLDARRCIAYLTIEHDGAIPEELRPAIGNRIFGCDDCQLICPWNKFAKRSDEPDFRARNDLDKATLAQLFAWEEDEFLRRTEGSALRRSGHERWLRNLAVALGNAPTTPQVLDALGARAEHPSPLVREHVRWALAQHADKSAATATPASPMPKANVRG

SEQ ID NO: 82164 - protein, 378 aa, Xanthomonas theicola
  REGION 1..378: note = tr|A0A2S6ZIM7|A0A2S6ZIM7_9XANT Epoxyqueuosine reductase OS=Xanthomonas theicola OX=56464 GN=queG PE=3; SV = 1
MSATVTATPADPRAAAARIRALAREFGFQRCGIAGIELQEDEAHLRDWLAQGLYGTMQWMAQHGDKRTRPAELIPGTLRVISVGLDYGRNDDDSAWDTLRNGARAYVARYALGRDYHKLMRNRLQKLAERIQAEIGRFGHRVFVDSAPVLERALARDAGLGWIGKHTCLIDRSGGSWFFLGEIYVDLPLPIDPPASAHCGTCTRCIDVCPTQAIVAPYRLDARRCIAYLTIEHDGAIPEALRPAIGNRIFGCDDCQLVCPWNKFAKRSDEPDFRARNDLDRATLAQLFAWDEDEFLRRTEGSAIRRSGHERWLRNLAVALGNAPTTPQVLAALGTRAQHASPLVREHVQWALARHAGTAAAADHGGSPPAADRAGVRG

SEQ ID NO: 82165 - protein, 371 aa, Xanthomonas translucens
  REGION 1..371: note = tr|A0A0K2ZE30|A0A0K2ZE30_XANCT Epoxyqueuosine reductase OS=Xanthomonas translucens pv. arrhenatheri LMG 727 OX=1195923 GN=queG PE=3 SV=1
MSSSAPHAAAARIRALAREFGFQRCGIAGIDLQQDEAHLRDWLAQGLYGTMQWMAQHGDKRARPAELIPGTLRVISVGLDYGRNDDDSAWDTLRDGERAYVARYALGRDYHKLMRNRLQKLAERIQAEVGRFGHRVFVDSAPVLERALARDAGLGWIGKHTCLIDRNGGSWFFLGEIYVDLPLPIDPPASAHCGTCTRCIEVCPTQAIVAPYRLDARRCIAYLTIEHEGAIPEELRPAIGNRIFGCDDCQLVCPWNKFAKRSDEPDFRARNALDRATLAQLFAWDEDEFLRRTEGSAIRRSGHERWLRNLAVALGNAPTTPQVLAALGARAQHGSPLVREHVQWALAQHAGQTGADNAAAPPPPAHGGMRG

SEQ ID NO: 82166 - protein, 375 aa, Xanthomonas translucens
  REGION 1..375: note = tr|A0A5C1WW08|A0A5C1WW08_XANCT Epoxyqueuosine reductase OS=Xanthomonas translucens pv. undulosa; OX = 487909 GN=queG PE=3 SV=1
MSSNVAPADPRTAAARIRALAREFGFQRCGIAGIELQQDEAHLRDWLAQGMYGTMQWMAQHGDKRARPAELIPGTLRVISVGLDYGRNDDDSAWETLRDGERAYVARYALGRDYHKLMRNRLQKLAERIQAEIGPFGHRVFVDSAPVLERALARDAGLGWIGKHTCLIDRNGGSWFFLGEIYVDLPLPIDPPASAHCGTCTRCIEVCPTQAIVAPYRLDARRCIAYLTIEHEGAIPEELRPAIGNRIFGCDDCQLVCPWNKFAKRSDEPDFRARNALDRATLAQLFAWDEDEFLRRTEGSAIRRSGHERWLRNLAVALGNAPTTPQVLAALDARAQHGSPLVREHVQWALAQHADQASVSEAALPRPAAHGDVRG

SEQ ID NO: 82167 - protein, 356 aa, Xanthomonas vasicola
  REGION 1..356: note = tr|A0A2P5ZRD4|A0A2P5ZRD4_XANVA Epoxyqueuosine reductase OS=Xanthomonas vasicola OX=56459 GN=queG PE=3; SV = 1
MSAVLARPDPADAAARIRVLAREAGFQRCGITGIELGEDEVHLRSWLEEGLYGTMHWMAQHGDKRSRPQELVPGTLRVLSVGMDYGRKDDTEAWNTLHDGNRAYVARYALGRDYHKLMRNRLQKLAERIQGEIGAFGFRVFVDSAPVLERALARNAGLGWIGKHTCLIDRNGGSWFFLGEIYLDLPLPIDTPATAHCGTCTRCIDICPTQAIIAPYRLDARRCIAYLTIEHDGAIPEDMRKPIGNRIFGCDDCQLICPWNKFAKRTDEADFRARNDLDVATLPQLVAWDADEFLRRTEGSPIRRSGHERWLRNIAVGLGNAPGTPEVLAALEARRHDDSALVREHVGWALAQHGLS

SEQ ID NO: 82168 - protein, 355 aa, Xanthomonas vesicatoria
  REGION 1..355: note = tr|A0A1L5QP62|A0A1L5QP62_9XANT Epoxyqueuosine reductase OS=Xanthomonas vesicatoria OX=56460 GN=queG PE=3; SV = 1
MSAVLARPDPTDAAARIRVLAREAGFQRCGITGIELGEDEAHLRSWLAEGLYGTMHWMAQHGDKRSRPQELVPGTLRVLSVGMDYGRKDDTEAWTTLHDGTRAYVARYALGRDYHKLMRNRLQKLAERIQGEIGAFGYRVFVDSAPVLERALARNAGLGWIGKHTCLIDRNGGSWFFLGEIYLDLPLPIDTPATAHCGTCTRCIDICPTQAIIAPYRLDARRCIAYLTIEHDGAIPEEMRKPIGNRIFGCDDCQLICPWNKFAQRTDEADFRARNALDVATLPQLFAWDEAEFLQRTEGSPIRRSGHARWLRNIAVGLGNAPGTPEVLAALEARRHDDSELVREHVGWALAQHGL

SEQ ID NO: 82169 - protein, 301 aa, Xanthomonas vesicatoria
  REGION 1..301: note = tr|F0BG13|F0BG13_9XANT Iron-sulfur cluster binding protein, putative OS=Xanthomonas vesicatoria ATCC 35937; OX = 925775 GN=XVE_3177 PE=4 SV=1
MHWMAQHGDKRSRPQELVPGTLRVLSVGMDYGRKDDTEAWTTLHDGTRAYVARYALGRDYHKLMRNRLQKLAERIQGEIGAFGYRVFVDSAPVLERALARNAGLGWIGKHTCLIDRNGGSWFFLGEIYLDLPLPIDTPATAHCGTCTRCIDICPTQAIIAPYRLDARRCIAYLTIEHDGAIPEEMRKPIGNRIFGCDDCQLICPWNKFAQRTDEADFRARNALDVATLPQLFAWDEAEFLQRTEGSPIRRSGHARWLRNIAVGLGNAPGTPEVLAALEARRHDDSELVREHVGWALAQHGL

SEQ ID NO: 82170 - protein, 312 aa, Xenococcus sp.
  REGION 1..312: note = tr|L8LRT2|L8LRT2_9CYAN Epoxyqueuosine reductase; OS = Xenococcus sp. PCC 7305 OX=102125 GN=queG PE=3 SV=1
MINSDRIKEAAKNIGFHKVGIVSVDDIPDDAAVEHLNNWLAFGYHADMAWMANPKRADIRLCLPDARSLIVVAVNYYSPHQHADAPEIAKISRYGWGRDYHKVMQKKLKALSSWLQEQGDNITTRYYSDTGPVQDKVWAQRAGLGWIGKNGNLITRDYGSWVFLGEILTNLAITADQPHSSHCGTCTRCLEACPTNAIAKPFVVDANRCIAYHTIENREPELPAEIAQKLSGWVAGCDICQDVCPWNQRFAQETDIEDFQPYPENLHPQLTELASIESGEWDRRFRASALRRIKPQMWQRNAQANLKYIKEQ

SEQ ID NO: 82171 - protein, 358 aa, Xenophilus sp.
  REGION 1..358: note = tr|A0A254VK03|A0A254VK03_9BURK Epoxyqueuosine reductase OS=Xenophilus sp. AP218F OX=2014876 GN=queG PE=3; SV = 1
MTENPKQKPDYPELSRQIKVWAREAGFADARVGPANLPPEAERKLEAWLAAGYHGEMDYMARHGALRVKPAELVPGTLSVISVRMNYWPGGRDPEAVLADGSRAYLSRYALGRDYHKVLRNRLQKLAERIEAAIGAFGYRVFTDSAPVAEVALASQAGLGWRGKHTLLLTKKQGSLFFLGEILTDLPLPADEPEDGHCGRCTRCIDICPTQAIVEPYTVDARRCISYLTIELKSAIPEAMRPLIGNRVYGCDDCQLTCPWNRFAVDSAEADFAVRHGLDDAALTELFAWSEAEFKERMAGSPIYRIGYAKWLSNLAVGLGNAPTTDETVAALRARLDHPDELVAEPVRWALARHGFAE

SEQ ID NO: 82172 - protein, 385 aa, Xenorhabdus beddingii
  REGION 1..385: note = tr|A0A1Y2SRD6|A0A1Y2SRD6_9GAMM Epoxyqueuosine reductase OS=Xenorhabdus beddingii OX=40578 GN=queG PE=3; SV = 1
MATPLDLNLLAANIKQWGISLGFQQVGICDTDLSAEEPKLQAWLDKQYHGEMDWMARHGMMRARPHELLPGTLRVISVRMNYLPAKAAFASTLNNPQMGYVSRYSLGRDYHKLLRQRLKKLGDQIQDYCTVHDYQGTLNFRPFVDSAPIMERPLAAKAGLGWVGKHSLILNRDSGSWFFLGELLIDLPLPIDTPQEEQCGRCVACMTTCPTGAIVEPYTIDARRCISYLTIELEGAIPEEFRPLMGNRIYGCDDCQLICPWNRFSQLTDEADFSPRAALHTPDLLDLFHWSEEKFLRITEGSAIRRIGYLRWLRNISVALGNAPYQDDIVLALEKRMGLSDVLDEHIRWAIAQQITRRNANAIEVQTSQQKRLIRAITKGLPRDA

SEQ ID NO: 82173 - protein, 385 aa, Xenorhabdus bovienii
  REGION 1..385: note = tr|A0A0B6XE66|A0A0B6XE66_XENBV Epoxyqueuosine reductase OS=Xenorhabdus bovienii OX=40576 GN=yjeS PE=3; SV = 1
MATPLDLNLLAANIKQWGLSLGFQQVGICDTDLSTEEPKLQEWLDKQYHGEMDWMARHGMMRARPHELLPDTLRVISVRMNYLPTKAAFASTLNNPELGYVSRYSLGRDYHKLLRQRLKKLGGQIQDYCSAHEYQGTLNFRPFVDSAPIMERPLAAKAGLGWVGKHSLILNRESGSWFFLGELLINLPLPIDAPQEEQCGRCVACMTTCPTGAIVEPYTIDARRCISYLTIELDGVIPEELRPLMGNRIYGCDDCQLICPWNRFSQLTDEVDFSPRAALHTPKLLDLFSWSEEKFLRITEGSAIRRIGYLRWLRNISVALGNALYQDNIVLALEKRIGLSEVLDEHIHWAIDQQITRRNANTIEVQTSQQKRLIRAITKGLPRDA

SEQ ID NO: 82174 - protein, 385 aa, Xenorhabdus bovienii; identical to SEQ ID NO: 82173
  REGION 1..385: note = tr|A0A077NHX5|A0A077NHX5_XENBV Epoxyqueuosine reductase OS=Xenorhabdus bovienii str. puntauvense; OX = 1398201 GN=queG PE=3 SV=1

SEQ ID NO: 82175 - protein, 385 aa, Xenorhabdus budapestensis
  REGION 1..385: note = tr|A0A2D0J501|A0A2D0J501_XENBU Epoxyqueuosine reductase OS=Xenorhabdus budapestensis OX=290110 GN=queG; PE = 3 SV=1
MVTPLDLNLLATNIKQWGLSLGFQQVGICDTDLSTEEPRLQEWLDKQYHGEMDWMARHGMMRTRPRELLPGTLRIISVRMNYLPTKAAFASTLNNPELGYVSRYSLGRDYHKLLRQRLKKLGEQIQDYCSTHEYQGTLNFRPFVDSAPIMERPLATKAGLGWVGKHSLILNRESGSWFFLGELLINLPLPIDISQEEQCGRCVACMTTCPTGAIVEPYTIDARRCISYLTIELDGTIPEEFRSLMGNRIYGCDDCQLICPWNRFSQLTDEADFSPRAALHTPELLDLFSWSEEKFLRITEGSAIRRIGYLRWLRNISVALGNAPYRDEIVLTLKKRIGLSDVLDEHIHWAVAQQISRRSANAIEVQTSQQKRLIRAITKGLPRDA

SEQ ID NO: 82176 - protein, 385 aa, Xenorhabdus cabanillasii
  REGION 1..385: note = tr|A0A3D9UGK3|A0A3D9UGK3_9GAMM Epoxyqueuosine reductase OS=Xenorhabdus cabanillasii OX=351673 GN=queG; PE = 3 SV=1
MTTPLDLNLLATNIKQWGLSLGFQQVGICDTDLSTEEPRLQEWLDKQYHGEMDWMARHGMMRARPHELLSGTLRVISVRMNYLPTKAAFASTLNNPELGYVSRYSLGRDYHKLLRQRLKKLGEQIQDYCSTHEYQGTLNFRPFVDSVPIMERPLAAKAGLGWVGKHSLILNRESGSWFFLGELLINLPLPIDTPQEEQCGRCVACMTTCPTGAIIEPYTIDARRCISYLTIELDGAIPEEFRPLMGNRIYGCDDCQLICPWNRFSQLTDEDDFSPRAALHTPELLDLFSWSEEKFLRITEGSAIRRIGYLRWLRNISVALGNAPYRDEIVLTLEKRIGLSDVLDEHIHWAIAQQISRRSANAIEIQTSQQKRLIRAITKGLARDA

SEQ ID NO: 82177 - protein, 385 aa, Xenorhabdus cabanillasii
  REGION 1..385: note = tr|W1IRH3|W1IRH3_9GAMM Epoxyqueuosine reductase; OS = Xenorhabdus cabanillasii JM26 OX=1427517 GN=yjeS PE=3; SV = 1
MTTPLDLNLLATNIKQWGLSLGFQQVGICDTDLSTEEPRLQEWLDKQYHGEMDWMARHGMMRARPHELLSGTLRVISVRMNYLPTKAAFASTLNNPELGYVSRYSLGRDYHKLLRQRLKKLGEQIQDYCSTHEYQGTLNFRPFVDSAPIMERPLAAKAGLGWVGKHSLILNRESGSWFFLGELLINLPLPIDTPQEEQCGRCVACMTICPTGAIIEPYTIDARRCISYLTIELDGAIPEEFRPLMGNRIYGCDDCQLICPWNRFSQLTDEDDFSPRAALHTPELLDLFSWSEEKFLRITEGSAIRRIGYLRWLRNISVALGNAPYRDEIVLTLEKRIGLSDVLDEHIHWAIAQQISRRSANAIEIQTSQQKRLIRAITKGLARDA

SEQ ID NO: 82178 - protein, 385 aa, unidentified
  source 1..385: note = Xenorhabdus eapokensis
  REGION 1..385: note = tr|A0A1Q5TWJ0|A0A1Q5TWJ0_9GAMM Epoxyqueuosine reductase OS=Xenorhabdus eapokensis OX=1873482 GN=queG; PE = 3 SV=1
MAIPLDLNLLATNIKQWGLSLGFQQVGICDTDLSAEEPRLQEWLDKQYHGEMDWMVRHGMMRARPHELLPGTLRVISVRMNYLPAKAAFASTLNNPQMGYISRYSLGRDYHKLLRQRLKKLGDKIQEYCHAHEYQGALNFRPFVDSAPIMERPLAEKAGLGWVGKHSLILNRESGSWFFLGELLINLPLPIDAPQKEQCGRCVACMTTCPTGAIVEPYTIDARRCISYLTIELEGVIPEEFRPLMGNRIYGCDDCQLICPWNRFSQLTDEADFSPRAALHTPDLLALFNWSEEKFLRITEGSPIRRIGYLRWLRNISVALGNAPYQDDIVLALEKRFGLSEVLDEHIYWAITQQMARRNANAIEVQTSQQKRLIRAITKGLPRDA

SEQ ID NO: 82179 - protein, 385 aa, Xenorhabdus ehlersii
  REGION 1..385: note = tr|A0A2D0IQ05|A0A2D0IQ05_9GAMM Epoxyqueuosine reductase OS=Xenorhabdus ehlersii OX=290111 GN=queG PE=3; SV = 1
MATPLDLHLLATNIKQWGLSLGFQQIGICDTDLSAEESRLQEWLDKQYHGEMDWMARHSMMRARPHELLPGTLRVISVRMNYLPAKAAFASTLNNPQMGYISRYSLGRDYHKLLRQRLKKLGDKIQEYCSAHEYQGTLNFRPFVDSAPIMERPLAEKAGLGWVGKHSLILNRESGSWFFLGELLINLPLPIDAPQEEQCGRCVACMTTCPTGAIVEPYTIDARRCISYLTIELEGVIPEEFRTLMGNRIYGCDDCQLICPWNRFSQLTDEADFSPRAALHTPDLLALFNWSEEKFLRITEGSPIRRIGYLRWLRNISVALGNAPYQEDVVLALEKRFGLSEVLDEHIHWAITQQMARRNANAIEVQTSQQKRLIRAITKGLPRDA

SEQ ID NO: 82180 - protein, 385 aa, Xenorhabdus hominickii
  REGION 1..385: note = tr|A0A2G0QE50|A0A2G0QE50_9GAMM Epoxyqueuosine reductase OS=Xenorhabdus hominickii OX=351679 GN=queG PE=3; SV = 1
MAIPLDLNLLAANIKQWGISLGFQQVGICDTDLSAEEPKLQEWLDKQYHGEMDWMARHGMMRARPHELLPGTLRVISVRMNYLPAKAAFASTLNNPQMGYVSRYSLGRDYHKLLRQRLKKLGDQIQDYCSDHEYQGTLNFRPFVDSAPIMERPLAAKAGLGWVGKHSLILNRESGSWFFLGELLINLPLPIDTPQEEQCGRCVACMTTCPTGAIVEPYTIDARRCISYLTIELEGVIPEEFRPLMGNRIYGCDDCQLICPWNRFSQLTDETDFSPRATLHTPQLLDLFSWSEEKFLRITEGSAIRRIGYLRWLRNISVALGNAPYQVEIVLALEKRMDLSDILNEHIRWAIEQQITRRNANSIEVQTSQQKRLIRAITKGLPRDA

SEQ ID NO: 82181 - protein, 385 aa, Xenorhabdus innexi
  REGION 1..385: note = tr|A0A1N6MSF7|A0A1N6MSF7_9GAMM Epoxyqueuosine reductase OS=Xenorhabdus innexi OX=290109 GN=yjeS PE=3 SV=1
MAIPLDLNLLATNIKQWGLSLGFQQVGICDTDLSTEEPRLQEWLDKQYHGEMDWMARHGMMRARPHELLPGTLRVISVRMNYLPAKAAFASTLNNPEQGYVSRYSLGRDYHKLLRQRLKKLGDQIQEYCCAHEYQGVLNFRPFVDSAPIMERPLAAKAGLGWVGKHSLILNRESGSWFFLGELLINLPLPVDSPQEEQCGRCVACMTTCPTGAIVAPYTIDARRCISYLTIELDGVIPEEFRPLMGNRIYGCDDCQLICPWNRFSQLTDETDFSPRAALHTPELIDLFNWSEEKFLRITEGSAIRRIGYLRWLRNISVALGNAPYRDEIVLVLEKRMGLSEMLDEHIHWAIAQQISRRNVDVIDVQTSQQKRLIRAITKGLPRDA

SEQ ID NO: 82182 - protein, 385 aa, unidentified
  source 1..385: note = Xenorhabdus ishibashii
  REGION 1..385: note = tr|A0A2D0KFW1|A0A2D0KFW1_9GAMM Epoxyqueuosine reductase OS=Xenorhabdus ishibashii OX=1034471 GN=queG; PE = 3 SV=1
MTTHLDLNLLATNIKQWGLALGFQQVGICDTDLSAEEPRLQEWLDKQYHGEMDWMVRHGMMRARPHELLPGTLRVISVRMNYLPAKAAFASTLNNPQMGYISRYSLGRDYHKLLRQRLKKLGDKIQEYCRAHEYQGILNFRPFVDSAPIMERPLAEKAGLGWVGKHSLILNRESGSWFFLGELLINLPLPIDAPQEEQCGRCVACMTTCPTGAIVEPYTIDARRCISYLTIELEGVIPEEFRPLMGNRIYGCDDCQLICPWNRFSQLTDEADFNPRAALHTPDLLALFNWSEEKFLRITEGSPIRRIGYLRWLRNISVALGNAPYQDDIVLALEKRFGLSEILDEHIHWAITQQMARRNADAIEVQTSQQKRLIRAITKGLPRDA

SEQ ID NO: 82183 - protein, 385 aa, Xenorhabdus japonica
  REGION 1..385: note = tr|A0A1I4Y8G0|A0A1I4Y8G0_9GAMM Epoxyqueuosine reductase OS=Xenorhabdus japonica OX=53341 GN=queG PE=3; SV = 1
MTTPLDLNLLATNIKQWGLSLGFQQVGICDTDLSAEEPKLQEWLDKKYHGEMDWMDRHGMMRARPHELLPGTLRVISIRMNYLPAKAAFASTLNNPQMGYVSRYSLGRDYHKLLRQRLKKLGDKIQEYCDTHEYQGTLNFRPFVDSAPIMERPLAEKAGLGWVGKHSLILNRESGSWFFLGELLVNLPLPIDAPQDEQCGRCVACMTTCPTGAIVEPYTIDARRCISYLTIELEGAIPEEFRPLVGNRIYGCDDCQLICPWNRFSQLTDEADFSPRAALHTPELLDLFNWSEEKFLRITEGSAIRRIGYLRWLRNISVALGNAPYQADIVLALEKRIGLSEVLDEHIHWAIAQQMVRRNANTIEVQTSQQKRLIRAITKGLPRDA

SEQ ID NO: 82184 - protein, 385 aa, unidentified
  source 1..385: note = Xenorhabdus khoisanae
  REGION 1..385: note = tr|A0A0J5FV15|A0A0J5FV15_9GAMM Epoxyqueuosine reductase OS=Xenorhabdus khoisanae OX=880157 GN=queG PE=3; SV = 1
MTAPLDLNLLAANIKQWGISLGFQQVGICDTDLSAEEPKLQEWLDKQYHGEMDWMARHGMMRARPHELLPGTLRVISVRMNYLPAKAAFASTLNNPQMGYVSRYSLGRDYHKLLRQRLKKLGDTIQDYCTTHEYQGTLNFRPFVDSAPIMERPLAAKAGLGWVGKHSLILNRDSGSWFFLGELLIDLPLPVDVPQEEQCGRCVACMTTCPTGAIVEPYTIDARRCISYLTIELEGVIPEEFRPLMGNRIYGCDDCQLICPWNRFSQLTDEADFSPRAALHTPELLDLFSWSEEKFLRITEGSAIRRIGYLRWLRNISVALGNAPYQDDIVLALEKRTGLSEVLDEHIHWAIDQQITRRNANSIEVQTSQQKRLIRAITKGLPRDA

SEQ ID NO: 82185 - protein, 385 aa, Xenorhabdus koppenhoeferi
  REGION 1..385: note = tr|A0A1I7GRA5|A0A1I7GRA5_9GAMM Epoxyqueuosine reductase OS=Xenorhabdus koppenhoeferi OX=351659 GN=queG; PE = 3 SV=1
MAVPLDLNLLAVNIKQWGLSLGFQQVGICDTDLSTEEPKLQEWLDKQYHGEMDWMARHGMMRARPHELLPGTLRVISVRMNYLPAKAAFASTLNNPQMGYVSRYSLGRDYHKLLRQRLKKLGDQIQSYCSAHEYQGTLNFRPFVDSAPIMERPLAAKAGLGWVGKHSLILNRESGSWFFLGELLIDLPLPVDVPQEEQCGRCVACMTTCPTGAIVEPYTIDARRCISYLTIELEGVIPEEFRPLMGNRIYGCDDCQLICPWNRFSQLTDEADFSPRAALHAPELLDLFNWSEEKFLRITEGSAIRRIGYLRWLRNISVALGNSPYQDDIVLALGKRTGLSDVLDEHIHWAIDQQMARRNANVIEVQTSQQKRLIRAITKGLPRDA

SEQ ID NO: 82186 - protein, 385 aa, Xenorhabdus kozodoii
  REGION 1..385: note = tr|A0A2D0LGQ0|A0A2D0LGQ0_9GAMM Epoxyqueuosine reductase OS=Xenorhabdus kozodoii OX=351676 GN=queG PE=3; SV = 1
MVTPLDLDLLTTNIKQWGLSLGFQQVGICDTDLSAEEPRLQAWLDKQYHGEMDWMARHGMMRARPHELLPGTLRVISVRMNYLPAKAAFASTLNNPQMGYISRYSLGRDYHKLLRQRLKKLGDKIQEYCSAHEYQGTLNFRPFVDSAPIMERPLAAKAGLGWVGKHSLILNRESGSWFFLGELLINLPLPIDAPQEEQCGRCVACMTTCPTGAIVEPYTIDARRCISYLTIELEGAIPEEFRPLMGNRIYGCDDCQLICPWNRFSQLTDEADFSPRAALHAPDLLALFHWSEEKFLRITEGSAIRRIGYLRWLRNISVALGNAPYQDDIVLALEKRLGLSDVLDEHIHWAIAQQMTRRNANAIEVQTSQQKRLIRAITKGLPRDA

SEQ ID NO: 82187 - protein, 385 aa, Xenorhabdus mauleonii
  REGION 1..385: note = tr|A0A1I3L2L4|A0A1I3L2L4_9GAMM Epoxyqueuosine reductase OS=Xenorhabdus mauleonii OX=351675 GN=queG PE=3; SV = 1
MATPLDLNLLAANIKQWGISLGFQQVGICDTDLSTEEPRLQQWLDKQYHGEMDWMARHGMMRARPHELLPGTLRVISVRMNYLPAKAAFASTLNNPQMGYVSRYSLGRDYHKLLRQRLKKLGDQIQNYCTSHDYQGTLNFRPFVDSAPIMERPLAAKAGLGWVGKHSLILNRESGSWFFLGELLIDLPLPVDAPQEEQCGRCVACMTTCPTGAIVEPYTIDARRCISYLTIELEGVIPEEFRPLMGNRIYGCDDCQLICPWNRFSQLTDETDFSPRAALHTPELLDLFNWSEEKFLRITEGSAIRRIGYLRWLRNISVALGNAPYQDNIVLALEKRIGLSDVLDEHIHWAIEQQITRRNSQAIEVQTSQQKRLIRAITKGLPRDA

SEQ ID NO: 82188 - protein, 385 aa, Xenorhabdus miraniensis
  REGION 1..385: note = tr|A0A2D0JX24|A0A2D0JX24_9GAMM Epoxyqueuosine reductase OS=Xenorhabdus miraniensis OX=351674 GN=queG; PE = 3 SV=1
MAAPLDLNLLAANIKQWGISLGFQQVGICDTDLSAEEPKLQEWLDKQYHGEMDWMARHGMMRARPHELLPGTLRVISVRMNYLPAKAAFASTLNNPQMGYVSRYSLGRDYHKLLRQRLKKLGDTIQDYCTTHEYQGTLNFRPFVDSAPIMERPLAAKAGLGWVGKHSLILNRDSGSWFFLGELLIDLPLPVDAPQEEQCGRCVACMTTCPTGAIVEPYTIDARRCISYLTIELEGVIPEEFRPLMGNRIYGCDDCQLICPWNRFSQLTDEADFSPRAALHTPELLDLFSWSEEKFLRITEGSAIRRIGYLRWLRNISVALGNAPYQDDIVLALEKRTGLSDVLDEHIHWAIDQQTIRRNANSIEVQTSQQKRLIRAITKGLPRDA

SEQ ID NO: 82189 - protein, 385 aa, Xenorhabdus nematophila
  REGION 1..385: note = tr|D3VI35|D3VI35_XENNA Epoxyqueuosine reductase; OS = Xenorhabdus nematophila (strain ATCC 19061 / DSM 3370 / LMG 1036 / NCIB 9965 / AN6) OX=406817 GN=queG PE=3 SV=1
MAIPLDLNLLAANIKQWGISLGFQQIGICDTDLSTEEPKLQEWLDKQYHGEMDWMARHGMMRARPHELLPGTLRVISVRMNYLPAKAAFASTLNNPQMGYVSRYSLGRDYHKLLRQRLKKLGDQIQNYCSEHEYQGTLNFRPFVDSAPIMERPLAAKAGLGWVGKHSLILNRESGSWFFLGELLIDLPLPVDTPQEEQCGRCVACMTTCPTGAIVAPYTIDAQRCISYLTIELEGVIPEEFRPLMGNRIYGCDDCQLICPWNRFSQLTDEADFSPRAALHTPELLDLFNWSEEKFLRITEGSAIRRIGYLRWLRNISVTLGNAPYQDNIVLALEKRIGLSDILDEHIHWAIGQQTTRRNAHAVNVQTSQQKRLIRAITKGLPRDA

SEQ ID NO: 82190 - protein, 385 aa, Xenorhabdus nematophila; identical to SEQ ID NO: 82189
  REGION 1..385: note = tr|A0A0A8NSX4|A0A0A8NSX4_XENNE Epoxyqueuosine reductase OS=Xenorhabdus nematophila str. Websteri; OX = 1437826 GN=queG PE=3 SV=1

SEQ ID NO: 82191 - protein, 385 aa, Xenorhabdus poinarii
  REGION 1..385: note = tr|A0A068R815|A0A068R815_9GAMM Epoxyqueuosine reductase OS=Xenorhabdus poinarii G6 OX=1354304 GN=yjeS; PE = 3 SV=1
MTTPLDLNILATNIKQWGSALGFQQVGICDTDLSTEEPRLQEWLDKQYHGEMDWMARHGMMRARPHELLPGTLRVISVRMNYLPAKAAFASTLNNPQMGYVSRYSLGRDYHKLLRQRLKKLGDQIQEYCHAHEYQGTLNFRPFVDSAPIMERPLAEKAGLGWVGKHSLILNRESGSWFFLGELLINLPLPVDTPQEAQCGRCVACMTTCPTGAIVEPYTIDARRCISYLTIELEGVIPEEFRPLMGNRIYGCDDCQLICPWNRFSQLTDEADFSPRAALHTPDLLDLFNWSEEKFLRITEGSAIRRIGYMRWLRNISVALGNAPYQDDIVLALENKVGLSAVLDEHLHWAIAQQMTRRNANTIEVQTSKQKRLIRAITKGLPRDA

SEQ ID NO: 82192 - protein, 385 aa, Xenorhabdus sp.
  REGION 1..385: note = tr|A0A0M0T7V3|A0A0M0T7V3_9GAMM Epoxyqueuosine reductase OS=Xenorhabdus sp. GDc328 OX=742178 GN=queG PE=3; SV = 1
MATPLDLNLLATNIKQWGLSLGFQQVGICDTDLSAEEPRLQEWLDKQYHGEMDWMARHGMMRARPHELLPGTLRVISVRMNYLPAKAAFASTLNNPQMGYISRYSLGRDYHKLLRQRLKKLGDKIQEYCSTHEYQGTLNFRPFVDSAPIMERPLAAKAGLGWVGKHSLILNRESGSWFFLGELLINLPLPIDVPQEEQCGRCVACMTTCPTGAIVAPDTIDARRCISYLTIELEGVIPEELRPLMGNRIYGCDDCQLICPWNRFSQLTDEADFSPRAVLHTPELLDLFNWSEEKFLRITEGSAIRRIGYLRWLRNISVALGNAPYQDDIVLALEKKFGLSEVLDEHIHWAIARQMTRRNANAIEVQTSQQKRLIRAITKGLPRDA

SEQ ID NO: 82193 - protein, 385 aa, Xenorhabdus sp.
  REGION 1..385: note = tr|A0A2D0K8I1|A0A2D0K8I1_9GAMM Epoxyqueuosine reductase OS=Xenorhabdus sp. KK7.4 OX=1851572 GN=queG PE=3; SV = 1
MAIPLDLNLLAANIKQWGLSLGFQQVGICDTDLSTEEPRLQEWLDKQYQGEMDWMARHGMMRARPHELLPGTLRVISVRMNYLPAKAAFASTLNNPEQGYVSRYALGRDYHKLLRQRLKKLGEQIQEYCSAHEYQGILNFRPFVDSAPIMERPLAAKAGIGWVGKHSLILNRESGSWFFLGELLVNLPLPVDSPQEEQCGRCVACMTTCPTGAIVEPYTIDARRCISYLTIELDGVIPEEFRPLMGNRIYGCDDCQLICPWNRFSQLTDEADFSPRAALHTPELLDLFNWSEEKFLRITEGSAIRRIGYLRWLRNISVALGNAPYRDEIVLVLEKRIGLSEVLDEHIHWAIDQQLSRRSIDAINVQTSQQKRLIRAITKGLPRDA

SEQ ID NO: 82194 - protein, 385 aa, Xenorhabdus stockiae
  REGION 1..385: note = tr|A0A2D0KTU1|A0A2D0KTU1_9GAMM Epoxyqueuosine reductase OS=Xenorhabdus stockiae OX=351614 GN=queG PE=3; SV = 1
MAIPLDLNLLAANIKQWGLSLGFQQVGICDTDLSTEEPRLQEWLDKQYQGEMDWMARHGMMRARPHELLPGTLRVISVRMNYLPAKAAFASTLNNPEQGYVSRYALGRDYHKLLRQRLKKLGEQIQEYCSAHEYQGILNFRPFVDSAPIMERPLAAKAGIGWVGKHSLILNRESGSWFFLGELLINLPLPVDSPQEEQCGRCVACMTTCPTGAIVEPYTIDARRCISYLTIELDGVIPEEFRPLMGNRIYGCDDCQLICPWNRFSQLTDEADFSPRAALHTPELLDLFNWSEEKFLRITEGSAIRRIGYLRWLRNISVALGNAPYRDEIVLVLEKRIGLSEVLDEHIHWAIAQQLSRRSIDAINVQTSQQKRLIRAITKGLPRDA

SEQ ID NO: 82195 - protein, 385 aa, Xenorhabdus szentirmaii
  REGION 1..385: note = tr|W1J6Q5|W1J6Q5_9GAMM Epoxyqueuosine reductase; OS = Xenorhabdus szentirmaii DSM 16338 OX=1427518 GN=yjeS; PE = 3 SV=1
MTTPLDLSLLAENIKQWGIALGFQQVGICNTDLSAEEPRLQAWLDNQYHGEMDWMARHGMMRARPHELLPGTLRVISVRMNYLPAKAAFASTLNNPQMGYVSRYSLGRDYHKLLRQRLKKLGDKIQDYCSDHAYEGTLNFRPFVDSAPIMERPLAEKAGLGWVGKHSLILNRESGSWFFLGELLINLPLPVDTPQEEQCGRCVACMTTCPTGAIVEPHTIDARRCISYLTIELEGAIPEEFRPLMGNRIYGCDDCQLICPWNRFSQLTDEKDFSPRAALHAPELLDLFNWSEEKFLRITEGSAIRRIGYLRWLRNISVALGNAPYQDDIVLALKKRIGLGEVLDEHIHWAIDQQLTRRNANTIEVQTSQQKRLIRAITKGLPRDA

SEQ ID NO: 82196 - protein, 385 aa, unidentified
  source 1..385: note = Xenorhabdus thuongxuanensis
  REGION 1..385: note = tr|A0A1Q5TSY1|A0A1Q5TSY1_9GAMM Epoxyqueuosine reductase OS=Xenorhabdus thuongxuanensis OX=1873484; GN = queG PE=3 SV=1
MATPLDLNLLATNIKQWSLSLGFQQVGICDTDLSAEEPRLQEWLDKQYHGEMDWMVRHGMMRARPYELLPETLRVISVRMNYLPAKAAFASTLNNPQMGYISRYSLGRDYHKLLRQRLKKLGDKIQEYCSAHEYQGTLNFRPFVDSAPIMERPLAEKAGLGWVGKHSLILNRESGSWFFLGELLINLPLPIDAPQEEQCGRCVACMTTCPTGAIVEPYTIDARRCISYLTIELEGVIPEEFRPLMGNRIYGCDDCQLICPWNRFSQLTGEADFSPRATLHTPDLQELFNWSEEKFLRITEGSPIRRIGYLRWLRNISVALGNAPYQDDIVLALEKRFGLSEVLDEHIHWAITQQIVRRNANAIEVQTSQQKRLIRAITKGLPRDA

SEQ ID NO: 82197 - protein, 385 aa, Xenorhabdus vietnamensis
  REGION 1..385: note = tr|A0A1Y2SGU5|A0A1Y2SGU5_9GAMM Epoxyqueuosine reductase OS=Xenorhabdus vietnamensis OX=351656 GN=queG; PE = 3 SV=1
MTTRLDLNLLATNIKQWGLSLGFQQVGICDTDLSAEEPRLQEWLDKQYHGEMDWMARHGMMRARPHELLSGTLRVISVRMNYLPAKAAFASTLNNPQMGYVSRYSLGRDYHKILRQRLKKLGDKIQEYCTAHEYQETLNFRPFVDSAPIMERPLAEKAGLGWVGKHSLILNRESGSWFFLGELLINLPLPIDAPQEEQCGRCVACMTTCPTNAIVEPYTIDARRCISYLTIELEGVIPEEFRPLMGNRIYGCDDCQLICPWNRFSQLTDEADFSPRATLHTPDLLDLFNWSEEKFLRITEGSAIRRIGYLRWLRNISVALGNAPYQDDIVLALEKRFGLSEVLDEHIRWAIAQQMARRNANIIEVHTSQQKRLIRAITKGLPRDA

SEQ ID NO: 82198 - protein, 358 aa, unidentified
  source 1..358: note = Xinfangfangia sp.
  REGION 1..358: note = tr|A0A3P5WW72|A0A3P5WW72_9RHOB Epoxyqueuosine reductase OS=Xinfangfangia sp. CIP 111625 OX=2483812; GN = queG PE=3 SV=1
MDGPEGICIRVKATDPSDLKARLSARALEEGFSRVGICAPDAVPGTAERLREFLAAGHHGSMGWMEERAHWRGDPSALWPEAKSVIMLAEVYTPESDPRAVLSQPDRAAVSVYAQGKDYHDLVKRRLKRLGRWLLDQARDEEIKVFVDTAPVMEKPLAQAAGLGWQGKHTNLLSRDLGNWFFLGSIFTTLDLPKDPPEVSHCGSCRACLTACPTDAFPAPYRLDARRCISYLTIEHKGPVAPDLRARMGNRIYGCDDCLAACPWNKFAVAAREVGYQPRVGAPELAELAALDDAGFRARFAGSPVKRIGRDRFVRNVLYAIGNSGMPALAPSARALLDDPDPVVAEAAEWALARLVSA

SEQ ID NO: 82199 - protein, 373 aa, Xylophilus ampelinus
  REGION 1..373: note = tr|A0A318SR35|A0A318SR35_9BURK Epoxyqueuosine reductase OS=Xylophilus ampelinus OX=54067 GN=queG PE=3; SV = 1
MVGSSQQLVSRIRQWARELGFSQIGVAGVDLSAAEAGLVAWLAEGFHGSMHYMEAHGLRRARPAELVPGTVSVLTVRMDYLPRDTPAGWQAVEFSRLERPVEGIVSLYARGRDYHKVLRGRLQKLAERIDAEVGPIGHRAFTDSAPVLEAELAARSGQGWRGKHTLVLHREGGSMFFLGEIYLDLALPESAPVSSHCGQCRACIDVCPTQAIVAPQRLDARRCISYLTIEHAGPIPVELRRAIGNRIYGCDDCQLACPWNKFAQPATLADFDARPGLAGQPLAALIGWSEEEFLRRTEGGPIRRIGHERWLRNLAVGLGNALASGAGGDAERRALADRQLHENPLVREHVAWALAQSPCAPAGAADAPLPENG

SEQ ID NO: 82200 - protein, 377 aa, Xylophilus sp.
  REGION 1..377: note = tr|A0A0Q4GPR5|A0A0Q4GPR5_9BURK Epoxyqueuosine reductase OS=Xylophilus sp. Leaf220 OX=1735686 GN=queG; PE = 3 SV=1
MVGSSQQLVSRIREWARELGFSQIGVAGVDLSAAEAGLVAWLAEGFHGSMHYMEAHGLRRARPAELVPGTVSVLTVRMDYLPQGTPAGWQAVEFSRLERPAEGIVSLYARGRDYHKVLRGRLQKLAERIAAEVGPIGHRAFTDSAPVLEAELAARSGQGWRGKHTLVLHREGGSMFFLGEIYLDLALPESTPVSGHCGQCRACIDVCPTQAIVAPQRLDARRCISYLTIEHAGPIPVELRRAIGNRIYGCDDCQLACPWNKFAQPATLVDFDARPGLAGQPLAALIGWSEDEFLRRTEGGPIRRIGHERWLRNLAVGLGNALASGAGGAAERRALAGRQAHDSPLVREHVAWALAQAPEPEPGVPAEAGCAPLQDAG

SEQ ID NO: 82201 - protein, 356 aa, Yangia pacifica
  REGION 1..356: note = tr|A0A2U8HG81|A0A2U8HG81_9RHOB Epoxyqueuosine reductase OS=Yangia pacifica OX=311180 GN=queG PE=3 SV=1
MDDLKARLLGEAAEVGFAACRICRPGDVPQLAERLAAFLEAGYHGQMGWMAERTHWRGNPAALWPEARSVIMLAENYGPEHDPRTVLTQQDRAAISVYAQNRDYHDVVKKKLKRLGRWLIDAAGREAGIEAPQIKVFVDTAPVMEKPLGQAAGLGWQGKHTNLVSRELGSWFFLGAIFTTLELPVDAAERDHCGTCRACLDACPTAAFPAPYRLDARRCISYLTIEHAGPVDEELRGLLGNRIYGCDDCLAACPWNKFAEVASEMKYHARDDLLSPPLAELAALDDAGFRARFSGSPIKRIGRDRFVRNVLYAIGNSGRADLREAAQGLCEDADETVRDAARWAVARLAEAEGAAG

SEQ ID NO: 82202 - protein, 359 aa, Yangia pacifica
  REGION 1..359: note = tr|A0A1I6RHJ1|A0A1I6RHJ1_9RHOB Epoxyqueuosine reductase OS=Yangia pacifica OX=311180 GN=queG PE=3 SV=1
MWKGESLDDLKARLLAEAAEVGFSACRVCRPWDVPQVAERLAAFLEAGHHGQMGWMAERSHWRGNPAALWPEARSVIMLAENYGPAHDPRDVLAERERAAISVYAQNRDYHDVVKKRLKRLGRWLIDAGARAGGGNGEAPQIKVFVDTAPVMEKPLGEAAGLGWQGKHTNLVSRELGSWFFLGSIFTTLELPIDGAERDHCGSCRACLDACPTAAFPAPYRLDARRCISYLTIEHHGPVDEDLRGLMGNRIYGCDDCLAACPWNKFAEVASEVKYHARDDLLSPPLAELAALDDAEFRARFSGSPIKRIGRDRFVRNVLYAIGNSGRAELRGVAQGLCEDADATVRDAARWAVARLQLS

SEQ ID NO: 82203 - protein, 349 aa, Yangia sp.
  REGION 1..349: note = tr|A0A2E1DEI2|A0A2E1DEI2_9RHOB tRNA epoxyqueuosine(34) reductase QueG OS=Yangia sp. OX=2024862; GN = queG PE=4 SV=1
MSLKERLVAEAGATGFAASRVCRPGDVPQAAGRLAAFLDAGRHGQMGWMAERTAWRGNPAALWPEARSVIMLAENYGPEGDPLAVLEQRDRAAISVYAQNRDYHDVVKKKLKRLGRWLLAAAEKELGLAAEIKGFVDTAPVMEKPLGQAAGLGWQGKHTNLVSREIGSWFFLGAIFTTLELAPDGAERDHCGSCRACLDICPTGAFPAPYQLDARRCISYLTIEHGGPVDEELRPLLGNRIYGCDDCLAVCPWNKFAHRAGEAKYHARPELLAPELSELAGLDDAAFRAFFSGSPIKRIGRDRFVRNVCYAIGNSGDAALRPAAQALCDDPDPALRDAARWAVARLDGV

SEQ ID NO: 82204 - protein, 356 aa, Yangia sp.
  REGION 1..356: note = tr|A0A2A3JVP9|A0A2A3JVP9_9RHOB Epoxyqueuosine reductase OS=Yangia sp. SAOS 153D OX=1779329 GN=queG PE=3; SV = 1
MNDLKARLVDEAAEVGFAACRICRPGDVPQVAERLAAFLEAGYHGQMGWMAERTHWRGNPAALWPEARSVIMLAENYGPEQDPRTVLAQRERAAISVYAQNRDYHDVVKKKLKRLGRWLIDAASREAGSEAPQIKVFVDTAPVMEKPLGQAAGLGWQGKHTNLVSRELGSWFFLGAIFTTLELPVDGGERDHCGSCRACLDACPTAAFPAPYRLDARRCISYLTIEHDGPVDTDLRGLLGNRIYGCDDCLAACPWNKFAEVASEVKYHAREDLLSPPLAELAGLDDAGFRARFSGSPIKRIGRNRFVRNVLYAIGNSGRVELRGVAQGLCGDADETVCDAARWAVAQLADAGGAGG

SEQ ID NO: 82205 - protein, 359 aa, Yersinia aldovae
  REGION 1..359: note = tr|A0A0T9UKG9|A0A0T9UKG9_YERAL Epoxyqueuosine reductase OS=Yersinia aldovae OX=29483 GN=queG PE=3 SV=1
MGICDTDLSAEEPRLQAWLDKQYHGEMDWMARHGMLRARPHELLPGTLRVISVRMNYLPAKAAFASTLNNPALGYVSRYALGRDYHKLLRQRLKKLGDMIQNYCLEQAGGDVNFRPFVDSAPIMERSLAAKAGIGWVGKHSLILNRDAGSWFFLGELLIDLPLPVDKVQEEQCGRCVACITTCPTGAIVAPYTVDARRCISYLTIELEGAIPEEFRPLMGNRIYGCDDCQLICPWNRFSQLTDEADFSPRTVLHTPQLLDLFAWNEEKFLRVTEGSAIRRIGHLRWLRNISVALGNAPYLDSIVLALEARLGLNPMLDEHILWSISQQLERRSTLIGDVQSPQKKRLIRAIEKGLPRDA

SEQ ID NO: 82206 - protein, 382 aa, Yersinia bercovieri
  REGION 1..382: note = tr|A0A2G4TYN6|A0A2G4TYN6_YERBE Epoxyqueuosine reductase OS=Yersinia bercovieri OX=634 GN=queG PE=3 SV=1
MAHPLDLNQLAQHIKQWGQSLGFQQVGICDTDLSAEEPRLQAWLDKQYHGEMAWMARHGMLRARPHELLPGTLRVISVRMNYLPAKAAFASTLKDSSLGYVSRYALGRDYHKLLRQRLKKLGDQIQSYCLEQQAINFRPFVDSAPIMERSLAAKAGIGWVGKHSLILNRDAGSWFFLGELLIDLPLPVDKPQEEQCGRCVACMTTCPTGAIVAPYTVDARRCISYLTIELEGAIPEEFRPLMGNRIYGCDDCQLICPWNRFSQLTDEEDFSPRAVLHTPKLLDLFAWNEEKFLRVTEGSAIRRIGHLRWLRNIAVALGNAPYLDTIVLALEARRGIHPMLDEHIDWAISQQLKKRSTLIVDLQSPQKKRLVRAIEKGLPRDA

SEQ ID NO: 82207 - protein, 376 aa, Yersinia enterocolitica
  REGION 1..376: note = tr|A0A0T7NXP8|A0A0T7NXP8_YEREN Epoxyqueuosine reductase OS=Yersinia enterocolitica OX=630 GN=queG PE=3; SV = 1
MNQLAQHIKQWGQSLGFQQVGICDTDLSAEEPRLQAWLDKQYHGEMAWMARHGMLRARPHELLPGTLRVISVRMNYLPAKAAFASTLKDSSLGYVSRYALGRDYHKLLRQRLKKLGDQIQSYCLEQQAINFRPFVDSAPIMERSLAAKAGIGWVGKHSLILNRDAGSWFFLGELLIDLPLPVDKPQEEQCGRCVACMTTCPTGAIVAPYTVDARRCISYLTIELEGAIPEEFRPLMGNRIYGCDDCQLICPWNRFSQLTDEEDFSPRAVLHTPKLLDLFAWNEEKFLRVTEGSAIRRIGHLRWLRNIAVALGNAPYLDTIVLALEARRGIHPMLDEHIDWAISQQLKKRSTLIVDLQSPQKKRLVRAIEKGLPRDA

SEQ ID NO: 82208 - protein, 339 aa, Yersinia enterocolitica
  REGION 1..339: note = tr|F4N117|F4N117_YEREN Putative electron transport protein yjeS (Fragment) OS=Yersinia enterocolitica W22703; OX = 913028 GN=yjeS PE=4 SV=1
KQYHGEMAWMARHGMLRARAHELLPGTLRVISVRMNYLPAKAAFASTLKHSELGYVSRYALGRDYHKLLRQRLKKLGDMIQNYCLEQAAGDVNFRPFVDSAPIMERSLAAKAGIGWIGKHSLILNRDAGSWFFLGELLIDLPLPVDKPQEEQCGRCVACITTCPTGAIVAPYTVDARRCISYLTIELEGAIPEEFRPLMGNRIYGCDDCQLICPWNRFSQLTDEEDFSPRVVLHTPQLLDLFAWNEEKFLRVTEGSAIRRIGHLRWLRNISVALGNAPYLDNIVLALEARRGIDPMLDEHIEWAISQQLKRRSTLIGDVQSPQKKRLVRAIEKGLPRDA

SEQ ID NO: 82209 - protein, 385 aa, Yersinia entomophaga
  REGION 1..385: note = tr|A0A3S6F218|A0A3S6F218_YERET Epoxyqueuosine reductase OS=Yersinia entomophaga OX=935293 GN=queG PE=3; SV = 1
MTHPLDLNQLAQHIKQWGQSLGFQQVGICDTDLSAEEPRLQAWLDKQYHGEMAWMARHGMLRARPHELLPGTLRVISVRMNYLPAKAAFASTLSNPELGYVSRYALGRDYHKLLRQRLKKLGDQIQEYCAQQSSENGVNFRPFVDSAPIMERSLAAKAGIGWVGKHSLILNRESGSWFFLGELLIDLPLPIDQPQEEQCGRCVACMTTCPTGAIVAPYTVDARRCISYLTIELEGAIPEEFRPLMGNRIYGCDDCQLICPWNRFSQLTEEEDFSPRAVLHTPKLLDLFAWNEEKFLRVTEGSAIRRIGHLRWLRNISVALGNAAYQDEIVLALESRKGIDPMLDEHIVWAIERQLARRAEQSVEVQSSQKKRLVRAIEKGLPRDA

SEQ ID NO: 82210 - protein, 333 aa, Yersinia frederiksenii
  REGION 1..333: note = tr|A0A0T9QZ50|A0A0T9QZ50_YERFR Putative iron-sulfur cluster-binding protein OS=Yersinia frederiksenii OX=29484; GN = queG PE=4 SV=1
MAWMARHGMLRARPHELLPGTLRVISVRMNYLPAKAAFASTLNNAELGYVSRYALGRDYHKLLRQRLKRLGDMIQSYCLEQAHGDINFRPFVDSAPIMERSLAAKAGIGWVGKHSLILNRDAGSWFFLGELLIDLPLPIDKPQEEQCGRCVACITTCPTGAIVAPYTVDARRCISYLTIELEGAIPEEFRPLMGNRIYGCDDCQLICPWNRFSQLTDEEDFSPRAVLHTPQLLDLFAWNEEKFLRVTEGSAIRRIGHLRWLRNISVALGNAPYLDSIVLALEARRGIHPMLDEHIEWSISQQLKRRSTLIVDVQSPQKKRLVRAIEKGLPRDA

SEQ ID NO: 82211 - protein, 333 aa, Yersinia frederiksenii
  REGION 1..333: note = tr|A0A0B6FC21|A0A0B6FC21_YERFR Epoxyqueuosine reductase OS=Yersinia frederiksenii Y225 OX=1454377; GN = queG PE=4 SV=1
MAWMARHGMLRARAHELLPGTLRVISVRMNYLPAKAAFASTLKNSELGYISRYALGRDYHKLLRQRLKKLGDMIQNYCLEQAAGDVNFRPFVDSAPIMERSLAAKAGIGWVGKHSLILNREAGSWFFLGELLIDLPLPVDKPQEEQCGRCVACMTTCPTGAIVAPYTVDARRCISYLTIELEGAIPEEFRPLMGNRIYGCDDCQLICPWNRFSQLTDEEDFSPRAVLHTPQLLDLFSWNEEKFLRITEGSAIRRIGHLRWLRNISVALGNAPYLDNVVLALKARRGINPMLDEHIEWAISQQLKRRSTLIGDVQSPQKKRLVRAIEKGLPRDA

SEQ ID NO: 82212 - protein, 384 aa, unidentified
  source 1..384: note = Yersinia hibernica
  REGION 1..384: note = tr|A0A481QA57|A0A481QA57_9GAMM Epoxyqueuosine reductase OS=Yersinia hibernica OX=2339259 GN=queG PE=3; SV = 1
MAHPLFLNQLAQHIKQWGQSLGFQQVGICDTDLSAEEPRLQAWLDKQYHGEMAWMARHGMLRARPHELLPGTLRVISVRMNYLPAKAAFASTLKNAEWGYVSRYALGRDYHKLLRQRLKKLGDMIQNYCLEQSGDHINFRPFVDSAPVMERSLAAKAGIGWVGKHSLILNREAGSWFFLGELLIDLPLPVDKPQEEQCGRCVACITTCPTGAIVAPYTVDARRCISYLTIELEGAIPEEFRPLMGNRIYGCDDCQLICPWNRFSQLTDEEDFSPRAVLHTPQLLDLFAWNEEKFLRVTEGSAIRRIGHLRWLRNISVALGNAPYLDNIVLALEARRGIDAMLDEHIEWAISQQLKRRSTLIGDVQSPQKKRLVRAIEKGLPRDA

SEQ ID NO: 82213 - protein, 384 aa, Yersinia intermedia
  REGION 1..384: note = tr|A0A208ZTW5|A0A208ZTW5_YERIN Epoxyqueuosine reductase OS=Yersinia intermedia OX=631 GN=queG PE=3 SV=1
MAHPLDLNQLAQHIKQWGQSLGFQQVGICDTDLSAEEPRLQTWLDKQYHGEMAWMARHGMLRARPHELLPGTLRVISVRMNYLPAKAAFASTLNNAELGYVSRYALGRDYHKLLRQRLKRLGDMIQSYCLEQAHGDINFRPFVDSAPIMERSLAAKAGIGWVGKHSLILNRDAGSWFFLGELLIDLPLPIDKPQEEQCGRCVACITTCPTGAIVAPYTVDARRCISYLTIELEGAIPEEFRPLMGNRIYGCDDCQLICPWNRFSQLTDEEDFSPRAVLHTPQLLDLFAWNEEKFLRVTEGSAIRRIGHLRWLRNISVALGNAPYLDSIVLALEARRGIHPMLDEHIEWSISQQLKRRSTLIVDVQSPQKKRLVRAIEKGLPRDA

SEQ ID NO: 82214 - protein, 360 aa, Yersinia intermedia
  REGION 1..360: note = tr|A0A0U1EWH0|A0A0U1EWH0_YERIN Iron-sulfur cluster-binding protein OS=Yersinia intermedia OX=631; GN = queG PE=4 SV=1
MAWMARHGMLRARPHELLPGTLRVISVRMNYLPAKAAFASTLNNPELGYVSRYALGRDYHKLLRQRLKKLGDQIQHYCLEQNNLDRHDLELHDLEQHDSERQGQPEQHTASEINFRPFVDSAPIMERSLAAKAGIGWVGKHSLILNRDAGSWFFLGELLIDLPLPVDKPQEEQCGRCVACMTTCPTGAIVAPYTVDARRCISYLTIELEGAIPEEFRPLMGNRIYGCDDCQLICPWNRFSQLTDEDDFSPRAVLHTPQLLDLFAWNEEKFLRVTEGSAIRRIGHLRWLRNISVALGNAPYLDSIVLALETRRGLHPMLDEHIEWAISQQLARRATQAVEVQLPQKKRLIRAIEKGLPRDA

SEQ ID NO: 82215 - protein, 333 aa, Yersinia kristensenii
  REGION 1..333: note = tr|A0A0T9LTJ3|A0A0T9LTJ3_YERKR Putative iron-sulfur cluster-binding protein OS=Yersinia kristensenii OX=28152; GN = queG PE=4 SV=1
MAWMARHGMLRARPHELLPGTLRVISVRMNYLPAKAAFASTLKNAELGYVSRYALGRDYHKLLRQRLKKLGDMIQNYCLEQTGDDINFRPFVDSAPIMERSLAAKAGIGWVGKHSLILNREAGSWFFLGELLIDLPLPIDKPQEEQCGRCVACITTCPTGAIVAPYTVDARRCISYLTIELEGAIPEEFRPLMGNRIYGCDDCQLICPWNRFSQLTDEEDFSPRAVLHTPQLLDLFSWNEEKFLRITEGSAIRRIGHLRWLRNISVALGNAPYLDNIVLALEARRGIDPMLDEHIEWAISQQLKRRSTLIGDVQSPQKKRLVRAIEKGLPRDA

SEQ ID NO: 82216 - protein, 376 aa, Yersinia kristensenii
  REGION 1..376: note = tr|A0A0T9T3J4|A0A0T9T3J4_YERKR Epoxyqueuosine reductase OS=Yersinia kristensenii OX=28152 GN=queG PE=3; SV = 1
MNQLAQHIKQWGQSLGFQQVGICDTDLSAEEPRLQAWLDKQYHGEMAWMARHGMLRARPHELLPGTLRVISVRMNYLPAKAAFASTLKDSSLGYVSRYALGRDYHKLLRQRLKKLGDQIQSYCLEQQAINFRPFVDSAPIMERSLAAKAGIGWVGKHSLILNRDAGSWFFLGELLIDLPLPVDKPQEEQCGRCVACITTCPTGAIVAPYTVDARRCISYLTIELEGAIPEEFRPLMGNRIYGCDDCQLICPWNRFSQLTDEEDFSPRAVLHTPELLDLFAWNEEKFLRVTEGSAIRRIGHLRWLRNISVALGNAPYLDTIVLALEARRGMHPMLDEHIDWAISQQLKRRSTLIVDVQSPQKKRLVRAIEKGLPRDA

SEQ ID NO: 82217 - protein, 376 aa, Yersinia massiliensis
  REGION 1..376: note = tr|A0A0T9NY82|A0A0T9NY82_9GAMM Epoxyqueuosine reductase OS=Yersinia massiliensis OX=419257 GN=queG PE=3; SV = 1
MNQLAQHIKQWGQSLGFQQVGICDTDLSAEEPRLQAWLDKQYHGEMAWMARHGMLRARPHELLPGTLRVISVRMNYLPAKAAFASTLKDSSLGYVSRYALGRDYHKLLRQRLKKLGDQIQNYCLEQQAINFRPFVDSAPIMERSLAAKAGIGWVGKHSLILNRDAGSWFFLGELLIDLPLPVDKPQEEQCGRCVACITTCPTGAIVAPYTVDARRCISYLTIELEGAIPEEFRPLMGNRIYGCDDCQLICPWNRFSQLTDEEDFSPRKVLHTPDLLDLFAWNEEKFLRVTEGSAIRRIGHLRWLRNISVALGNAPYLDSIVLALEARRGIHPMLDEHINWAISQQLERRSTLIVDVQSPQKKRLVRAIEKGLPRDA

SEQ ID NO: 82218 - protein, 382 aa, Yersinia massiliensis
  REGION 1..382: note = tr|A0A2R4NUK6|A0A2R4NUK6_9GAMM Epoxyqueuosine reductase OS=Yersinia massiliensis OX=419257 GN=queG PE=3; SV = 1
MAHPLDLNQLAQHIKQWGQSLGFQQVGICDTDLSAEEPRLQAWLDKQYHGEMAWMARHGMLRARPHELLPGTLRVISVRMNYLPAKAAFASTLKDSSLAYVSRYALGRDYHKLLRQRLKKLGDQIQNYCLEQQAINFRPFVDSAPIMERSLAAKAGIGWVGKHSLILNRDAGSWFFLGELLIDLPLPVDKPQEEQCGRCVACITTCPTGAIVAPYTVDARRCISYLTIELEGAIPEEFRPLMGNRIYGCDDCQLICPWNRFSQLTDEEDFSPRKVLHTPDLLDLFAWNEEKFLRVTEGSAIRRIGHLRWLRNISVALGNAPYLDSIVLALEARRGIHPMLDEHINWAISQQLKRRSTLIVDVQSPQKKRLVRAIEKGLPRDA

SEQ ID NO: 82219 - protein, 376 aa, Yersinia mollaretii
  REGION 1..376: note = tr|A0A0U1I0Z9|A0A0U1I0Z9_YERMO Epoxyqueuosine reductase OS=Yersinia mollaretii OX=33060 GN=queG PE=3 SV=1
MNQLAQHIKQWGQSLGFQQVGICDTNLSAEEPRLQAWLDKQYHGEMAWMARHGMLRARPHELLPGTLRVISVRMNYLPAKAAFASTLKDSSLGYVSRYALGRDYHKLLRQRLKKLGDQIQSYCLEQQAINFRPFVDSAPIMERSLAAKAGIGWVGKHSLILNRDAGSWFFLGELLIDLPLPVDKPQEEQCGRCVACITTCPTGAIVAPYTVDARRCISYLTIELEGAIPEEFRPLMGNRIYGCDDCQLICPWNRFSQLTDEEDFSPRAVLHTPELLDLFAWNEEKFLRVTEGSAIRRIGHLRWLRNISVALGNAPYLDTIVLALEARRGIDPMLDEHIDWAISQQLKRRSTLIVDVQSPQKKRLVRAIEKGLPRDA

SEQ ID NO: 82220 - protein, 382 aa, Yersinia mollaretii
  REGION 1..382: note = tr|C4SDL6|C4SDL6_YERMW Epoxyqueuosine reductase; OS = Yersinia mollaretii (strain ATCC 43969 / DSM 18520 / CIP 103324 / CNY 7263 / WAIP 204) OX=349967 GN=queG PE=3; SV = 1
MAHPLDLNQLAQHIKQWGQSLGFQQVGICDTDLSAEEPRLQAWLDKQYHGEMAWMARHGMLRARPHELLPGTLRVISVRMNYLPAKAAFASTLKDSSLGYVSRYALGRDYHKLLRQRLKKLGDQIQSYCLEQQAINFRPFVDSAPIMERSLAAKAGIGWVGKHSLILNRDAGSWFFLGELLIDLPLPVDKPQEEQCGRCVACITTCPTGAIVAPYTVDARRCISYLTIELEGAIPEEFRPLMGNRIYGCDDCQLICPWNRFSQLTDEEDFSPRAVLHTPELLDLFAWNEEKFLRVTEGSAIRRIGHLRWLRNISVALGNAPYLDTIVLALEARRGIDPMLDEHIDWAISQQLKRRSTLIVDVQSPQKKRLVRAIEKGLPRDA

SEQ ID NO: 82221 - protein, 326 aa, Yersinia nurmii
  REGION 1..326: note = tr|A0A0T9LBZ1|A0A0T9LBZ1_9GAMM Iron-sulfur cluster-binding protein OS=Yersinia nurmii OX=685706; GN = queG PE=4 SV=1
MLRARPHELLPGTLRVISVRMNYLPAKAAFASTLSNPELGYVSRYALGRDYHKLLRQRLKKLGDQIQEYCAQQSSENGVNFRPFVDSAPIMERSLAAKAGIGWVGKHSLILNRESGSWFFLGELLIDLPLPIDQPQEEQCGRCVACMTTCPTGAIVAPYTVDARRCISYLTIELEGAIPEEFRPLMGNRIYGCDDCQLICPWNRFSQLTDEEDFSPRAILHTPKLLDLFAWNEEKFLRVTEGSAIRRIGHLRWLRNISVALGNAAYQDEIVLALESRKGIDPMLDEHIAWAIDRQLARRAEQSVEVQLSQKKRLIRAIEKGLPRDA

SEQ ID NO: 82222 - protein, 395 aa, Yersinia pekkanenii
  REGION 1..395: note = tr|A0A0T9Q143|A0A0T9Q143_9GAMM Epoxyqueuosine reductase OS=Yersinia pekkanenii OX=1288385 GN=queG PE=3; SV = 1
MANPLDLNQLAQHIKQWGQSLGFQQVGICDTDLSAEEPRLQAWLDKQYHGEMAWMARHGMLRARPHELLPGTLRVISVRMNYLPAKAAFASTLKNSALGYVSRYALGRDYHKLLRQRLKRLGEQIQSYCLEQQQNQQGQTEQPTSQAINFRPFVDSAPIMERSLAAKAGIGWVGKHSLILNREAGSWFFLGELLIDLPLPVDKPQAEQCGRCVACITTCPTGAIVAPYTVDARRCISYLTIELEGAIPEEFRSLMGNRIYGCDDCQLICPWNRFSQLTDETDFSPRAVLHTPQLLDLFSWNEEKFLRITEGSAIRRIGHLRWLRNISVALGNAPYLDTIVLALEARRGIHPMLDEHIAWAISQQLERRSTLTVDVQSPQKKRLVRAIEKGLPRDA

SEQ ID NO: 82223 - protein, 411 aa, Yersinia pestis
  REGION 1..411: note = sp|Q7CKM4|QUEG_YERPE Epoxyqueuosine reductase; OS = Yersinia pestis OX=632 GN=queG PE=3 SV=1
MAHPLDLNQLAQHIKQWGQSLGFQQVGICDTDLTAEEPRLQAWLDKQYHGEMAWMARHGMLRARPHELLPGTLRVISVRMNYLPAKAAFASTLNNPELGYVSRYALGRDYHKLLRQRLKKLGDQIQHYCLEQNNLDRHDLELHDLEQHDSERQGQPEQHTASEINFRPFVDSAPIMERSLAAKAGIGWVGKHSLILNRDAGSWFFLGELLIDLPLPVDKPQEEQCGRCVACMTTCPTGAIVAPYTVDARRCISYLTIELEGAIPEEFRPLMGNRIYGCDDCQLICPWNRFSQLTDEDDFSPRAVLHTPQLLDLFAWNEEKFLRVTEGSAIRRIGHLRWLRNISVALGNAPYLDSIVLALETRRGLHPMLDEHIEWAISQQLARRATQAVEVQLPQKKRLIRAIEKGLPRDA

SEQ ID NO: 82224 - protein, 411 aa, Yersinia pestis; identical to SEQ ID NO: 82223
  REGION 1..411: note = tr|A0A0H2YM74|A0A0H2YM74_YERPN Epoxyqueuosine reductase OS=Yersinia pestis bv. Antiqua (strain Nepal516); OX = 377628 GN=queG PE=3 SV=1

SEQ ID NO: 82225 - protein, 359 aa, Yersinia pseudotuberculosis
  REGION 1..359: note = tr|A0A0T9MB36|A0A0T9MB36_YERPU Iron-sulfur cluster-binding protein OS=Yersinia pseudotuberculosis; OX = 633 GN=queG PE=4 SV=1
MLRARPHELLPGTLRVISVRMNYLPAKAAFASTLNNPELGYVSRYALGRDYHKLLRQRLKKLGDQIQHYCLEQYRLEQHGLEQHGLEQHDLAQQDDCPEQQGQSEQHTTGEINFRPFVDSAPIMERSLAAKAGLGWVGKHSLILNRDAGSWFFLGELLIDLPLPVDKPQEEQCGRCVACMTTCPTGAIVAPYTVDARRCISYLTIELEGAIPEEFRPLMGNRIYGCDDCQLICPWNRFSQLTDEEDFSPRAVLHTPQLLDLFAWNEEKFLRVTEGSAIRRIGHLRWLRNISVALGNAPYLDSIVLALETRRGQHPMLDEHIEWAISQQLARRAAQAVEVQLPQKKRLIRAIEKGLPRDA

SEQ ID NO: 82226 - protein, 379 aa, Yersinia pseudotuberculosis
  REGION 1..379: note = tr|A0A0H3B8J8|A0A0H3B8J8_YERPY Epoxyqueuosine reductase OS=Yersinia pseudotuberculosis serotype O:3 (strain YPIII) OX=502800 GN=queG PE=3 SV=1
MTAEEPRLQAWLDKQYHGEMAWMARHGMLRARPHELLPGTLRVISVRMNYLPAKAAFASTLNNPELGYVSRYALGRDYHKLLRQRLKKLGDQIQHYCLEQNNLDRHDLELHDLEQHDSERQGQPEQHTASEINFRPFVDSAPIMERSLAAKAGIGWVGKHSLILNRDAGSWFFLGELLIDLPLPVDKPQEEQCGRCVACMTTCPTGAIVAPYTVDARRCISYLTIELEGAIPEEFRPLMGNRIYGCDDCQLICPWNRFSQLTDEDDFSPRAVLHTPQLLDLFAWNEEKFLRVTEGSAIRRIGHLRWLRNISVALGNAPYLDSIVLALETRRGLHPMLDEHIEWAISQQLARRATQAVEVQLPQKKRLIRAIEKGLPRDA

SEQ ID NO: 82227 - protein, 415 aa, Yersinia rohdei
  REGION 1..415: note = tr|A0A0U1HRK3|A0A0U1HRK3_YERRO Epoxyqueuosine reductase OS=Yersinia rohdei OX=29485 GN=queG PE=3 SV=1
MASFWRTQSAEKTECGKLTPICFLLWSVMAHPLDLNQLAQHIKQWGQSLGFQQVGICDTDLTAEEPRLQAWLDKQYHGEMAWMARHGMLRARAHELLPGTLRVISVRMNYLPAKAAFASTLKDSELGYVSRYALGRDYHKLLRQRLKKLGDQIQSYCLEQEPSAANEINFRPFVDSAPIMERSLAAKAGIGWVGKHSLILNRDAGSWFFLGELLIDLPLPVDKPQAEQCGRCVACITTCPTGAIVAPYTVDARRCISYLTIELEGAIPEELRPLMGNRIYGCDDCQLICPWNRFSQLTDEEDFSPRAVLHTPQLLDLFAWNEEKFLRITEGSAIRRIGHLRWLRNISVALGNAPYLDRIVLALEARRGIHPMLDEHIEWAISQQLSRRATLIGDIQTPQKKRLVRAIEKGLPRDA

SEQ ID NO: 82228 - protein, 342 aa, Yersinia ruckeri
  REGION 1..342: note = tr|A0A380QQW8|A0A380QQW8_YERRU Epoxyqueuosine reductase OS=Yersinia ruckeri OX=29486 GN=queG PE=3 SV=1
MDKQYHGEMAWMARHGMLRARPHELLPGTLRVISVRMNYLPAKAAFASTLSNPDLGYVSRYALGRDYHKLLRQRLKKLGDKIQGYCAEISSETGVNFRPFVDSAPIMERSLAAKAGIGWVGKHSLILNRDSGSWFFLGELLIDLPLPVDPPQEEQCGRCVACMTTCPTAAIVAPYTVDARRCISYLTIELEGAIPEEFRPLMGNRIYGCDDCQLICPWNRFSQLTDEEDFSPRAILHTPKLLDLFAWNEEKFLRVTEGSAIRRIGHLRWLRNISVALGNAAYQDEIVLALESRKGIDPMLDEHISWAVSQQLARRAEQGVEVQSSQKKRLVRAIEKGLPRDA

SEQ ID NO: 82229 - protein, 385 aa, Yersinia ruckeri
  REGION 1..385: note = tr|A0A0A8V8W6|A0A0A8V8W6_YERRU Epoxyqueuosine reductase OS=Yersinia ruckeri OX=29486 GN=queG PE=3 SV=1
MTHPLDLNQLAQHIKQWGQSLGFQQVGICDTDLSQEEPRLQAWLDKQYHGEMAWMARHGMLRARPHELLPGTLRVISVRMNYLPAKAAFASTLSNPDLGYVSRYALGRDYHKLLRQRLKKLGDKIQGYCAEISSETGVNFRPFVDSAPIMERSLAAKAGIGWVGKHSLILNRDSGSWFFLGELLIDLPLPVDPPQEEQCGRCVACMTTCPTAAIVAPYTVDARRCISYLTIELEGAIPEEFRPLMGNRIYGCDDCQLICPWNRFSQLTDEEDFSPRAILHTPKLLDLFAWNEEKFLRVTEGSAIRRIGHLRWLRNISVALGNAAYQDEIVLALESRKGIDPMLDEHISWAVSQQLARRAEQGVEVQSSQKKRLVRAIEKGLPRDA

SEQ ID NO: 82230 - protein, 354 aa, Yersinia similis
  REGION 1..354: note = tr|A0A0T9P6D7|A0A0T9P6D7_9GAMM Iron-sulfur cluster-binding protein OS=Yersinia similis OX=367190; GN = queG PE=4 SV=1
MLRARPHELLPGTLRVISVRMNYLPAKAAFASTLNNPELGYVSRYALGRDYHKLLRQRLKKLGDQIQHYCLEQYRLEQHGLEQHDLAQQDDCPEQQGQSEQHTTGEINFRPFVDSAPIMERSLAAKAGLGWVGKHSLILNRDAGSWFFLGELLIDLPLPVDKPQEEQCGRCVACMTTCPTGAIVAPYTVDARRCISYLTIELEGAIPEEFRPLMGNRIYGCDDCQLICPWNRFSQLTDEEDFSPRAVLHTPQLLDLFAWNEEKFLRVTEGSAIRRIGHLRWLRNISVALGNAPYLDSIVLALETRRGQHPMLDEHIEWAISQQLARRAAQAVEVQLPQKKRLIRAIEKGLPRDA

SEQ ID NO: 82231 - protein, 379 aa, unidentified
  source 1..379: note = Yersinia wautersii
  REGION 1..379: note = tr|A0A0E8XJD3|A0A0E8XJD3_9GAMM Epoxyqueuosine reductase OS=Yersinia wautersii OX=1341643 GN=queG PE=3; SV = 1
MTAEEPRLQAWLDKQYHGEMAWMARHGMLRARPHELLPGTLRVISVRMNYLPAKAAFASTLNNPELGYVSRYALGRDYHKLLRQRLKKLGDQIQHYCLEQNKLDRHDLELHDLEQHDSERQGQPEQHTASEINFRPFVDSAPIMERSLAAKAGIGWVGKHSLILNRDAGSWFFLGELLIDLPLPVDKPQEEQCGRCVACMTTCPTGAIVAPYTVDARRCISYLTIELEGAIPEEFRPLMGNRIYGCDDCQLICPWNRFSQLTDEDDFSPRAVLHTPQLLDLFAWNEEKFLRVTEGSAIRRIGHLRWLRNISVALGNAPYLDSIVLALETRRGLHPMLDEHIEWAISQQLARRATQAVEVQLPQKKRLIRAIEKGLPRDA

SEQ ID NO: 82232 - protein, 384 aa, unidentified
  source 1..384: note = Yersiniaceae bacterium
  REGION 1..384: note = tr|A0A2N5E5B6|A0A2N5E5B6_9GAMM Epoxyqueuosine reductase OS=Yersiniaceae bacterium 2015Iso6 OX=2060067; GN = queG PE=3 SV=1
MTFPLDLHQLSQHIKQWGQSLGFQQVGICDTDLSLEEPKLQAWLDKQYHGEMAWMARHGMLRARPHELLPGTLRVISVRMNYLPAKAAFASTLKNPSLGYVSRYALGRDYHKLLRQRLKKLGDQIQAWCTEQGGGEVGFRPFVDSAPIMERPLAAKAGIGWVGKHSLILNREAGSWFFLGELLIDLPLPVDSPQEEQCGKCVACMTTCPTGAIVAPYTVDARRCISYLTIELEGTIPEEFRPLMGNRIYGCDDCQLICPWNRFSQLTDEEDFSPRAALHAPELLALFAWDEEKFLRVTEGSAIRRIGHVRWLRNVSVALGNAAYQAEIVLALQQRLGQDAMLDEHIHWAIDQQLMKREAMKIDVQLPQQKRLVRAVEKGLPRDA

SEQ ID NO: 82233 - protein, 384 aa, unidentified
  source 1..384: note = Yersiniaceae bacterium
  REGION 1..384: note = tr|A0A2N5E017|A0A2N5E017_9GAMM Epoxyqueuosine reductase OS=Yersiniaceae bacterium 2016Iso4 OX=2060068; GN = queG PE=3 SV=1
MTFPLDLHQLSQHIKQWGQSLGFQQVGICDTDLSLEEPKLQAWLDKQYHGEMAWMARHGMLRARPHELLPGTLRVISVRMNYLPAKAAFASTLKNPSLGYVSRYALGRDYHKLLRQRLKKLGDQIQAWCTEQGGGEVGFRPFVDSAPIMERPLAAKAGIGWVGKHSLILNREAGSWFFLGELLIDLPLPVDSPQEEQCGKCVACMTTCPTGAIVAPYTVDARRCISYLTIELEGAIPEEFRPLMGNRIYGCDDCQLICPWNRFSQLTDEEDFSPRAALHAPELLALFAWDEEKFLRVTEGSAIRRIGHLRWLRNVSVALGNAAYQAEIVLALQQRLGQDAMLDEHIHWAIAQQLMKREAMKVDVQLPQQKRLVRAVEKGLPRDA

SEQ ID NO: 82234 - protein, 379 aa, Yokenella regensburgei
  REGION 1..379: note = tr|A0A2X2SZW1|A0A2X2SZW1_9ENTR Epoxyqueuosine reductase OS=Yokenella regensburgei OX=158877 GN=queG PE=3; SV = 1
MSQPLDLNQLAQQIKQWGTELGFQQVGITDTDLSASEPEFQAWLDKQYHGEMEWMVRHGMMRARPHELLPGTLRVISVRMNYLPANAAFASTLKNPALGYVSRYALGRDYHKLLRNRLKKLGEMIQEQCASLNFRPFVDSAPVLERPLAEKAGLGWTGKHSLILSRDAGSFFSLGELLVNIPLPVDNPVEEGCGRCVACMTICPTGAIVEPYTVDARRCISYLTIELEGAIPEEFRPLMGNRIYGCDDCQLICPWNRYSQLTDEDDFSPRKALHAPELITLFAWDEAWFLKVTEGSAIRRIGHLRWLRNIAVALGNAPWDEANIRALESRRGEHPLLDEHIEWAIAQQIDKRNACVVEVQLPQKQRLVRVVEKGLPRDA

SEQ ID NO: 82235 - protein, 379 aa, Yokenella regensburgei
  REGION 1..379: note = tr|G9YYG8|G9YYG8_9ENTR Epoxyqueuosine reductase; OS = Yokenella regensburgei ATCC 43003 OX=1002368 GN=queG; PE = 3 SV=1
MSQPLDLNQLAQQIKQWGTELGFQQVGITDTDLSASEPEFQAWLDKQYHGEMEWMARHGMMRARPHELLPGTLRVISVRMNYLPANAAFASTLKNPALGYVSRYALGRDYHKLLRNRLKKLGEMIQEQCASLNFRPFVDSAPVLERPLAEKAGLGWTGKHSLILSRDAGSFFFLGELLVNIPLPVDNPVEEGCGRCVACMTICPTGAIVEPYTVDARRCISYLTIELEGAIPEEFRPLMGNRIYGCDDCQLICPWNRYSQLTDEDDFSPRKALHAPELITLFAWDEAWFLKVTEGSAIRRIGHLRWLRNIAVALGNAPWDEANIRALESRRGEHPLLDEHIEWAIAQQIDKRNACVVEVQLPQKQRLVRVVEKGLPRDA

SEQ ID NO: 82236 - protein, 354 aa, unidentified
  source 1..354: note = Yoonia litorea
  REGION 1..354: note = tr|A0A1I6MUY9|A0A1I6MUY9_9RHOB Epoxyqueuosine reductase OS=Yoonia litorea OX=1123755 GN=queG PE=3 SV=1
MDRLKDRLQEEALAAGFAAMGVCRPDAVPELPARLQAFVGAGMHGQMGWMAERMNWRANPAALWPEARSVIMLAEIYTPEHDPLAVLEETDRAAISVYAQNKDYHDVVKKRLKKVGRWLIDQVEGAEIKVFVDTAPVMEKPLAQAAGLGWQGKHTNLLSRDLGNWFFLGAIFTTVELDPDRGETSHCGSCTACLDICPTDAFPAPYKLDARRCISYLTIEHKGPVDESLRPLMGNRIYGCDDCLAVCPWNKFAVTGRDARLAARDDLVAPPLADLATLDDAAFRAKFSGSPIKRIGRDRFVRNVAYAIGNSGDPALLTAVSPLLEDQDATVADAARWAISRIKEIANVETDDRT

SEQ ID NO: 82237 - protein, 342 aa, unidentified
  source 1..342: note = Yoonia maricola
  REGION 1..342: note = tr|A0A2M8W0Q8|A0A2M8W0Q8_9RHOB Epoxyqueuosine reductase OS=Yoonia maricola OX=420999 GN=queG PE=3 SV=1
MKDRLIAFAKEAGFASVGVCRPDAVPELPERLQAFVDAGMHGQMGWMAERMNWRSDPAALWPAARSVVMLAEPYTPEHDPLAVLEEHDVGAISVYAQNRDYHDVVKKRLKRVGRWLIEQEPGAEIKVFVDTAPVMEKPLAQAAGLGWQGKHTNLLSRDLGNWFFLGAIFTTVDLAPDEVEVSHCGSCTACLDICPTAAFPAPYQLDARRCISYLTIEHKGPVDEELRPLMGNRIYGCDDCLAICPWNKFAHEGRDAKLAARDDLVAPPLAKLAALDDAAFRTLFSGSPIKRIGRDRFVRNVAYAIGNSGDRALAAAVSPLVDDSDPAVADAARWAILRLKED

SEQ ID NO: 82238 - protein, 344 aa, unidentified
  source 1..344: note = Yoonia maritima
  REGION 1..344: note = tr|A0A2T0VZ82|A0A2T0VZ82_9RHOB Epoxyqueuosine reductase OS=Yoonia maritima OX=1435347 GN=queG PE=3 SV=1
MVTYVQEAGFAKVGICRPDSVPEIADRLATFVDAGMHGQMEWMAERMHWRGNPAALWPEAKSVIMLAEPYTPEHDPLEVLDHPDRAAISVYAQGRDYHDVVKKRLKRVGRWLIEQVPEAQIKVFVDTAPVMEKPLAQAAGLGWQGKHTNVLGRDLGSWFFIGAIFTTVEFEPDTPEVSHCGSCTACLDVCPTSAFPAPYQLDARRCISYLTIEHKGPVDLELRALMGNRIYGCDDCLGVCPWNKFANTGRDAKYAAREDLIAPPLSELAALDDAAFRARFSGSPIKRIGRDRFVRNVAYAIGNSGDRTLAGAVARLIGDSDPTVAEAARWALDRLGSSAARSSE

SEQ ID NO: 82239 - protein, 348 aa, unidentified
  source 1..348: note = Yoonia rosea
  REGION 1..348: note = tr|A0A1R3XBK7|A0A1R3XBK7_9RHOB Epoxyqueuosine reductase OS=Yoonia rosea OX=287098 GN=queG PE=3 SV=1
MQETGDLKQRLIGFAQEAGFAAVGVCRPDAVPELPERLQAFVAAGMHGQMGWMAERMAWRADPTALWPAARSVIMLAEPYTPAHDPLAVLEERDRAAISVYAQNRDYHDVVKKRLKRVGRWLIEAVPEAEIKVFVDTAPVMEKPLAQAAGLGWQGKHTNLLSRDLGNWFFLGAIFTTVDLASDVAETSHCGSCTACLDICPTGAFPAPYRLDARRCISYLTIEHKGPVDAALRPLMGNRIYGCDDCLAVCPWNKFAHEGRDAKLAARDELISPPLADLAGLDDAGFRALFSGSPIKRIGRDRFVRNVAYAIGNSGDQTLIATVSPLVDDLDAAVADAARWAISRLKED

SEQ ID NO: 82240 - protein, 342 aa, unidentified
  source 1..342: note = Yoonia sediminilitoris
  REGION 1..342: note = tr|A0A2T6KLC4|A0A2T6KLC4_9RHOB Epoxyqueuosine reductase OS=Yoonia sediminilitoris OX=1286148 GN=queG; PE = 3 SV=1
MKARLTEFALDAGFAKVGVCRPESVPELAERLAAFVDAGMHGQMAWMAERMHWRGSPATLWPEAKSVVMLAEPYTPDHDPLAVLECHDRAAVSVYAQGRDYHDVVKKRLKRVGRWLIEQVPDAQIKVFVDTAPVMEKPLAQAAGLGWQGKHTNLLGRDLGSWFFLGAIFTTVDLEPDRPEQSHCGSCTACLDICPTAAFPAPYRLDARRCISYLTIEHKGPVDLELRALMGNRIYGCDDCLAVCPWNKFAQQGRDARYDARPDLVAPPLAALAALDDAGFRARFSGSPIKRIGRNRFVRNVAYAIGNSGDPTLIAALSPLVDDPDPAVADAARWAILRLKEA

SEQ ID NO: 82241 - protein, 348 aa, unidentified
  source 1..348: note = Yoonia tamlensis
  REGION 1..348: note = tr|A0A1I6HDI5|A0A1I6HDI5_9RHOB Epoxyqueuosine reductase OS=Yoonia tamlensis OX=390270 GN=queG PE=3 SV=1
MKQRLITYAQEAGFAKVGICRPDAVPQIAERLAAFVDAGMHGQMGWMAERMHWRGNPAALWPEAKSVIMLAEPYTPEHDPLAVLEQPDRAAISVYAQGRDYHDIVKKRLKNVGRWLIAQVPDAQIKVFVDTAPVMEKPLAQAAGLGWQGKHTNVLGRDLGSWFFLGAIFTTAELEPDSAEVSHCGSCTACLDICPTAAFPAPYQLDPRRCISYLTIEHKGPVDAELRGLMGNRIYGCDDCLAVCPWNKFAREGRDARYAAREDLIAPPLAALAALDDTAFRAQFSGSPIKRIGRDRFVRNVAYAIGNSGDASLAAAVAPLVDDPDLAVADAARWALDRLGGVAAHGCE

SEQ ID NO: 82242 - protein, 344 aa, unidentified
  source 1..344: note = Yoonia vestfoldensis
  REGION 1..344: note = tr|A0A1Y0EH71|A0A1Y0EH71_9RHOB Epoxyqueuosine reductase OS=Yoonia vestfoldensis OX=245188 GN=queG PE=3; SV = 1
MKERLTAFARDAGFGKVGVCRPDAVPEMAERLAAFVDDGRHGQMAWMAERMGWRGDPTALWPAARSVIMLAEVYTPDHDPLAVLEARDRAAISVYAQGRDYHDVVKKRLKVVGRWLIDQVPGAEIKVFVDTAPVMEKPLAQAAGLGWQGKHTNLLGRDLGNWVFLGAIFTTVDLEPDTPEISHCGSCTACLDICPTQAFPAPYQLDARRCISYLTIEHKGPVDLDLRALMGNRIYGCDDCLAVCPWNKFAASGRDARLAARDDLLAPPLAELAQLDDAAFRARFAGSPIKRIGRDRFVRNVAYALGNSGDPAMVAPLSHLVDDPDPAVADAARWAILRLNADAP

SEQ ID NO: 82243 - protein, 343 aa, unidentified
  source 1..343: note = Yoonia vestfoldensis
  REGION 1..343: note = tr|A3V1N7|A3V1N7_9RHOB Epoxyqueuosine reductase; OS = Yoonia vestfoldensis SKA53 OX=314232 GN=queG PE=3 SV=1
MKDRLKDFALEAGFAKIGICRPDAVPEMAERLATFVADGRHGQMAWMADRMQWRGDPTALWPAARSVIMLAEVYTPDHDPLAVLDERDRAAISVYAQGRDYHDVVKKRLKVVGRWLIDQVPEAEIKVFVDTAPVMEKPLAQAAGLGWQGKHTNLLGRDLGNWVFLGAIFTTVVLEPDTPEISHCGSCTACLDICPTQAFPAPYQLDARRCISYLTIEHKGPVDPDLRGLMGNRIYGCDDCLAVCPWNKFAASGRDARLAARDDLLAPPLAELAQLDDAAFRARFAGSPIKRIGRDRFVRNVAYALGNSGDPAMAAHLSHLVDDPDATVADAARWAVLRLQRAG

SEQ ID NO: 82244 - protein, 375 aa, unidentified
  source 1..375: note = Youhaiella tibetensis
  REGION 1..375: note = tr|A0A5B9DIE7|A0A5B9DIE7_9RHIZ Epoxyqueuosine reductase OS=Youhaiella tibetensis OX=1447062 GN=queG PE=3; SV = 1
MADLVSELRQRASALGFDAFGIAAAEARPDLSEKLQAALAAGWHGDMDWMAETADRRASPVALWPEARSVIMIGVNYGPDSDPMAALARRSSGNISVYARNRDYHDIIKGRLKELAGLLSRRTGEAVKVFVDTAPVMEKPLAQAAGLGWQGKHTVLVSRQFGSWLFLGAIFTSAQLPASEPMAESCGSCRRCLDVCPTDAFPAPFQLDARRCLAYLNIEHKGPIPAEFRKAMGNRIYGCDDCLAVCPWNKFASETREAKLFAREDLREPPLSVLLALDDAGFRALFSGSPIKRIGHGRFLRNVLIAAGNSGDRALLEAVEARLEDEDALVRGAAVWAFAQLADGERVRRSAEAHAAGERDAEVRAEWAAVLPEVV

SEQ ID NO: 82245 - protein, 326 aa, unidentified
  source 1..326: note = Youngiibacter fragilis
  REGION 1..326: note = tr|V7I2W8|V7I2W8_9CLOT (Fe-S)-binding protein; OS = Youngiibacter fragilis 232.1 OX=994573 GN=T472_0215760; PE = 4 SV=1
MKELHDRIRKLGIEHYGFVKARRLEGSREYFLEREKRKLSTTFEESDADLRTDLTLGMPWVRTVISLAIPYYYDSYISKGAYFSLYSQGKDYHAVVRGMLSEVSAVLSANGFRSEVFCDDNALPERLIAHMAGTGSIGRNHLLITRKYGSYVFLGEILTDWETEADERDPEDALKHTICGECDICQRACPTSILHGEYYDTSRCMSYITQDKKVKDEDIDLFRGRLFGCDTCQRVCPLNKFAERSHVSLFQPLPYMRDPDLNEIMAMDNKTFNKYRETSSGWRGKKLLKRNAMIALASKGMEIREEYADTEYLKDMRERLLKRYNL

SEQ ID NO: 82246 - protein, 341 aa, unidentified
  source 1..341: note = Youngimonas vesicularis
  REGION 1..341: note = tr|A0A4S3M9N9|A0A4S3M9N9_9RHOB tRNA epoxyqueuosine(34) reductase QueG OS=Youngimonas vesicularis OX=1294297 GN=queG PE=4 SV=1
MKARLIQQALAEGFDACRICAPDAIPQVPGRLAAFLEAGRHGQMRWMEERVAWRGDPQALWPEAKSVIVLGESYTPEHDPMAVIGQGDRGAISVYAQNRDYHDLVKKRLKRLARWLIAEAGGEVKVFVDTAPVAEKPLGQAAGLGWQGKHTNLVSRELGSWFFIGSIFTTLELPVDAPEVDHCGSCTACQDVCPTGAFPAPYQLDARRCISYLTIEHHGPVDEDLRAMLGNRIYGCDDCLAACPWNKFAVEAREVRYHARDELIAPRLAELAVLDDAAFRAMFSGSPIKRIGRDRFVRNVLYAIGNSGDVALAGVARGLCDDPDPTVADAARWAVARIEPC

SEQ ID NO: 82247 - protein, 384 aa, Zavarzinia compransoris
  REGION 1..384: note = tr|A0A317EAB8|A0A317EAB8_9PROT Epoxyqueuosine reductase OS=Zavarzinia compransoris OX=1264899 GN=queG; PE = 3 SV=1
MASDLRASDPRPGLRAEARRLGFDQVGFARPEALAHLGRDRALAEWLDAGYQGEMGWMAETAARRGDPRVLWPGVRSIVMVGANYGPASDPLALLDEADRGVIAAYARMRDYHDVLKGRLKMLAQHLASRLGAEVKVFVDTAPVMEKPLAQAAGIGWQGKHTNLVSRAHGSWLFLGALFTAADLAPDEAEADHCGTCRRCLDACPTGAFPAPYRLDARRCIAYLSIEYGGVIPVEFRAAMGNRVYGCDDCLAVCPWNKWAGASRDAKLSERADLAAPALAELVTLDDAGFRRRFATTPVKRIGRDRFLRNVLIAIGNSGDPAYRPLVIARLDDASPLVRAMAVWALAQLGGVGAEVHRAGTETDEAVRAEWHAALDDAVVPEAE

SEQ ID NO: 82248 - protein, 354 aa, Zavarzinia sp.
  REGION 1..354: note = tr|A0A317E3C9|A0A317E3C9_9PROT Epoxyqueuosine reductase OS=Zavarzinia sp. HR-AS OX=2211142 GN=queG PE=3; SV = 1
MAAPADPRAALEGEARRLGFDAVGFAAPDSIETLGRDALFRDWLAAGRHGTMAWMAETEERRADPRVLWPGVRSIVMLGANYGPESDSLALLGERDRGVVAAYARMRDYHDVMKGRLKMLAQWAVRHLGGEVKVFVDTAPVLEKPLAQAAGLGWQGKHTNLVSREHGSWLFLGALFLGIELPAGAAEVDHCGSCRRCLDICPTNAFPAPYQLDARRCIAYLTIEYDGEIPEEFRAAIGNRIYGCDDCLSVCPWNKWASASRDLKLSERAELAAIPLAALAQLDDAAFRSLFATTPVKRIGRDRFIRNVCIAIGNSGDPALLRVARHLMSDGSPQVRAMAEWALARLETISSSAP

SEQ ID NO: 82249 - protein, 307 aa, Zeaxanthinibacter enoshimensis
  REGION 1..307: note = tr|A0A4R6TPS6|A0A4R6TPS6_9FLAO Epoxyqueuosine reductase OS=Zeaxanthinibacter enoshimensis OX=392009; GN = queG PE=3 SV=1
MQQKYTYKEMIKTEAKRLGFLSCGVSRAGFLEEEAPRLEQWLRQGMHGEMSYMENHFDKRLDPTKLVDGAKSVISLLLNYYPEETQQEGTYKISKYAYGQDYHHVIKSKLRELQQFITENIGEVHGRAFVDSAPVLDKAWAARSGLGWVGKHSNLLTRQLGSFYFIAELITDLELEPDSPVTDHCGTCTACIDACPTQAIVAPYVVDGSKCISYFTIELKNEIPSEVKGQFDDWAFGCDTCQDVCPWNRFSKPHREPAFDPHPEMLQMSKKDWEEITEDVFREVFRKSAVKRTKFSGLKRNIKFLKS

SEQ ID NO: 82250 - protein, 361 aa, unidentified
  source 1..361: note = Zetaproteobacteria bacterium
  REGION 1..361: note = tr|A0A3M2EGC0|A0A3M2EGC0_9PROT Epoxyqueuosine reductase OS=Zetaproteobacteria bacterium OX=2026807; GN = queG PE=3 SV=1
MIAATVPAALRDRVKALAAEAGFDFCGITRPRVAARDAAALRAWVDAGHHADMWWMAEEERLARRMRPASLLDGVRSVICVAMRYTPPQPATTDGQPRGIVAAYAWGSDYHKVMKRRLRRLARALDRLLGRHDQRIFVDTAPVLEHALAASAGIAWQGKHSLSLNRTGGSWLLLGELFTTAELPCDPPATHHCGSCRACIDACPTGAIVAPFVVDARRCIAWLTIEYDGPIPPPLRPLLGRRIFGCDDCQTVCPWNRAVAAPHPDLLAPKNENRAPLLTELLTLDEAGFRIRFRGTPLRRGGRIRLVRNACIAAGNSGDRRLIPPLRALLRDEAPLLREHAAWALERITRPEPESPAPADP

SEQ ID NO: 82251 - protein, 388 aa, unidentified
  source 1..388: note = Zetaproteobacteria bacterium
  REGION 1..388: note = tr|A0A1J5JGY6|A0A1J5JGY6_9PROT tRNA epoxyqueuosine(34) reductase QueG OS=Zetaproteobacteria bacterium CG2_30_59_37 OX=1805430 GN=AUK36_05135 PE=4 SV=1
MHNEALKQSIIKLAAGQGFELCCFTRPRIDGKHTRALECWVEQGMHGDMRWMADAERCERRKNPATMLDEVRTVVSVGMRYSPPAYALDEVNAAQGRGVISAYAHGDDYHDIMKARLEALARELDQLLGRHDQRVYVDTAPVLEHALAEDSGLGWQGKHSLTLNRQLGSWFLLGELFTTADIKEDDKASFHCGTCSACIDICPTRAIVAPFVVDARLCISYLSIEYKGSVPRRLRPLIGNRIYGCDDCQMVCPWNGGLPPPVSDFLSPRGENCLPELASLLLLDDAAFRSRFVKSPVKRIGRERFIRNCCIAAGNNGEQSLLTALWSLAMQDDSAIVREHAVWALGMLSRAENSHAAMQRLSVMQGSETDANVREEISLTIKEIKESI

SEQ ID NO: 82252 - protein, 382 aa, unidentified
  source 1..382: note = Zhengella mangrovi
  REGION 1..382: note = tr|A0A2G1QTK5|A0A2G1QTK5_9RHIZ Epoxyqueuosine reductase OS=Zhengella mangrovi OX=1982044 GN=queG PE=3; SV = 1
MAGRGANAAARLRAFIRDEARAAGFDAVAITTPDAIPEASDRLQGFLDAGWHGTMAWMAETADRRAAPAALWPDVRSVIMLAMNYGPRHDPLTILERRDRAAISVYAQHRDYHDIIKGRLKTIAGKLAARTGADVKVFVDTAPVMEKPLAQAAGLGWQGKHTNLVSRTFGSWIFLGSIFTTAVLEPDAAETDHCGSCRACLDICPTDAFPAPYRLDARRCISYLTIEHKGMIDRGLREAMGNRIYGCDDCLAVCPWNKFAQSAREAKLVARDDLTAPRIADLLVLDDAAFRAMFSGSPVKRIGRDRFVRNVLIAAGNSGDGSLVPIVTGLLDDGSATVRATAIWALSRLGASDVLRARAPVLAADDDDGVQAEWAHAMEGEN

SEQ ID NO: 82253 - protein, 363 aa, unidentified
  source 1..363: note = Zhizhongheella caldifontis
  REGION 1..363: note = tr|A0A2S5SW76|A0A2S5SW76_9BURK Epoxyqueuosine reductase OS=Zhizhongheella caldifontis OX=1452508 GN=queG; PE = 3 SV=1
MHQDRVIDPTALLDQLRRWALGLGFSQIGVADVDLHTAEPGLLAWLKAGFHGEMHYMAAHGLKRARPAELVPGTVSVITARMDYLPSALPQGWQAIEWERLHHAPAQASVSLYARGRDYHKVLRSRLQALAERLAQAVGPFGHRVFTDSAPVLEAELAVRSGQGWRGKHTLVLSREAGSMFFLGEIYVDLALPPTQPAGAHCGSCTACIEVCPTQAIVAPYRLDARRCISYLTIEHAGTIPEEFRAAMGNRIYGCDDCQLVCPWNKYAQRSVLPDFDAREPWSAATLVDLFMWDEARFLKATEGSPIRRIGHERWLRNLAVALGNAWRETGDAALCAALQARRESASPLVREHIDWALAQRVA

SEQ ID NO: 82254 - protein, 355 aa, unidentified
  source 1..355: note = Zhongshania aliphaticivorans
  REGION 1..355: note = tr|A0A127MAI7|A0A127MAI7_9GAMM Epoxyqueuosine reductase OS=Zhongshania aliphaticivorans OX=1470434; GN = queG PE=3 SV=1
MTQSSTDLDLLAQQIKDWGREFGFAHIGISPASNEAHAQRLREWLAKQYHGDMAYMAEREGLRGEAAELHSGTIRVISARMDYLPDAENMDAVLGNPDKAYISRYALGRDYHKLIRKRLSQLAGKISAVAGGHHRAFVDSAPVLERGFAEQAGLGWIGKNSMLINSKAGSWFFLGEIYTDLPLPVDPPQETGHCGSCRACLDDCPTGAIVAPYQVDARRCISYLTIELKTSIPEELRPLMGNRVFGCDDCQLVCPWNKFAQATAEADFSPRHQLDNSDLIELFLWNEETFLKNTEGSAIRRIGYQHWLRNLAVGLGNAPASSAAISALKQQRPSAESMAREHIDWAIGQLQGKLV

SEQ ID NO: 82255 - protein, 353 aa, Zhongshania sp.
  REGION 1..353: note = tr|A0A3N0CD28|A0A3N0CD28_9GAMM Epoxyqueuosine reductase OS=Zhongshania sp. DSW25-10 OX=2304603 GN=queG; PE = 3 SV=1
MAPTSTDLQALAQQIKDWGSELGFAHIGISPASNDAHAQRLSEWLQKDYHGEMAYMAEREQLRASPAELHSGTIRVISARMDYLPDAEDIESILGNPDKAYISRYALGRDYHKLIRKRLSQLAEKISAVAGGSHRAFADSAPVLERGFAEQAGLGWIGKNSMLINSKAGSWFFLGEIYTDIPLPTDPPQETGHCGSCRACLDDCPTGAIVAPYQVDARRCISYLTIELKDSIPEDLRPLMGNRVFGCDDCQLVCPWNKFAQTTTEPDFSPRHQLDNSELINLFLWTEEEFLDNTAGSAIRRIGYQRWLRNLAIGIGNAPPSSAAIHALKSQYPVADEMAREHIDWALARQQDQ

SEQ ID NO: 82256 - protein, 353 aa, Zhongshania sp.
  REGION 1..353: note = tr|A0A2S4HJN1|A0A2S4HJN1_9GAMM Epoxyqueuosine reductase OS=Zhongshania sp. ZX-21 OX=2067667 GN=queG PE=3; SV = 1
MAPTSTDLQALAQQIKDWGSELGFAHIGISPASNDAHAQRLSEWLQKDYHGEMAYMAEREKLRASPTELHAGTIRVISARMDYLPNAEDIESILGNPDKAYISRYALGRDYHKLIRKRLSQLAEKISAVAGGSHRAFVDSAPVLERGFAEQAGLGWIGKNSMLINSKAGSWFFLGEIYTDIPLPTDPPQETGHCGSCRACLDDCPTGAIVAPYQVDARRCISYLTIELKDSIPEDLRSLMGNRVFGCDDCQLVCPWNKFAQTTTEPDFSPRHQLDNSELISLFLWTEDEFLDNTAGSAIRRIGYQRWLRNLAVGIGNAPPSSAAIHALKSQYPVADEMAREHIDWALARQQDQ

SEQ ID NO: 82257 - protein, 307 aa, Zhouia amylolytica
  REGION 1..307: note = tr|A0A1I6VD29|A0A1I6VD29_9FLAO Epoxyqueuosine reductase OS=Zhouia amylolytica OX=376730 GN=queG PE=3 SV=1
MTKQLKYAQMIKSEAKRLGFLSCGISKADFLEEEAPRLEKWLKNNMHGEMHYMENHFDKRLDPRKLVEGSKSVVSMLLNYYPENTQEDPEAPRISKYAYGTDYHFVIKDKLKQLLQFIQEEIGEVNGRAFVDSAPVLDKAWAAKSGLGWIGKNANLLSKQVGSFFFIAELVIDLDLACDTPVTDHCGSCTACIDACPTQAIVEPYVVDGSKCISYFTIELKNEIPQDVRGKFDNWMFGCDVCQDVCPWNRFSKPHNEPLFNPHPDLLSMTKKDWEEITEDVFRKVFKKSAVKRTKFSGLKRNIDFLK

SEQ ID NO: 82258 - protein, 307 aa, Zhouia amylolytica
  REGION 1..307: note = tr|W2UK74|W2UK74_9FLAO Epoxyqueuosine reductase; OS = Zhouia amylolytica AD3 OX=1286632 GN=queG PE=3 SV=1
MTKQLKYAQMIKSEAKRLGFLSCGISKADFLEEEAPRLEKWLKNNMHGEMHYMENHFDKRLDPRKLVEGSKSVVSMLLNYYPENTQEDPEAPRISKYAYGTDYHFVIKDKLKQLLQFIQEEIGEVNGRAFVDSAPVLDKAWAAKSGLGWIGKNANLLSKQVGSFFFIAELVIDLDLVCDTPVTDHCGSCTACIDACPTQAIVEPYVVDGSKCISYFTIELKNEIPQDVRGKFDNWMFGCDVCQDVCPWNRFSKPHNEPLFNPHPDLLSMTKKDWEEITEDVFRKVFKKSAVKRTKFSGLKRNIDFLK

SEQ ID NO: 82259 - protein, 375 aa, Zobellella denitrificans
  REGION 1..375: note = tr|A0A231MWX2|A0A231MWX2_9GAMM Epoxyqueuosine reductase OS=Zobellella denitrificans OX=347534 GN=queG; PE = 3 SV=1
MTTPNFAALAHDIKLWAAELGFDQVGITDTDLAAHEPLLADWLDQGYHGEMDYMARHGMMRARPQELLPGTLRVISVRMNYLPEQAAIARVLSDPDKGYISRYALGRDYHKVLRNRLKKLADRIAERAQGLVARPFVDSAPILERPLAAKAGIGWVGKHSLLLNREQGSFFFLGELLVNLPLPVDGPVEEGCGKCVACITTCPTGAIVAPYVVDARRCISYLTIELDGPIPEEFRPLMGNRIYGCDDCQLICPWNRFAGASREPDFAARDDLHAPELLALFAWSEEHFLKMTEGSPIRRIGHRRWLRNIAVALGNAPASEQVIQGLGQKRDEVDELVREHIDWALARQRAGLARPERKTERLIRAVDKGMPKHAR

SEQ ID NO: 82260 - protein, 375 aa, Zobellella denitrificans
  REGION 1..375: note = tr|A0A291HUE7|A0A291HUE7_9GAMM Epoxyqueuosine reductase OS=Zobellella denitrificans OX=347534 GN=queG; PE = 3 SV=1
MTTPDFAALAHDIKLWAAELGFDQVGITDTDLAAHEPLLADWLDQGYHGEMDYMARHGMMRARPQELLPGTLRVISVRMNYLPEQAAIARVLSDPDKGYISRYALGRDYHKVLRNRLKKLADRIAERAQGLVARPFVDSAPILERPLAAKAGIGWVGKHSLLLNREQGSFFFLGELLVNLPLPVDGPVEEGCGKCVACITTCPTGAIVAPYVVDARRCISYLTIELDGPIPEEFRPLMGNRIYGCDDCQLICPWNRFAGASREPDFAARDDLHAPELLALFAWSEEHFLKMTEGSPIRRIGHRRWLRNIAVALGNAPASEQVIQGLGQKRDEVDELVREHIDWALARQRAGLARPERKTERLIRAVDKGMPEHAR

SEQ ID NO: 82261 - protein, 375 aa, unidentified
  source 1..375: note = Zobellella endophytica
  REGION 1..375: note = tr|A0A2P7R1S5|A0A2P7R1S5_9GAMM Epoxyqueuosine reductase OS=Zobellella endophytica OX=2116700 GN=queG; PE = 3 SV=1
MTAPDLAALAHDIKLWAAELGFDQVGITDTDLAAHEPLLADWLEKGYHGEMEYMARHGMMRTRPQELLPGTLRVISVRMNYLPEQAAIARVLSDPDKGYISRYALGRDYHKVLRGRLKKLADRIAEQAQELVARPFVDSAPILERPLAAKAGIGWVGKHSLLLNRQQGSFFFLGELLVNLPLPVDAPVEEGCGKCVACITTCPTGAIVAPYVVDARRCISYLTIELDGPIPEPLRPLLGNRIYGCDDCQLICPWNRFADASREPDFAARDDLHAPELLALFAWSEAHFLKMTEGSPIRRIGHRRWLRNIAVALGNAPASEQIIQALEQKRETADELVREHIDWALAQQRQGLARADRKTERLIRVVDKGMPDHAR

SEQ ID NO: 82262 - protein, 375 aa, Zobellella taiwanensis
  REGION 1..375: note = tr|A0A2P7QL60|A0A2P7QL60_9GAMM Epoxyqueuosine reductase OS=Zobellella taiwanensis OX=347535 GN=queG PE=3; SV = 1
MTTPDFDALAHDIKLWAAELGFDQAGIADPDLSEHEPLLADWLDQGYHGDMEYMARHGMMRARPAELLPGTLRVISVRMNYLPEQAAIARVLSDPDKGYISRYALGRDYHKVMRNRLKKLADQIAQRAQKLVARPFVDSAPILERPLAAKAGLGWVGKHSLLLNREPGSFFFLGELLVNLPLPVDRPVEEGCGKCVACITTCPTGAIVAPYVVDARRCISYLTIELDGPIPEPLRPLMGNRIYGCDDCQLICPWNRFARASREPDFAARDDLHAPELLALFAWSEAHFLKMTEGNPIRRIGHRRWLRNIAVALGNAPASEQVIQALEQKREVVDELVREHIDWALARQQAGLAQPERKTERLIRAVDKGMPEHAR

SEQ ID NO: 82263 - protein, 306 aa, Zobellia galactanivorans
  REGION 1..306: note = tr|G0L5U1|G0L5U1_ZOBGA Epoxyqueuosine reductase; OS = Zobellia galactanivorans (strain DSM 12802 / CCUG 47099 / CIP 106680 / NCIMB 13871 / Dsij) OX=63186 GN=queG PE=3 S; V = 1
MDSKAKYSELIKTEAKRLGFLSCGISKADFLEEEAPRLESWLNNNMHGEMSYMANHFDKRLDPRLLVDGAKSVISLLLNYYPKETQKEDTYKISKYAYGQDYHHVIKSKLRELQNFMTEHIGEVGGRAFVDSAPVLDKAWAAKSGLGWIGKHSNLLTQRVGSFYFIAELIVDVDLEYDHRVTDHCGTCTACIDACPTEAIVEPYVVDGSKCISYFTIELKNEIPTEVKGQFDDWAFGCDVCQDVCPWNRFSKPHQEPLFDPHPELLSMTKKDWEEITEDVFRKVFQKSAVKRTKFSGLQRNIKFLK

SEQ ID NO: 82264 - protein, 306 aa, Zobellia uliginosa
  REGION 1..306: note = tr|A0A1N7M8F1|A0A1N7M8F1_9FLAO Epoxyqueuosine reductase OS=Zobellia uliginosa OX=143224 GN=queG PE=3 SV=1
MDSKAKYSELIKTEAKRLGFLSCGISKADFLEEEAPRLESWLNKNMHGEMSYMANHFDKRLDPRLLVDGAKSVISLLLNYYPKETQKEDTYKISKYAYGQDYHHVIKSKLRELQNFMSEHIGEVGGRAFVDSAPVLDKAWAAKSGLGWIGKHSNLLTQRVGSFYFIAELIVDVDLEYDHRVTDHCGTCTACIDACPTEAIVEPYVVDGSKCISYFTIELKNEIPTEVKGQFDDWAFGCDVCQDVCPWNRFSKPHQEPLFDPHPELLSMTKKDWQEITEDVFRKVFQKSAVKRAKFSGLQRNINFLK

SEQ ID NO: 82265 - protein, 365 aa, Zoogloea ramigera
  REGION 1..365: note = tr|A0A4Y4CZD5|A0A4Y4CZD5_ZOORA Epoxyqueuosine reductase OS=Zoogloea ramigera OX=350 GN=queG PE=3 SV=1
MNFEHDNLSGGQENLTRLAADIKSWGRALGFDEVGITDTGLSAAEAGLAAWLEAGCHGQMDYMYKHGLKRSRPEALVPGTRRVISARMSYLPDAEDALAVLDDPARAYVSRYALGRDYHKVLRARLQRLADRVAQSVPHAARVFVDSAPVMEVALAEKAGLGWRGKHTLLLSRQAGSFFFLGEIYTDLLLPVDAATDAHCGSCSACISACPTGAIVAPYRVDARRCISYLTIELKESIPEAFRPMIGNRIYGCDDCQLACPWNRFARKAVEPDFAPRHGLDGARLAELFCWSETDFNERMAGSPIYRIGHERWLRNLAIALGNAPSAEDVLAALEKRREDASLMVREHVAWALRQHDGPHVQGAV

SEQ ID NO: 82266 - protein, 365 aa, Zoogloea sp.
  REGION 1..365: note = tr|A0A5C7KJ57|A0A5C7KJ57_9RHOO Epoxyqueuosine reductase OS=Zoogloea sp. OX=49181 GN=queG PE=3 SV=1
MSLGHDKLSGGQGDFATLAASIKAWGQALGFDEVGISDIDLGDAEPGLLAWLDAGCHGEMDYMYKHGLKRSRPAELVPGTCRVISVRMSYLAQGESPHAILQCPGKAYVSRYALGRDYHKVLRSRLQRLADRISAETPHGYRVFVDSAPVMEVALAEKAGLGWRGKHTLLLSRQAGSFFFLGEIYTDLPLPLDVPKSGHCGDCSACIPACPTGAIVAPYRVDARRCISYLTIELKDAIPEEFRRPIGNRIYGCDDCQLVCPWNRFARSSFVSDFTPRHGLDGAGLVELFLWSKVNFEERMTGSPIYRIGYERWSRNIAVALGNAIGVPKAVAALESRRNDPSAMVREHVLWALRQHDILNPEAAV

SEQ ID NO: 82267 - protein, 363 aa, unidentified
  source 1..363: note = Zoogloeaceae bacteirum
  REGION 1..363: note = tr|A0A2U3TLD6|A0A2U3TLD6_9RHOO Epoxyqueuosine reductase OS=Zoogloeaceae bacteirum Par-f-2 OX=2080469; GN = queG PE=3 SV=1
MQSVDHQNLTAEPSADTVQLKALKLRIQAWGRELGFDAVGVSGVDLSAAEPGLAAWLEAGFHGEMDYMARHGMKRARPSELLPGTLRVISARMNYWPKAADAMENLADGRRAYVSRYALGRDYHKVLRNRLQKLAERIDAELPHGYRVFVDSAPVLEVELASRAALGWRGKHSLLLDRTAGSWFFLGEIFTNLPLPEDQPTAAHCGRCTACLDACPTGAIVAPYRVDARRCISYLTIELQGPIPEALRPAIGNRIYGCDDCQLVCPWNRFARLGAQMDFAPRHGLDRASLVELFSWSAHDFDFRMAGSPIRRIGYERWLRNLAVALGNAPHSPAVVAALRARADDASALVREHVAWALARHGQ

SEQ ID NO: 82268 - protein, 361 aa, Zooshikella ganghwensis
  REGION 1..361: note = tr|A0A4P9VL02|A0A4P9VL02_9GAMM Epoxyqueuosine reductase OS=Zooshikella ganghwensis OX=202772 GN=queG; PE = 3 SV=1
MTNIAPSQTDFVLLAQQIKLWAKELGFQDAGITGIDLSEHEAYLKSWLAKGFHGEMGYLADHGNKRSRPDELVPGTISIISVRMDYLPGDTQAVKVLQSSSQAYISRYALGRDYHKVIRKRLAKLANKITEVAGHFGYRAFVDSAPVLEKALAEKAGLGWIGKNTLLLNSKAGSWFFLGELYTNLPLPIDAPQVTKHCGSCQACLDICPTDAFVGPFQLDARKCISYLTIELKGAIPEALRPKIGNRVFGCDDCQLVCPWNKFAKPTQETDFLPRHKLDSSDLTTLFLWTEEQFLTATEGSPIRRTGYKGWLRNLAVGLGNAATTPEVIAALNSRKDFPDDMVREHVLWALKQHHMKTTGC

SEQ ID NO: 82269 - protein, 311 aa, unidentified
  source 1..311: note = Zunongwangia atlantica
  REGION 1..311: note = tr|A0A1Y1T1R9|A0A1Y1T1R9_9FLAO Epoxyqueuosine reductase OS=Zunongwangia atlantica 22II14-10F7 OX=1185767; GN = queG PE=3 SV=1
MAIENKAKNTNLIKEEAKRLGFMSCGMSKAEFLEEEAPRLEEWLNKNRNGQMYYMENHFDRRLDPTKLVEGSKSVISLLLNYYPNEFQNPESYKISKYAYGKDYHFVIKDKLKSLLQFIQNEIGEVDGRAFVDSAPVLDKAWAAKSGLGWIGKNSNLLSKKAGSFFFIAELIVDLELEYDTPVTDHCGTCTACIDACPTNAIVEPYKVDGSKCISYFTIELKDQLPNSFKNTFDDWMFGCDVCQDVCPWNRFSKSHSEPLFDPHPDLLKFDKKDWEEITKETFNEIFRKSAVKRTKFEGLKRNIEFLDTQN

SEQ ID NO: 82270 - protein, 309 aa, unidentified
  source 1..309: note = Zunongwangia mangrovi
  REGION 1..309: note = tr|A0A1I1D9X9|A0A1I1D9X9_9FLAO Epoxyqueuosine reductase OS=Zunongwangia mangrovi OX=1334022 GN=queG PE=3; SV = 1
MAIENKAKNTNLIKEEAKRLGFMSCGMSKAEFLEEEAPRLEEWLNKNRNGQMYYMENHFDKRLDPTKLVEGSKSVISLLLNYYPNEFQNPESYKISKYAYGKDYHFVIKDKLKSLLQFIQNEIGEVEGRAFVDSAPVLDKAWAAKSGLGWIGKNSNLLSKKAGSFFFIAELIVDLELEYDTPVTDHCGTCTACIDACPTNAIVEPYKVDGSKCISYFTIELKDELPNSFKNTFDDWMFGCDVCQDVCPWNRFSKSHSEPLFDPHPDLLKFDKKDWQEITKETFNEIFRKSAVKRTKFEGLKRNINFLDS

SEQ ID NO: 82271 - protein, 309 aa, Zunongwangia profunda
  REGION 1..309: note = tr|A0A3D5IXA1|A0A3D5IXA1_9FLAO Epoxyqueuosine reductase OS=Zunongwangia profunda OX=398743 GN=queG PE=3; SV = 1
MIVGNKAKYTNLIKEEAIRLGFMSCGISKAGFLEEEAPRLEEWLNKNRNGKMSYMENHFDKRLDPTKLVDGSKSVISLLLNYYPDKVQNPESYKISKYAYGKDYHFVIKDKLKSLLQFIQSEIGEVAGRAFVDSAPVLDKAWAAKSGLGWIGKNSNLLSKKAGSFFFIAELIVDLELEEDTPVTDHCGTCTACIDACPTNAIVEPYKVDGSKCISYFTIELKDELPNSFKNTFEDWMFGCDICQDVCPWNRFSKPHNEPLFDPHPDLLKFDKKDWQEITRETFNEIFRKSAVKRTKFEGLKRNIKFLDS

SEQ ID NO: 82272 - protein, 309 aa, Zunongwangia profunda
  REGION 1..309: note = tr|D5BFK0|D5BFK0_ZUNPS Epoxyqueuosine reductase; OS = Zunongwangia profunda (strain DSM 18752 / CCTCC AB 206139 / SM-A87) OX=655815 GN=queG PE=3 SV=1
MIVGNKSKYTNLIKKEAIRLGFMSCGISKAGFLEEEAPRLEEWLNKNRNGKMSYMENHFDKRLDPTKLVDGSKSVISLLLNYYPDKVQNPESYKISKYAYGKDYHFVIKDKLKSLLQFIQSEIGEVAGRAFVDSAPVLDKAWAAKSGLGWIGKNSNLLSKKAGSFFFIAELIVDLELEEDTPVTDHCGTCTACIDACPTNAIVEPYKVDGSKCISYFTIELKDELPNSFKNTFEDWMFGCDICQDVCPWNRFSKPHNEPLFDPHPDLLKFDKKDWQEITRETFNEIFRKSAVKRTKFEGLKRNIKFLDS

SEQ ID NO: 82273 - protein, 309 aa, Zunongwangia sp.; identical to SEQ ID NO: 82271
  REGION 1..309: note = tr|A0A2E0P3E7|A0A2E0P3E7_9FLAO Epoxyqueuosine reductase OS=Zunongwangia sp. OX=1965325 GN=queG PE=3 SV=1

SEQ ID NO: 82274 - protein, 369 aa, Zymobacter palmae
  REGION 1..369: note = tr|A0A348HG64|A0A348HG64_9GAMM Epoxyqueuosine reductase OS=Zymobacter palmae OX=33074 GN=queG PE=3 SV=1
MSTPPSPDTPDMAALAEQIKLWGRELGFQQVGITDVDLGEHAERHRRWLAAGYHGEMDYMARHGELRTRPELLVEGTQRIIVVRMNYLPPEVETTKVLSQPSKAYISRYALGRDYHKVIRKRLSTLAKQIEKAVGPFGHRAFVDSAPVLERGLAQKAGLGWTGKNSLILHPKAGSLFFLGELFTDLPLPIDKPYDKIHCGKCQRCRDMCPTQAIVDDQVVDARRCISYLTIELNGPIPEELRSMMGNRVYGCDDCQLVCPFTRFAKASQEDDFAPRHDLDRTDLLTLFNWSEDDFLDRTAGSPIRRIGYEKWLRNMAVGLGNAPYSAEVVAALEARLDYPSALVQEHVRWALDQQQHRQSALITVSPAD

SEQ ID NO: 82275 - protein, 378 aa, Zymomonas mobilis
  REGION 1..378: note = tr|A0A542VZR4|A0A542VZR4_ZYMMB Epoxyqueuosine reductase OS=Zymomonas mobilis OX=542 GN=queG PE=3 SV=1
MDVDQLKSLRIALEEQAYQLGFATFGISLAEIAEGARTRFHQWLADGMHGDMLWMADRAELRSDPKKLWPDVRSVIMLGMNYAPACNPLALAEKPEIGRISVYAQGRDYHDVVKKALKNLARWLVQNSGCGVKVFVDTAPVMEKNLAVSAGLGWQGKHSNVINRRYGNWLFLGAIYTTLPFEADQKAKGGCGSCQSCQDICPTGAISVAGSVDARKCISYLTIEYKGIIPTVFRRAIGNHIYGCDDCLGICPWNKFAKPDEAHPAFWPRAELAAPELKDLLMLDDTSFRQVFSASPVKRIGRDRFIRNCLIAAGNSGQSSLLKVVMPLLHDPALIVRAAAIWALRQLDPALFKVMAPQAVLQESEKEVQDEWRLEEEG

SEQ ID NO: 82276 - protein, 380 aa, Zymomonas mobilis
  REGION 1..380: note = tr|F8ESQ3|F8ESQ3_ZYMMT Epoxyqueuosine reductase; OS = Zymomonas mobilis subsp. pomaceae (strain ATCC 29192 / JCM 10191 / NBRC 13757 / NCIMB 11200 / NRRL B-4491); OX = 5791 38 GN=queG PE=3 SV=1
MFTMSNTSSSIEDFRLSLEKEAYALGFSTFGISRAEISASTQKRLCRWLEEGMHGDMLWMRDRLEHRLDPQNLWPDVRSVIMLGMNYAPTKNPLALADDAGIGRISVYAQGRDYHDTIKKALKHLARWLVQKADCNVKVFVDTAPVMEKSLAVSAGLGWQGKHSNVISRQYGNWLFLGAIYTTLDLEPNRPAKGGCGSCSRCQIACPTNAFPREGVVDARRCISYLTIEYKGIIPQEFRRALGNHIYGCDDCLASCPWNKFAHPETSHPAFWPRAELAAPELRDLLTLKDSDFRQFFSASPIKRIGRDRFIRNCLIAAGNSRQSSLLKQVMPLLEDPAAIVRAMAIWALRQLDIQIFRALAKTAAPQENDVTVQREWQEV

SEQ ID NO: 82277 - protein, 379 aa, Escherichia coli; identical to SEQ ID NO: 80927
  REGION 1..379: note = sp|P39288|QUEG_ECOLI Epoxyqueuosine reductase; OS = Escherichia coli (strain K12) OX=83333 GN=queG PE=3 SV=1

SEQ ID NO: 82278 - protein, 379 aa, Escherichia coli; identical to SEQ ID NO: 80927
  REGION 1..379: note = tr|W8TWV5|W8TWV5_ECOLX Epoxyqueuosine reductase; OS = Escherichia coli OX=562 GN=yjeS PE=3 SV=1

SEQ ID NO: 82279 - protein, 379 aa, Escherichia coli
  REGION 1..379: note = tr|D3QL83|D3QL83_ECOCB Epoxyqueuosine reductase; OS = Escherichia coli O55:H7 (strain CB9615 / EPEC); OX = 701177 GN=yjeS PE=3 SV=1
MSEPLDLNQLAQKIKQWGLELGFQQVGITDTDLSESEPKLQAWLDKQYHGEMDWMARHGMLRARPHELLPGTLRVISVRMNYLPANAAFASTLKNPKLGYVSRYALGRDYHKLLRNRLKKLGEMIQQHCVSLNFRPFVDSAPILERPLAEKAGLGWTGKHSLILNREAGSFFFLGELLVDIPLPVDQPVEEGCGKCVACMTICPTGAIVEPYTVDARRCISYLTIELEGAIPEELRPLMGNRIYGCDDCQLICPWNRYSQLTTEDDFSPRKPLHAPELIELFAWSEEKFLKVTEGSAIRRIGHLRWLRNIAVALGNAPWDETILAALESRKGEHPLLDEHIAWAMAQQIERRNACIVEVQLPKKQRLVRVIEKGLPRDA

SEQ ID NO: 82280 - protein, 228 aa, Escherichia coli
  REGION 1..228: note = tr|A0A0E0Y1F8|A0A0E0Y1F8_ECO1C Epoxyqueuosine reductase QueH OS=Escherichia coli O104:H4 (strain 2011C-3493) OX=1133852 GN=queH PE=3 SV=1
MTPIKIFMTIADFKRPKLELPNGANKLLLHSCCAPCSGEVMEALQASGIDYTIFFYNPNIHPQKEYLIRKDENIRFAEQHGVPFIDADYDTDNWFERAKGMEWEPERGIRCTMCFDMRFERTALYAAENGFSVISSSLGISRWKNMQQVNECGRRAVAHYPGMVYWDYNWRKQGGSSRMIEISKREKFYQQEYCGCVYSLRDTNLHRKSQGRPLIKIGQLHYGKEEKE

SEQ ID NO: 82281 - protein, 221 aa, Escherichia coli
  REGION 1..221: note = tr|A0A0A2RBQ5|A0A0A2RBQ5_ECOLX Epoxyqueuosine reductase QueH OS=Escherichia coli OX=562 GN=queH PE=3 SV=1
MTIADFKRPKLELPNGANKLLLHSCCAPCSGEVMEALQASGIDYTIFFYNPNIHPQKEYLIRKDENIRFAEQHGVPFIDADYDTDNWFERAKGMEWEPERGIRCTMCFDMRFERTALYAAENGFSVISSSLGISRWKNMQQVNECGRRAVAHYPGMVYWDYNWRKQGGSSRMIEISKREKFYQQEYCGCVYSLRDTNLHRKSQGRPLIKIGQLHYGKEEKE

SEQ ID NO: 82282 - protein, 228 aa, Escherichia coli
  REGION 1..228: note = tr|U9Y0D1|U9Y0D1_ECOLX Epoxyqueuosine reductase QueH; OS = Escherichia coli 110957 OX=1268975 GN=queH PE=3 SV=1
MTPIKIFMTIADFKRPKLELPNGANKLLLHSCCAPCSGEVMEALQASRIDYTIFFYNPNIHPQKEYLIRKDENIRFAEQHGVPFIDADYDTDNWFERAKGMEWEPERGIRCTMCFDMRFERTALYAAENGFSVISSSLGISRWKNMQQVNDCGRRAVAHYPGMVYWDYNWRKQGGSSRMIEISKREKFYQQEYCGCVYSLRDTNLHRKSQGRPLIKIGQLHYDKEEKE

SEQ ID NO: 82283 - protein, 259 aa, Escherichia coli
  REGION 1..259: note = tr|A0A1X3LJJ5|A0A1X3LJJ5_ECOLX Epoxyqueuosine reductase QueH OS=Escherichia coli TA054 OX=656433 GN=queH; PE = 3 SV=1
MVVCFASKADITRFRHLFPIARSDATLFAIFMNLINTFMTVADFKRPKLELPNGAKKLLLHSCCAPCSGEVMEALQASGIDYTIFFYNPNIHPQKEYLIRKDENIRFAKQHGVPFIDADYDTDNWFERAKGMEWEPERGIRCTMCFDMRFERTALYAAENGFSVISSSLGISRWKNMQQVNDCGRRAVAYYPGMVYWDYNWRKQGGSSRMIEISKREQFYQQEYCGCVYSLRDTNLHRKSQGRPLIKIGQLHYGKEGQE

SEQ ID NO: 82284 - protein, 538 aa, Pseudomonas fluorescens
  REGION 1..538: note = sp|P95480|PRNA_PSEFL Flavin-dependent tryptophan halogenase PrnA OS=Pseudomonas fluorescens OX=294 GN=prnA; PE = 1 SV=1
MNKPIKNIVIVGGGTAGWMAASYLVRALQQQANITLIESAAIPRIGVGEATIPSLQKVFFDFLGIPEREWMPQVNGAFKAAIKFVNWRKSPDPSRDDHFYHLFGNVPNCDGVPLTHYWLRKREQGFQQPMEYACYPQPGALDGKLAPCLSDGTRQMSHAWHFDAHLVADFLKRWAVERGVNRVVDEVVDVRLNNRGYISNLLTKEGRTLEADLFIDCSGMRGLLINQALKEPFIDMSDYLLCDSAVASAVPNDDARDGVEPYTSSIAMNSGWTWKIPMLGRFGSGYVFSSHFTSRDQATADFLKLWGLSDNQPLNQIKFRVGRNKRAWVNNCVSIGLSSCFLEPLESTGIYFIYAALYQLVKHFPDTSFDPRLSDAFNAEIVHMFDDCRDFVQAHYFTTSRDDTPFWLANRHDLRLSDAIKEKVQRYKAGLPLTTTSFDDSTYYETFDYEFKNFWLNGNYYCIFAGLGMLPDRSLPLLQHRPESIEKAEAMFASIRREAERLRTSLPTNYDYLRSLRDGDAGLSRGQRGPKLAAQESL

SEQ ID NO: 82285 - protein, 530 aa, unidentified
  source 1..530: note = Lentzea aerocolonigenes
  REGION 1..530: note = sp|Q8KHZ8|REBH_LENAE Flavin-dependent tryptophan halogenase RebH OS=Lentzea aerocolonigenes OX=68170; GN = rebH PE=1 SV=1
MSGKIDKILIVGGGTAGWMAASYLGKALQGTADITLLQAPDIPTLGVGEATIPNLQTAFFDFLGIPEDEWMRECNASYKVAIKFINWRTAGEGTSEARELDGGPDHFYHSFGLLKYHEQIPLSHYWFDRSYRGKTVEPFDYACYKEPVILDANRSPRRLDGSKVTNYAWHFDAHLVADFLRRFATEKLGVRHVEDRVEHVQRDANGNIESVRTATGRVFDADLFVDCSGFRGLLINKAMEEPFLDMSDHLLNDSAVATQVPHDDDANGVEPFTSAIAMKSGWTWKIPMLGRFGTGYVYSSRFATEDEAVREFCEMWHLDPETQPLNRIRFRVGRNRRAWVGNCVSIGTSSCFVEPLESTGIYFVYAALYQLVKHFPDKSLNPVLTARFNREIETMFDDTRDFIQAHFYFSPRTDTPFWRANKELRLADGMQEKIDMYRAGMAINAPASDDAQLYYGNFEEEFRNFWNNSNYYCVLAGLGLVPDAPSPRLAHMPQATESVDEVFGAVKDRQRNLLETLPSLHEFLRQQHGR

SEQ ID NO: 82286 - protein, 667 aa, unidentified
  source 1..667: note = Malbranchea aurantiaca
  REGION 1..667: note = sp|L0E155|MALA_MALAU Flavin-dependent halogenase malA OS=Malbranchea aurantiaca OX=78605 GN=malA PE=1 SV=1
MAPTPKYTFTERAAAGNLSDAEILNSNNPTGSELPDESDVVVGGAGIHGLIYALHASKYKPNNLKISVIEKNTRPGYKIGESTLPIFYTWCKLHGISAAYLLRLFGLKDGLCFYFLDRENQGQYTDFCSVGAPGLVLASLQIERPMSELLFTILAQRNGVNVYHGREVDFKSTVVQGGGQGNKIAVSRGKYDSTPKTIDSALFVDATGRFRQFCSKKAPRHRFDGWNCNAFWGYFTAPKDESKIPFDLYEGDHTNHLCFPEGWVWVIRLPSWEGSLIANLMDMVTYILECADAGVPGDELPSSEELARMFGLKFQWVTSIGFAVRNDVKYPEDLSAYGTREAEQKFNYFVQKYELLQQFMSNFELIENLYGPGTTWFIRKTLAYQSPVVSGPGWLAIGDACGFTNPLYSPGINVGMSTSTWAAQLSHRIVEIGKSAPADAAESSIRKLLVPYDDYCKSLVPALEQMNRFNYVCYRDTRLGPQVACLWQFFAGIERYLSDVNIETFAHYAIKWVWGAMVPEYQQVAQKCIEHIETVPLDERLPDAMVDELLAFSNRIKSAAVAADDFSLRWDAILRSFDRSLNFVEGKTSRDIYTRQCSGCGAWLQLRPDWKKCHSCGLLGTEPQTAVTFDPPLTAEEEALLYAAWNTAPKYDPSKELKLPTPTRPAA

SEQ ID NO: 82287 - protein, 555 aa, unidentified
  source 1..555: note = Kitasatospora aureofaciens
  REGION 1..555: note = sp|A0A1E7MYN1|CTCP_KITAU Tetracycline 7-halogenase; OS = Kitasatospora aureofaciens OX=1894 GN=ctcP PE=1 SV=1
MTDTTADQTRHGDRPYDVVIIGSGLSGTMLGSILAKHGFRIMLLDGAHHPRFAVGESTIGQTLVVLRLISDRYGVPEIANLASFQDVLANVSSSHGQKSNFGFMFHRDGEEPDPNETSQFRIPSIVGNAAHFFRQDTDSYMFHAAVRYGCDARQYYRVENIEFDDGGVTVSGADGSTVRARYLVDASGFRSPLARQLGLREEPSRLKHHARSIFTHMVGVDAIDDHVDTPAELRPPVPWNDGTMHHIFERGWMWIIPFNNHPGATNPLCSVGIQLDERRYPARPDLTPEEEFWSHVDRFPAVQRQLKGARSVREWVRTDRMQYSSSRTVGERWCLMSHAAGFIDPLFSRGLSNTCEIINALSWRLMAALREDDFAVERFAYVEELEQGLLDWNDKLVNNSFISFSHYPLWNSVFRIWASASVIGGKRILNALTRTKETGDDSHCQALDDNPYPGLWCPLDFYKEAFDELTELCEAVDAGHTTAEEAARVLEQRVRESDWMLPALGFNDPDTHHINPTADKMIRIAEWATGHHRPEIRELLAASAEEVRAAMRVKP

SEQ ID NO: 82288 - protein, 522 aa, Chondromyces crocatus
  REGION 1..522: note = sp|Q0VZ69|THAL_CHOCO Tryptophan 2-halogenase; OS = Chondromyces crocatus OX=52 GN=cmdE PE=4 SV=1
MQLPSSTKILVVGGGPAGSTAATLLAREGFEVTLVEKAIFPRYHIGESLLISVQPIIDLLGAREAVEAHGFQRKKGVLWEWGGERWLFDWKKLRYDYTFHVKREEFDEILLRNAQKNGVKVFEGIDISRLEFDGERPVAAKWSKSSTGESGTIQFEFLLDASGRAGLMATQYLRSRMFMKAFQNVATWGYWKGATIPEVEVEGPITVGSIPYGWIWGIPLRDQTMSVGLVIHQELFKEKRATQSVEEIYHEGLKASPLFQDVVLKGATLEPQIRTETDYSYISRTLAGPGFFLVGDSGAFIDPLLSSGVHLAMHSALLAAASVKSIIAGEVDMASATEFYQRCYQGHFLRWALIVASFYEVNARKETYFWTAQQLAHEELGVFNMSQADMKDVFATMVSGVVDLGDAQNAGRLQKGAERVHQYLDDDGREEDVTALLQKSKQRIFEYLDRVKNRDSRAAMQRYKAGGTETFSMGLDADGAVGGLYVTTEPRLGLLRKVVEERAEAATEAPAPAAPPPAVAEV

SEQ ID NO: 82289 - protein, 521 aa, Sphingomonas haloaromaticamans
  REGION 1..521: note = tr|A0A1S1HAC5|A0A1S1HAC5_9SPHN Flavin-dependent tryptophan halogenase RebH OS=Sphingomonas haloaromaticamans OX=653954 GN=rebH PE=4 SV=1
MQANEAVARSRLRIVIVGGGSAGWMCAAGLARLLPATDYDITLIESDEIGTVGVGEATLPHIKTFNDMLGIDEAEFLRETQGTFKLGIEFVGWDRPGDRYIHPFGAFGEPWVGVDFQHHWVRAAQAGFDPGPIQDYSFAVAAARADAFEFPDGDRNSIRSTYAYAYHFDAGLYAAFLRRWATARGVRRIEGQVIDVGHNAISGHVETLRLKSGATLAGDIFVDCSGFRSLLLGGVMGVAWQDWSEWLPCDRALAVPCRRTTALTPYTRATAQRAGWTWRIPLQHRVGNGYVFSSRYCDEDQARETLLAAIEGEPLAEPHLLRFAAGRRALAWERNCIGIGLAGGFLEPLESTSIFLIQAAVIDLASLMPTPGFGNRMDPRLIAEFNRLFEIQYDRVRDFLVLHYAANSREGEPLWDHVRAMRLPDSLTHKIELFEASAAAPDYTYGLFSRDSWLSVLFGQGLRPRAYNRLADHLPLEELERRMRDLRSRIAANAGLMTAQEDFIAGYCTASPPAPPMESAA

SEQ ID NO: 82290 - protein, 334 aa, Pseudoalteromonas sp.
  REGION 1..334: note = tr|A0A4Q6J9Y4|A0A4Q6J9Y4_9GAMM Tryptophan--tRNA ligase OS=Pseudoalteromonas sp. MEBiC 03485 OX=2571103; GN = trpS PE=3 SV=1
MSKPVVLSGIQPTGGMTIGNYVGAINQWLKLQEDHESFFMLVDLHAITVRQDPEQLRSRVLDGIALYAACGIDPEKAALFVQSQVPEHAQLSWVLNCYAQMGELNRMTQFKDKSSKHANNVNVGLFSYPVLQAADILLYQADQVPVGEDQKQHLELTRDIATRFNNLYGDVFKLPEPYIPEFGARVMSLQDPLKKMSKSDENPNGYIMLLDEPKKIEKKLKKAVTDSDEQARIYFDREEKPGVSNLLTLLSVATKRSIEDLVPEYEDKMYGHLKKDTAAAVVSMIEPIQTRFKEIREDQSLLDSIMKSGAEKASIRAEKTLKAVYDAVGFIPRP

SEQ ID NO: 82291 - protein, 506 aa, unidentified
  source 1..506: note = Phycosocius bacilliformis
  REGION 1..506: note = tr|A0A2P2EE35|A0A2P2EE35_9PROT Flavin-dependent tryptophan halogenase PrnA OS=Candidatus Phycosocius bacilliformis OX=1445552 GN=prnA_3 PE=4 SV=1
MTASTDKRIRSIVIVGGGSAGWMTAAALANTLKRDCRIVLVESDQIGTVGVGEATIPPIRTFNEMLGIDEREFVAKTKGSFKLGIEFVDWGGLGNRYFHPFGPHGRAFDIVGLHHYWLKARAAGDSTAFDDFSMAWALAQRGRFTRPNPDPRHVLSTFDYAYHFDAGLYARLLRDYSEARGVIRHEGKVVSVRQNGETGFVEGVTLENGTELTGDLFIDCSGFRGLLIGETLKVGYQDWTHWLPCDRAVAMPCAKVEGMLPYTRSTAREAGWQWRIPLQHRTGNGYVYCSKFISDDEAEATLRANLDGEVLAGPNRLRFTTGRREKFWEANVVAIGLSSGFLEPLESTSIHLIQAGISKLLALFPQRDFDPLIVNEYNHVAATEFERIRDFLVLHYKLTTRDDSPLWRYCAAMEIPETLQLKIDHFRRYGRHIARDMDLFGQPSWLAVHIGQGNIPEDVDPLFDFRGIDGRDYLAKLKAAMAAAAEQTTSHQAFVDTHCASERVPA

SEQ ID NO: 82292 - protein, 513 aa, Devosia sp.
  REGION 1..513: note = tr|A0A3S4GL99|A0A3S4GL99_9RHIZ Flavin-dependent tryptophan halogenase RebH OS=Devosia sp. M6-77 OX=2490941; GN = rebH PE=4 SV=1
MDKPAHFVIVGGGTAGWIAAFIIQDEARRRGLNFRISVVESSRIPTVGVGEATTAAFRVLLKHFGIDEFEFFRKTDASFKLGIRHEDWRRKGFTYYGPIDDPHQVVLAPPGAPSDYLNVYAVAAGRAVQDMHLFQPLLEQKKAPYAQKHDGSLIPLGPFHYAFHFDQALVGKFFASKSNGVDKVDAQVAGVERDGETGDITALVLDDNARLEGDFFIDATGFRKQIIVKALEAPWVSYAHELPVNRALPFWVDVKRGEELANYTRAWAQSSGWMWQIPTRTRYGCGYVYSDEFSTPEQAKDEVERVLGHEIEVRGDIRFQIGRLEKAWIGNCVAVGLSSSFLEPLESTSIHGTIVQMMLFAQRYMDHPNRISPAARDDYNARVGRQVDDFRTFVNTHYVTERDDTPFWREVRANRIHPETRERLARWSREMPRNDHFPNYLGGLPHIETQLHYPVLNGLGLLDQNLARREMEADPKLRRFAQQTFDGLVREYRAAANQALGHAEFLRIVQEMG

SEQ ID NO: 82293 - protein, 509 aa, Altererythrobacter sp.
  REGION 1..509: note = tr|A0A411Z9S9|A0A411Z9S9_9SPHN Tryptophan 7-halogenase OS=Altererythrobacter sp. BPTF-M16 OX=2169535; GN = prnA PE=4 SV=1
MSDPRAAPLGKILIVGGGSAGWMAATFLSRILGRIAKIELLESDAIGVVGVGEATIPPIRKFNNFCGVDEAAFLRDTQGTFKVGIQFENWGKVGDRYLHAFGRVGQELDALVRMHHWWRLGRQAAGPDYPAWEELFLGRAATDLDRFGFDPRNAGRLSELLPHAYHFDAIAYGQHLRKIAEAQGVKRIEGIAVDAERCSETGNVDAVKLNDGRRLDADLFIDCSGFRSILLGKVMEEPFEDWSHWLPADRAVAVQSQSRRSAIAPATRAIAHTVGWQWRIPLQHRVGNGHVYSSAFSSDDQAEARLRGQLGGEVIGEPRILRFATGRRQRSWVGNVVGLGLSAGFLEPLESTSIHLVQSGLERLAELLPGQEISPALRDRYNAQCSTEWGQIRDFIIAHYKLNQRDDSEFWRHCAEMDVPDTLAENLTLWEEHGELTINGGHLFQVGSWAAVLIGQNCLPAHVHTLTARVAASEIAPHINKLALSLRKQAETLPDHSAFLKRIGANSPS

SEQ ID NO: 82294 - protein, 537 aa, Pseudomonas fluorescens
  REGION 1..537: note = tr|Q4KAM7|Q4KAM7_PSEF5 Tryptophan halogenase PrnA; OS = Pseudomonas fluorescens (strain ATCC BAA-477 / NRRL B-23932 / Pf-5) OX=220664 GN=prnA PE=4 SV=1
MNKPIKNIVIVGGGTAGWMAASYLVRALQQQVNITLIESAAIPRIGVGEATIPSLQKVFFDFLGIPEREWMPQVNGAFKAAIKFVNWRKSPDPSREDYFYHLFGSVPNCDGVPLTHYWLRKREQGFQQPMAYACYPQPGALDGKLAPCLADGTRQMSHAWHFDAHLVADFLKRWAVERGVNRVVDEVVEVQLNDRGYISTLLTKEGRTLEADLFIDCSGMRGLLINQALKEPFIDMSDYLLCDSAVASAVPNDDAREGVEPYTSAIAMNSGWTWKIPMLGRFGSGYVFSSKFTSRDQATADFLKLWGLSDNQQLNQIKFRVGRNKRAWVNNCVSIGLSSCFLEPLESTGIYFIYAALYQLVKHFPDTSFDPRLRDAFNAEIVYMFDDCRDFVQAHYFTTSREDTPFWLANRHELRLSDAIQEKVERYKAGLPLTTTSFDDSTYYETFDYEFKNFWLNGNYYCIFAGLGMLPDRSLPLLQHRPESIQKAEAMFASIRREAERLRTSLPTNYDYLRSLRDGAQLSRNQHGPTLAAQERQ

SEQ ID NO: 82295 - protein, 505 aa, unidentified
  source 1..505: note = Saliniradius amylolyticus
  REGION 1..505: note = tr|A0A2S2E2V2|A0A2S2E2V2_9ALTE Tryptophan 7-halogenase OS=Saliniradius amylolyticus OX=2183582; GN = HMF8227_01496 PE=4 SV=1
MTTSNTLPVITIVGGGSAGWMSAIYLNRYFNKDHKQYHIRLIESPDVGIIGVGEATVHSIRYFFAAMGLNEAELIRQSQGTLKSGILFRNWMKPKDGRTHEYFHPFESNFSGPGIDISSLWMQSSSPFQRYDEAVCTSAHHIRDGLCAKGKNSRPYTGLVPYGYHLDANLMARYLRQQATAAGVEHIEALVDDVIVENHRIRAVHTDQGTFSGDIFIDCSGFKGLLINQLEPDNWRSFKAELPCDRAVAVQTKYEEDTVPKPYTVATALSNGWAWEIDLVNRRGNGYVYDSNRLTPEQAEAELLRHIDVTSDDIIKTNHLAMQVGCRNKFWSGNCIAIGLSGGFIEPLESTGLHVINLGVRLLASHLSGSEAESVAQAYNQAMNGIYDDLKQFIVLHYCLTDRDDTPFWQHAQTTASACPGLERKLELWQHKVCEYFDLAGGYSSTFTDENYRYVLYGMERSPSLSLRIDPATAAATFEQCQSRIQTMAEQLLPHHDYLASIHQA

SEQ ID NO: 82296 - protein, 512 aa, unidentified
  source 1..512: note = Mycobacteroides salmoniphilum
  REGION 1..512: note = tr|A0A4R8SN92|A0A4R8SN92_9MYCO Flavin-dependent tryptophan halogenase RebH OS=Mycobacteroides salmoniphilum OX=404941 GN=rebH PE=4 SV=1
MLEEVVIVGGGTAGWMTASYLKVAFGDRITVTVVESERIGAIGVGEATFSTIRHFFEYLGLEEHEWMPSCCATYKLGIRFQDWRQPGHHFYHPFERQRVVDGFSLTDWWLNNPRSDSFDRDCFLTGTLCDNEKSPRRLDGSLYMGTGGEGAAYRTTLSEQEEQFPYAYHFDASLLADFLRDFAVRRGVRHVVDDVVDVLQDDRGWISQVCTRAHGGIGGDLFIDCTGFAGLLLGRAMGEPFESYQGSLLNDRAVALRVPTDQGRRHLPPYTTATAQDAGWIWSIPLFGRIGSGYVYAADYCSPEDAERTLRDFVGPAAEGLEADHIRMRIGRSRRSWVRNCVAIGLASGFVEPLESTGIFFIQHGIEQLVKHFPDENWEESLRYSYNRVINRCMDGVREFLVLHYYLAARTDTQYWRDTKSVELPAALSERIEHWRSKLPDAGSVYPHYHGFEPYSYVCMFLGLGGIPGRAATAMRHLDATRAQREFELLAQQASRLRDSLPTHHEYLAQMY

SEQ ID NO: 82297 - protein, 514 aa, Teredinibacter sp.
  REGION 1..514: note = tr|A0A509DZL0|A0A509DZL0_9GAMM Flavin-dependent tryptophan halogenase RebH OS=Teredinibacter sp. ISS155; OX = 2584524 GN=rebH_4 PE=4 SV=1
MGQLISRVIIVGGGAAGWLTAAILAASNGKQGEKQQLEVMLVESPDIATVGVGEGTWPSMRTTLQEIGVSENEFIHFCDVSFKQGSKFIGWRNGGKEYYYHPFSLPESYTAFNSAVIWNAQKEGQKSFAQSVCAQAIVCENNLAPKQVSTPEYAFNVNYGYHLNAGKFTDFLRQHCVEKLGVLHLQQNITSVNQDDKGFITSLDTQCGESLAGDLFIDCSGGAALLIGKCYGIPMVNQDHILFNNRAVATQVPYRNEEAEIQSCTLSTAQQSGWIWDIGLTSRRGVGYTYSSEFATREEAERELSAYVLENEGLAKVEELNLKHISFNPGFREKFWTKNCVAIGMSAGFIEPLEASALVMVERSAKLLSEQFPLNLQATEVLAKRFNKTMRYHWDKIIDFLKLHYVLTERDDSPYWLAHKDQCSIPDSLQDLIELWRYQPPWKYDSYRVDELFPSASYQFVLYGMGFKAQYLSGNSEISASDYFRAVQQKSNQYIQALPKNRALLGELKNKIRI

SEQ ID NO: 82298 - protein, 538 aa, Pseudomonas fluorescens
  REGION 1..538: note = tr|Q9RPG3|Q9RPG3_PSEFL PrnA OS=Pseudomonas fluorescens OX=294 GN=prnA PE=4 SV=1
MNKPIKNIVIVGGGTAGWMAASYLVRALQQQVNITLIESAAIPRIGVGEATIPSLQKVFFDFLGIPEREWMPQVNGAFKAAIKFVNWRKSPDPSREDYFYHLFGSVPNCDGVPLTHYWLRKREQGFQQPMAYACYPQPGALDGKLAPCLADGTRQMSHAWHFDAHLVADFLKRWAVERGVNRVVDEVVEVQLNDRGYISTLLTKEGRTLEADLFIDCSGMRGLLINQALKEPFIDMSDYLLCDSAVASAVPNDDAREGVEPYTSAIAMNSGWTWKIPMLGRFGSGYVFSTKFTSRDQATADFLKLWGLSDNQQLNQINFRVGRNKRAWVNNCVSIGLSSCFLEPLESTGIYFIYAALYQLVKHFPDTSFDPRLRDAFNAEIVYMFDDCRDFVQAHYFTTSREDTPFWLANRHELRLSDAIQEKVERYKAGLPLTTTSFDDSTYYETFDYEFKNFWLNGNYYCIFAGLGMLPDRSLPLLQHRPESIQKAEAMFASIRREAERLRTSLPTNYDYLRSRRDGDAQLSRNQHGPTLAAQERQ

SEQ ID NO: 82299 - protein, 512 aa, Nocardia seriolae
  REGION 1..512: note = tr|A0A0B8NDE4|A0A0B8NDE4_9NOCA Halogenase; OS = Nocardia seriolae OX=37332 GN=prnA PE=4 SV=1
MVKNIVIVGGGTAGWMTASYLSAAFGDRMSVTLVESDRVATIGVGEATFSTVRHFFEYLGLEEHEWMPSCNATYKLGIRFENWRAPGHYFYHPFERQRVVDGFGLTDWWLHNPRSDRFDQDCFLVGALCDDEKSPRTLDGSLFGCDVGEGDSVRTTLSEQSAQFPYAYHFDASLLANFLRDYAVRRGVRHVVDDVVAVQRDQRGWIDCVRTRDHGDLVGELFVDCTGFKSLLLHGALEEPFVSYQDTLPNDRAVALQVPAGTGRKGLRPYTTATAQDAGWIWTIPLQGRTGTGYVYAEDYCTPEEAERTLRAFIGPGAKDLSANHIRMRIGRSRRSWVHNCVAIGLSSGFVEPLESTGIFFIQHGIEQLVKHLPDRDDGERLRDSYNRLVNRCMDGVREFLVLHYRGAARADNSYWKDAKTRPIPQALADRIEQWQVKLPDAESIYPHYHGFEPYSYVCMLLGLGGIPLRPSAAIALLDPNSAQREFDSVAVRSEQLRRSLPTHRDYFARRR

SEQ ID NO: 82300 - protein, 517 aa, unidentified
  source 1..517: note = Saliniradius amylolyticus
  REGION 1..517: note = tr|A0A2S2E3Z6|A0A2S2E3Z6_9ALTE Tryptophan 7-halogenase OS=Saliniradius amylolyticus OX=2183582; GN = HMF8227_01495 PE=4 SV=1
MSPIHNIVVLGGGTAGWLAANHLAKALNCRDSDEISVTLVESPDVPTIGVGEGTVPHIRHTLKYLGISETDVLRHCQATLKQSIQFINWNDSPSHRGKHSYHHLFDYPDMSRGDLTPYWLLSETKTPYADYVSVQSHLIHQGLAPKSMMHPEYQGVTEYAYHMDALKFSELLASHATEKLGVKRVSGHVTQPLLHPNGDIKALQFKDGNTLEGDFFVDASGFNARLLSDAYQIPLIDKRHVLLADTALALQVPYSQPDAAIPCSTLATAQEHGWIWDIGLTQRRGVGYVYSSAHTSEQQAADTLSQYLVQSGNAADLDYRRIPMQVGYRQQFWHRNCCAIGLSQGFVEPLEATGLLMFDLTARMLADTLPARRDQLAHAAKRYNQHVCYAWERVIDFIKLHYCISRRDDSDFWRDNREPASIPEHLSDKLYRWRYQVPSAYDFAQTNSIFNLDNYLYVLYGMEYHTDISAGAFRYAHSQQARQQAQFLKQMADQQSKQLMSHRKFLELAGQHGLQRI

SEQ ID NO: 82301 - protein, 557 aa, Alteromonas macleodii
  REGION 1..557: note = tr|A0A1E7D919|A0A1E7D919_ALTMA Tryptophan halogenase; OS = Alteromonas macleodii OX=28108 GN=BFV94_4204 PE=4 SV=1
MSDNESHSSMHRVVIVGGGTAGWLAAGILAAKLSANHTVTLIESPNIPSLGVGEGSWPSLRDTLLDIGISETEFLTVCHGAFKQGSSFVNWRKGGHCYYHPFTVPTGYNELDIYTCWKSIAPNTSYEDVFSLQAAMCAAGKAPKQIATPDYAHVLNYGYHFDATKLAELLKNHCVDKLNVAHVVGHVDSVHSHQNGDIESVSTKDGKKIVGDLFIDCSGHSGLLINKHFTIPWIPVKRTMLNDRAVALQVPYSNEDAEIKSTTVATAQTCGWTWDIALQHRRGVGLVYSSQFTDEDQAKQVLIDYVRERYPSAQDAELSFRTLSFEPGYRSQFWVKNCLSLGMSSGFVEPLEASAIAMVELGLRMLCEAFPQNKAHMEIVSKRYNSRFAYRWQRVIDFLKLHYALSDREEPYWLAQREKASIPDSLAELLELWKYQSPSRLDLIENEEIFPSASYQYVLYGMGFSSSTSPLRLNEEHKRKAVHIRETLQQTKNAYLQGLPSNRVLLNDIAKRYSNEKQHVPSHAQREKNEHASASSCNDIKNTSDKKDASYDRIGFR

SEQ ID NO: 82302 - protein, 498 aa, Alkalimonas amylolytica
  REGION 1..498: note = tr|A0A1H4D6V8|A0A1H4D6V8_ALKAM Tryptophan halogenase; OS = Alkalimonas amylolytica OX=152573; GN = SAMN04488051_105107 PE=4 SV=1
MTSQRIQQLVIVGGGTAGWISASLLMKMLGKAIQITLVESEQIGIVGVGEATIPPIMTFNAALGIDEAEFLRETKGSIKLGIQFENWGQLGDSYMHAFGGIGKEFPSCSFHHFWLRSQQAGMGFDFWDFSLAYQAAHKNKFSKLNRIEGVNLPGLSYAYHFDAGLYAQYLRRFSEQLGVNRIEGKVSEVVLNPDSGDVERLLLENGQQVAGDLFLDCTGLHSLLIEKTLNTGFEDWSHWLPADSAMAVPCESVEPITPYTRSIAHAKGWQWRIPLQHRIGNGFVYSSKYCSDEEARTTLMGNLDGEPLAEPRIIRFKTGRRLKQWNRNVVSIGLASGFLEPLESTSIHLIQSGVLRLLKFFPNHGISQADRDEYNRQSKVEFEQIRDFIILHYKLNQRGDSQYWKDCQRMDIPASLQRKMELFAQSGKVCREQDELFTEVAWQQVMIGQGLVPKDYHPLVNALTEQQLQELMEQLKAILTMTSDKLGSHDAFLQSISR

SEQ ID NO: 82303 - protein, 557 aa, Alteromonas sp.
  REGION 1..557: note = tr|A0A1J0RYK5|A0A1J0RYK5_9ALTE Tryptophan halogenase; OS = Alteromonas sp. Mex14 OX=1917157 GN=BM527_18875 PE=4; SV = 1
MSDNESHSSMHRVVIVGGGTAGWLAAGILAAKLSANHTVTLIESPNIPSLGVGEGSWPSLRDTLLDIGISETEFLTLCQGAFKQGSSFVNWRKGGHCYYHPFTVPTGYNELDIYTCWKVIAPNTSYEDVFSLQAAMCAAGKAPKQIATPDYAHVLNYGYHFDATKLAELLKNHCVDKLNVAHVVGHVDSVHSHQNGDIESVSTKNGQKIVGDLFIDCSGHSGLLIKKHFTIPWIPVKRTMLNDRAVALQVPYSNEDAEIKSTTVATAQTCGWTWDIALQHRRGVGLVYSSQFTNEEQAKQVLIDYVRERYPSAHDAELSFRTLFFEPGYRSQFWVKNCLSLGMSSGFVEPLEASAIAMVELGLRMLCEAFPQNKAHMEIVSKRYNSRFTYRWQRVIDFLKLHYALSDREEPYWLAQRDKASIPDSLAELLELWKYQSPSRLDLIENEEIFPSASYQYVLYGMGFSSSTSPLRLNEEHKRKAVHIRETLQQTKNAYLQGLPSNRVLLNDIAKRYNNEKQHVPSLAQREKNEHASASSCNDIKNTSDKKDTSYDRIGFR

SEQ ID NO: 82304 - protein, 557 aa, Alteromonas sp.
  REGION 1..557: note = tr|A0A495UJJ8|A0A495UJJ8_9ALTE Tryptophan halogenase; OS = Alteromonas sp. TK-46(2) OX=1276890 GN=CLW98_2651 PE=4; SV = 1
MSDNESHSSMHRVVIVGGGTAGWLAAGILAAKLSANHTVTLIESPNIPSLGVGEGSWPSLRDTLLDIGISETEFLTLCHGAFKQGSSFVNWRKGGHCYYHPFTVPTGYNELDIHTCWKAIAPNISYEDAFSLQAAMCAAGKAPKQIATPDYAHVLNYGYHFDATKLAELLKNHCVDKLNVVHVVGHVDSVHTHLNGDIESVSTRDGQKVVGDLFIDCSGHSGLLIKEHFHIPWTPVKRTMLNDRAVALQVPYSNEDAEIKSTTVATAQTCGWTWDIALQHRRGVGLVYSSQFTNEEQAKQVLVDYVRERYPSVQDAELSFRTLSFEPGYRSQFWVKNCLSLGMSSGFVEPLEASAIAMVELGLRMLCEAFPQNKAHMDIVSKRYNSRFAYRWQRVIDFLKLHYALSDREEPYWLAQRDKASIPDSLAELLKLWKYQSPSRLDLIENEEIFPSASYQYVLYGMGFSSSTSPLRLNEEHKRKAVHIRETLQQTKNAYLQGLPSNRVLLNDIAKRYNNEKQHVPSLAQREKNEHASASSCNDIKNTSDKKDTSYDRIGFR

SEQ ID NO: 82305 - protein, 505 aa, unidentified
  source 1..505: note = Thalassotalea euphylliae
  REGION 1..505: note = tr|A0A3E0UCU2|A0A3E0UCU2_9GAMM Tryptophan 7-halogenase OS=Thalassotalea euphylliae OX=1655234; GN = DXX92_03005 PE=4 SV=1
MSHPVKNIVIVGGGIAGWLSAAVIASYHQGASDEQFRITLVESSDVPTIGVGEGTWPTMKNTLRQIGLNEREVFARCHAAFKQGGKFVNWVHGNGDFYYHPFTVPLGYGKLDLAPYVESVENFAVESNFQHHICEAGLAPRGHADLDYQGPCNYAYHLDAGELANMLKEHCTQKLGVKHLVDTLCDTLIADDGSIEAIVLEKTGQLAADLFVDCTGARSLLLGQALGIGYKSLSDVLFNDSALAMQVPYESADTPVASHTIATAQDAGWIWDIGLTHRRGVGHVYSSRFTSDEKAEANLRRYLGKAADGLAARKISYKPGHREKFWHKNCVAVGMAAGFVEPLEATAIMLIELSSRFIGENLPADKALMPVVAKRFNQQMDYRWQRIADFLKLHYMLTQRPEPYWQAHCDEATFPQSLKDDLAIWRYRGPATSDFDSAIELFPAASYQYVLYGMEFKPDFSSQAYLYNQRQQAEQLIKRNQQLTQQMLQNLPAHRDYIEQWLATG

SEQ ID NO: 82306 - protein, 557 aa, Alteromonas macleodii
  REGION 1..557: note = tr|A0A2K9IGF4|A0A2K9IGF4_ALTMA Tryptophan halogenase; OS = Alteromonas macleodii OX=28108 GN=TE101_19890 PE=4 SV=1
MSDNESHSSMHRVVIVGGGTAGWLAAGILAAKLSANHTVTLIESPNIPSLGVGEGSWPSLLDTLLDIGISETEFLTLCHGAFKQGSSFVNWRKGGHCYYHPFTVPTGYNELDIHTCWQELAPNTSYEDAFSLQAAMCAAGKAPKQIATPDYAHVLNYGYHFDATKLAELLKNHCVDKLNVAHVVGHVDSVHSHQNGDIESVSTKDGKKIVGDLFIDCSCHSGLLINKHFAIPWIPVKRTMLNDRAVALQVPYSNEDAEIKSTTVATAQTCGWTWDIALQHRRGVGLVYSSQFTDEDQAKQVLIDYVRERYPSAQDAELSFRTLSFEPGYRSQFWVKNCLSLGMSSGFVEPLEASAIAMVELGLRMLCEAFPQNKAHMEIVSKRYNSRFAYRWQRVIDFLKLHYALSDREEPYWLAQREKASIPDSLAELLELWKYQSPSRLDLIENEEIFPSASYQYVLYGMGFSSSTSPLRLNEEHKRKAVHIRETLQQTKNAYLQGLPSNRVLLNDIAKRYNNEKQHVPSLAQREKNEHASASSCNDIKNSSDKKDTSYDRIGFR

SEQ ID NO: 82307 - protein, 522 aa, unidentified
  source 1..522: note = Microbulbifer aggregans
  REGION 1..522: note = tr|A0A1C9W319|A0A1C9W319_9GAMM Flavin-dependent tryptophan halogenase RebH OS=Microbulbifer aggregans; OX = 1769779 GN=rebH_2 PE=4 SV=1
MASAATSGHIQHVLVVGGGTAGWLTASHLAKKLRARSPGGVRVTLLESENIPTIGVGEGTVPAIRQTLQYLGISETDFIRECDATFKQSIKFVDWVDNPVPGQPSHYHHVFDYPDSSRGDLTPYWLKQAGPKPSFVDAVSVQGMVCERGLGPKNMTLPEFQGFTSYAYHLDAAKFARLLTRHAVEELGVHHLLGTVEQVKRSEDGDIAAVVTDRHGTLQADLFVDCTGFASLLLGQSLGVPFVDRRDTLFADYALAAQVPYGQYNEPIPSYTISTAQESGWIWDIGLPERRGTGYVYSSAHTDHERAETVFRHYLGATGENAEVRRISMKVGYRESFWERNCVAIGLSQGFVEPLEATGILVYDATAKMLADTFPANRQVMPAVAAQFNRHVHYAWERVIEFIKLHYCISRRSDSDFWLDNRAPESIPESLRDKLELWRYQPPSEYDFPSKLEIFNLPNYLYVLYGMGFFTSTEFIGNRFADGDAALSRFAEIEAGAGQLCAQLPAHRDLINKIKQFGLQKI

SEQ ID NO: 82308 - protein, 503 aa, Altererythrobacter namhicola
  REGION 1..503: note = tr|A0A1C7DBH2|A0A1C7DBH2_9SPHN Flavin-dependent tryptophan halogenase PrnA OS=Altererythrobacter namhicola; OX = 645517 GN=prnA PE=4 SV=1
MAIEKIVIVGGGTAGWMAAAALSRLIEGSSLSVTLIESEQIGTVGVGEATIPPFVDFNRQLEIDERELLSMINGTFKLGIQFVNWGQVGDSYIHPFGDYGYQIDGVPFHHLWHRMQALGDKRPIQVFNAETMAAFFGKFAPTPENQLEDLPPVNFAYHIDAGAYARFLRRYAEKRGAVRLEGRIEDTALDAETGFVTSVTMDNGETVEGDFFVDCSGFRGLLIEQALETGYEDWSHWLPCDRAVALPCNRDDGSPPAPFTRATAHSAGWQWQVPLQHRNGNGHVYCSTHMGDDEAHAILTSNLAGKPTADPNFLRFTTGRRKKFWNKNVVALGLAGGFMEPLESTSIHLINTGVTKLMALLSLSGVTQAQEDAFNRLTGKEYDRIRDFLILHYHRTDRTDSDFWNYVRTMDVPDTLKEKMSLFQSMGQVFREDDELFTQTSWAAVMLGQGLKMQGHSATADALDLNALKPEIDGIEQSIRFLVQNMPAHGEFLARYCPASAAA

SEQ ID NO: 82309 - protein, 503 aa, Cellvibrio japonicus
  REGION 1..503: note = tr|B3PB77|B3PB77_CELJU Tryptophan halogenase; OS = Cellvibrio japonicus (strain Ueda107) OX=498211 GN=rebH; PE = 4 SV=1
MSIDPVTSILIVGGGAAGWLSAGIIAARYGKSMAITLIESSDIATIGVGEGSWPSLRNTLRDMGIAETDFFRECDASFKQGVKFNHWKTGEQQDFYYHPFSLPVGFIERNMAEHWLREPQGSSFADAVCAQEKLCENNLAPRTRDTPEYKSHVNYGYHLDAGKFIRFLREHCKSKLGVQHVLGTINQVKQNANGIASIETTEGQQLSADLFIDCSGLKSLLLGETLGARFIDKSDELFIDSAVAVQVPYASEDTPILPYTLASAQTAGWIWEIGLYSRKGIGHVYSSRHMSEDEATHVLQDYVGKDFAGLSPRKLEIPCGYRECFWLKNCVAIGMSAGFIEPLEASALVMVELAANYIRDQLPQHKSVLPIVAKRFNELQTYRWQRIVEFLKLHYVLSQRNTRFWIDNREPHTIPESLRESLALWRYHVPYKKDFLHKEEVFPSASYQYILYGMGFAPELHHYGPADEPAMFARRLAENEKIKNHLSSILPDTRSLLKAMRGS

SEQ ID NO: 82310 - protein, 505 aa, Sphingomonas sp.
  REGION 1..505: note = tr|A0A1R1Z4A5|A0A1R1Z4A5_9SPHN Tryptophan halogenase; OS = Sphingomonas sp. Sph1(2015) OX=1628084 GN=BSZ14_00665; PE = 4 SV=1
MMNDRSAEAIRSVVIVGGGTAGWMTAAALAHAMPRGLSITLVESDAIGTVGVGEATIPPIRLFNQTLGIDEAEFLRETKGSFKLGIEFIGWGREGHRYFHPFGTHGKSFDLVAVHQHWLAAGGPASGVAFDDLSMAWGAGQRGRFAQPMADPRSVASTFDYAYHFDAGLYARFLRRYAEARGVVRVEGKISGHALEGARGHVASVTLDDGRVLAGDLFVDCSGFRGLLIEEALGTGYEDWTHWLPCDRAVAAPCETGGDGLTPYTRSTAREAGWQWRIPLQHRTGNGYVYCSRHISDDQAAATLMANLDGKALGDPRFLRFTTGRRKLMWNRNVVAIGLSSGFMEPLESTSIHLIQAGIAKLLAYFPTRAFAAAGIEEYNRVAITEYERIRDFLILHYKLTERTDAPLWRECAGMPIPDTLAMKIAHFRESGRLVARDMDLFGPASWAAVHIGQFNMPEGLDPLLAYADPAQSRGFVGKLASAIGQMAESMPSHADWLKKIGATA

SEQ ID NO: 82311 - protein, 413 aa, Jishengella sp.
  REGION 1..413: note = tr|A0A2W2F4J9|A0A2W2F4J9_9ACTN Tryptophan halogenase; OS = Jishengella sp. NA12 OX=1655439 GN=C1I95_00190 PE=4 SV=1
MSHPVPEYDVVVVGGGPAGSCTAGLLALEGHRVLLLERDKFPRYHIGESLITGVVPTLTALGVLDRMADLRFQVKYGGSLLWGADQSAPWSFRFREVRGGRFEYAWQVRRAEFDAMLLDRARELGVQVVEGATVREPLTDGDRIAGVRYQLRGESSPVDARAVMVVDASGQQRWLGRRFGLVDWYDDLRNVAVWSYWQGALRYPGEHEGDLLTESCRQGWLWYAPLSPTLTGIGYVTTSDRLVASGLPPEQLLEKQIAGSSEVAWLTSGAKRVDIYRAARDWSYTCTQFSGPGWVLVGDAAAFIDPLLSSGVTLAMRGASSVARAVHETLTAPDKERHVMQAYEDRYRDFLGSLLELVRFFYDGAHGKEELHLRAQAIVDPDHSLPPKISFVTLLSGLVRGDESLELGSLSDH

SEQ ID NO: 82312 - protein, 510 aa, Stenotrophomonas maltophilia
  REGION 1..510: note = tr|A0A0K2IWH3|A0A0K2IWH3_STEMA Tryptophan halogenase; OS = Stenotrophomonas maltophilia OX=40324 GN=YH67_10580; PE = 4 SV=1
MLDTESTPAGRIRKVVIAGGGTAGWLAGCALAHQFRDQLQITLVESEQIGTVGVGESTVPPIRTFHRFLQIDEQEFLRAVAGTFKLSISFENWRLPGDRFFHPFGTIGHGTWAAPFHHFWLDSLRRGMPSDLGDFCLESIASRGDRFSLHTQPQASYAYHFDASLYARFLRHRAEAHGLRRIEGRIALVRQHAHDGSVQALVLDDGQVIEGDLFIDCTGFRGLLIEQALGTGYEDWHEWLPCDRAVAVQTEAVAPPVPYTRAIAHEAGWRWHIALQHRVGCGLVYDSRHLSDDEAAAKLLRDAGAPPLRDPWKVPFRSGRRLKAWNGNVVSLGLASGFIEPLESTSIHLTISAVVRLIQLFPFDGIRASLVKLYNDVSRQEMEHVRDFIILHYHATQRTEPMWKACREMRVPESLQQRLQAWRERAHAWQDPGELFRVESWTSVLLGQGIAPGPAHPLARAVSDADLRTLLKGIQQPVQQAAAQMPTQAEFIAQYCRSGVDVWRSTAANA

SEQ ID NO: 82313 - protein, 488 aa, unidentified
  source 1..488: note = Sphingorhabdus sp.
  REGION 1..488: note = tr|A0A2D5DLZ5|A0A2D5DLZ5_9SPHN Tryptophan halogenase; OS = Sphingorhabdus sp. OX=1902408 GN=CMN74_12150 PE=4 SV=1
MTACLMAARWLGDDAARPVSITLVESPAIGIIGVGEGSTPQLKAFFDRLGIAEAEWMPACDATYKLGIRFTGWSERAGYDSYFHPFPSAIDLHTEGAFAHACRLKRGGIEAPVHPDHWFLPTKLADAKLGPHPDERFPFEPSYGYHFDAHKLGAFLSAHARGRGVNHVAARIADVERAANGDIAALLCEDGRRIEGDLFVDSSGFAALLAERTLGARFLPFAQNLFNDRAVVMPTPAAEAPPIATQATALSAGWAWSIPLTARTGNGYVYSSRHLSDDAAETELRRYLGLLDDPTEARFLKMKVGRLEDSWTANCLAVGLAQGFIEPLEATALHIVIATVEEFISAYEAGGFAAQHRAQFNARIARRYEGIRDYIVAHYRLNRRSGDYWREAASMDFLSDDLKAMMTAWFTGQDVDETIARLDIAGFYASTSWHCLFAGYGTFPDDAKLRAPTPAERIDEANAAEFLARSAMNFQGHAEQLADLRPSG

SEQ ID NO: 82314 - protein, 504 aa, Sphingomonas sp.
  REGION 1..504: note = tr|A0A2U1G204|A0A2U1G204_9SPHN Tryptophan halogenase; OS = Sphingomonas sp. URHD0007 OX=1298856 GN=H952_1975 PE=4; SV = 1
MGDQPKLSVVVVGGGTAGWMAAAALTKLLPTRCNVTLVESEAIGIVGVGEATLPHIRGFNDRLGINEAEFMAATRATFKLGIEFRDWGRPGDSYIHPFGTFGSGQGDVGFHQYWSRLRESGAPVSPLGDYSMAVTMAYMNRFARPDPDPDKIESTFNYAYQFDATLFAPYLRSISETLGASRIEGRIVDVELDSESGNVAALRLESGQRIEGDLFIDCSGFVSLVIGKALGEPFEDWSHWLPCDRAVAMPCRTETALAPYTSAIAMPAGWRWRIPLQHRTGNGYVYASSFTSDDEARSAIVGAVEGDAIAEPRVLKFKAGRRSRSWVRNCVAVGLASGFLEPLESTSIYLIQAAISALVELLPEPAISPLDRDEFNRLIDLEYDRIRDFLILHYHATERSDTPFWDYVRTMTVPASLEEKIELFRRRGRIVKYREGVFLDASWVAVYTGQRIIPEGHDMRADLPPIDALARSAEALRAEIRTKAERMADHRAHIEAYCPMAVAA

SEQ ID NO: 82315 - protein, 506 aa, Stenotrophomonas maltophilia
  REGION 1..506: note = tr|A0A0D0I2A6|A0A0D0I2A6_STEMA Tryptophan halogenase; OS = Stenotrophomonas maltophilia OX=40324 GN=SN15_04660; PE = 4 SV=1
MDTTEGRIRKVVIAGGGTAGWLAGCALAHQFRDQLDIVLVESEQIGTVGVGESTVPPIRMFHRFLQIDEQEFLRAVAGTFKLSISFENWRRPGDRFIHPFGTIGQGTWATPFHHFWLESLRRGMPSDLGEFCLESAASLGDRFSLQTQPQASYAYHFDASLYARFLRGKAEANGLRRVEGKIREVRQHAHDGAVASLVLEDGQVIDGDLFIDCTGFRGLLTEQTLHTGYEDWHEWLPSDRAVAVQTESVNPPVPYTRAIAHEAGWRWHIALQHRVGCGLVFSSRHMSDDEAQAKLLSDIEGRPLRDPWLVPFRSGRRLKAWNKNVVALGLASGFIEPLESTSIHLTISAVVRLIQLFPLEGISPSLMALYNDVSRQEMEHVRDFIILHYHANQRDEPMWKACREMALPESLQVRLRAWRERAHAWQDPGELFRVDSWTSVLTGQGIQPGPPHPLSRAISDADLRTLLDRIRRPVQQEVAKMPSQAAFIERYCNASAQAWQRGMAVT

SEQ ID NO: 82316 - protein, 538 aa, Burkholderia ubonensis
  REGION 1..538: note = tr|A0A105FT77|A0A105FT77_9BURK Tryptophan halogenase; OS = Burkholderia ubonensis OX=101571 GN=WJ75_15340 PE=4 SV=1
MSNPIKNIVIVGGGTAGWMAASYLVRALQQQTNITLIESAAIPRIGVGEATIPSLQKVFFDFLGIPEREWMPQVNGAFKAAIKFVNWRKPPERSRDDHFYHLFGSVPNCDGVPLTHYWLRKRELGFQQPMEYACYPQPGALDGKLAPCLPDGTRQMSHAWHFDAHLVADFLKRWAIERGVKQVVDEVVEVRLNDRGYISSLSTKEGRTLEADLFIDCSGMRGLLINQALKEPFIDMSDYLLCDSAVASAVPNADARVGIEPYTSAIAMNSGWTWKIPMLGRFGSGYVFSSKFTSRDQATADFLDLWGLPDNQPLNQIKFRVGRNGRAWVNNCVAIGLSSCFLEPLESTGIYFIYAALYQLVKHFPDTSFDPRLTNAFNAEIVHMFDDCRDFVQAHYFASSRDDTPFWLANRHDLRLSDAIKEKVERYKAGLPLTTTSFDDATYYETFDYEFKNFWLNGNYYCIFAGLGLLPDRSLPLLRHRPESIDKAEAMFARIRREAERLRTSLPTNYDYLRSLREGAAGLSRSQPGPTLAAPEIL

SEQ ID NO: 82317 - protein, 538 aa, Burkholderia ubonensis
  REGION 1..538: note = tr|A0A119UUP5|A0A119UUP5_9BURK Tryptophan halogenase; OS = Burkholderia ubonensis OX=101571 GN=WM16_12870 PE=4 SV=1
MSNPIKNIVIVGGGTAGWMAASYLVRALQQQTNITLVESAAIPRIGVGEATIPSLQKVFFDFLGIPEREWMPQVNGAFKAAIKFVNWRKSPERSRDDHFYHLFGNVPNCDGVPLTHYWLRKREQGFRQPMEYACYPQTEALDGKLAPCLPDGTRQMSHAWHFDAHLVADFLKRWAIERGVKRVVDEVVQVHLNDRGYISSLSTKEGRTLEGDLFIDCSGMRGLLINQALKEPFIDMSDYLLCDSAVASAVPNADARVGVEPYTSAIAMNSGWTWKIPMLGRFGSGYVFSSKFTSRDQATADFLDLWGLPDNQPLNQIKFRVGRNGRAWVNNCVAIGLSSCFLEPLESTGIYFIYAALYQLVKHFPDTSFDPRLTDAFNAEIVHMFDDCRDFVQAHYFTTSRDDTPFWLANRHDLRLSDAIQEKVQRYKAGLPLTTTSFDDSTYYETFDYEFKNFWLNGNYYCIFAGLGMLPDRSLPLLRHRPESIDKAEAMFARIRREAERLRTSLPTNYDYLRSLREGDAGLSRSQPGPTLAAPEIL

SEQ ID NO: 82318 - protein, 509 aa, Stenotrophomonas maltophilia
  REGION 1..509: note = tr|A0A1I6JCS0|A0A1I6JCS0_STEMA Tryptophan halogenase; OS = Stenotrophomonas maltophilia OX=40324; GN = SAMN04487782_0115 PE=4 SV=1
MDTANTAEGRIRKVVIAGGGTAGWLAGCALSHQFRDQLDITLVESEQIGTVGVGESTVPPIRTFHHFLQIDEQEFLRAVAGTFKLSISFENWRLPGERFFHPFGTIGHGTWATPFHHFWLDSLRRGMPSDLGDFCLESVASRDDRFSLQTQPQPSYAYHFDAGLYARFLRRRAEAQGLRRVEGRIAEVRQHAHDGSVQSLVLDDGQVIEGDLFIDCTGFRGLLIEQTLKTGYEDWHEWLPCDRAVAVQTESIAPPVPYTRAIAHEAGWRWHIALQHRVGCGLVYSSRHMSDDEARAKLLRDVGAPPLRDPWQVPFRSGRRLQAWNRNVVALGLASGFIEPLESTSIHLTISAVVRLIQLFPFDGIAASLVQLYNEVSRQEMEHVRDFIILHYHATQREEPLWKACREMALPESLQQRLRAWRERAHAWQDPGELFRVESWTSVLLGQGIQPGRPHPLARALSDADLRTLLKRIQQPVRQAATQMPSQAEFIDRYCRSGPEVWHANRVAS

SEQ ID NO: 82319 - protein, 509 aa, Stenotrophomonas maltophilia
  REGION 1..509: note = tr|A0A2W6KID0|A0A2W6KID0_STEMA Tryptophan halogenase; OS = Stenotrophomonas maltophilia OX=40324 GN=A7X82_04795; PE = 4 SV=1
MDTQSTPAGRIRKVVIAGGGTAGWLAGCALAHQFRDQLQITLVESEQIGTVGVGESTVPPIRTFHRFLQIDEQEFLRAVAGTFKLSISFENWRLPGDRFFHPFGTIGHGTWAAPFHHFWLDSLRRGMPSDLGDFCLESIASRGDRFSLHTQPQASYAYHFDAGLYARFLRRRAEAHGLRRIEGRIAQVRQHAHDGSVQALVLDDGQVIEGDLFIDCTGFRGLLIEQALGTGYEDWHEWLPCDRAVAVQTEAVAPPVPYTRAIAHEAGWRWHIALQHRVGCGLVYDSRHLSDDEAAAKLLRDAGAPPLRDPWKVPFRSGRRLKAWNRNVVSLGLASGFIEPLESTSIHLTISAVVRLIQLFPFDGISASLVQLYNDVSRQEMEHVRDFIILHYHATQRSEPMWKACREMRVPESLQQRLQAWRERAHAWQDPGELFRVESWTSVLLGQGIAPGPAHPLARAVSDVDLRTLLKGIQGPVQQAAAQMPAQAEFIAQYCRSGVDVWRSTTAST

SEQ ID NO: 82320 - protein, 245 aa, Sphingomonas sp.
  REGION 1..245: note = tr|A0A2U1FY81|A0A2U1FY81_9SPHN Tryptophan halogenase; OS = Sphingomonas sp. URHD0007 OX=1298856 GN=H952_0583 PE=4; SV = 1
MLWEGAVTFPSFLLGSRVKPELRRFGWSQSPVVVIDEFSGDGEAIGRIADALAPFPKVDTGYFPGVRRMITRADVDADAYVERTCRDAAQFVAGAFDADGFDLVEASFSIVSAKPESLAVRQRAPHFDSTDQKYIAILHYLRVPRNSGTAFYRQRTTGIERVSESNVDRFVSTARTDAAKLPDGSGYITGSDEFFEQIGSVEAVPDRLIIYQGSLLHSGIIPSGMSFSADPRQGRLTANIFVRGN

SEQ ID NO: 82321 - protein, 485 aa, Pseudoalteromonas sp.
  REGION 1..485: note = tr|A0A4Q6YC59|A0A4Q6YC59_9GAMM Tryptophan 7-halogenase OS=Pseudoalteromonas sp. CO325X OX=1777262; GN = EXT46_06495 PE=4 SV=1
MNNINTITIVGGGTAGWMCAAYLSKHHRDKTVRMIESAHIGRIGVGEGSTPHLQQFMADLGVTESSWMRACDATYKAGIRFSHWNGDDSEYFHPFFSELDEKTAEVFFVNANARRRGAAVPAHPDGYFLAAQLAAQNRAPKALSALARPLHYGYHFDAQKLADWLRAYACARGVEHISGTVSQVQGRQRIEHVTLADGRTLQGDFYIDASGFQSLLVEKALQEPFISFNDELLNDRAVAFATEALPNPPVYTHAQAMPSGWRWHIPLQSRCGNGYVYSSQYLSAEQAELQLRQALGEYHSSAKHLHMRVGMMRRALVSNVMAVGLAQSFIEPLEATALMITGHSITLLSQFIEGLVSAQQLNDELHTLVLGVKDYILGHYATSRRVDTPYWLASAGIAAQSPRIAPLLQRWCSGGDIDQWLHQHRHQQAYNRASWYCLLAGMDYRDTHLTQPFECAPAQIDSAAKAYVKTLCETHFGVHEQVLRL

SEQ ID NO: 82322 - protein, 538 aa, Burkholderia ubonensis
  REGION 1..538: note = tr|A0A106K3L1|A0A106K3L1_9BURK Tryptophan halogenase; OS = Burkholderia ubonensis OX=101571 GN=WL19_01745 PE=4 SV=1
MSNPIKNIVIVGGGTAGWMAASYLVRALQQQTNITLIESAAIPRIGVGEATIPSLQKVFFDFLGIPEREWMPQVNGAFKAAIKFVNWRKSPERSRDDHFYHLFGSVPNCDGVPLTHYWLRKRELGFQQPMEYACYPQPGALDGKLAPCLPDGTRQMSHAWHFDAHLVADFLKRWAIERGVKQVVDEVVQVHLNDRGYISSLSTKEGRTLEADLFIDCSGMRGLLINQALKEPFIDMSDYLLCDSAVASAVPNADARVGIEPYTSAIAMNSGWTWKIPMLGRFGSGYVFSSKFTSRDQATADFLDLWGLPDNQPLNQIKFRVGRNGRAWVNNCVAIGLSSCFLEPLESTGIYFIYAALYQLVKHFPDTSFDPRLTNAFNAEIVHMFDDCRDFVQAHYFASSRDDTPFWLANRHDLRLSDAIKEKVERYKAGLPLTTTSFDDATYYETFDYEFKNFWLNGNYYCIFAGLGLLPDRSLPLLRHRPESIDKAEAMFARIRREAERLRTSLPTNYDYLRSLREGAAGLSRSQPGPTLAAPEIL

SEQ ID NO: 82323 - protein, 505 aa, Xanthomonas translucens
  REGION 1..505: note = tr|A0A1M4IRR4|A0A1M4IRR4_XANCT Tryptophan halogenase; OS = Xanthomonas translucens pv. graminis OX=134874; GN = XTGNCPPB3709_3097 PE=4 SV=1
MAQIRKVVIAGGGTAGWIAACALAHQFRDLLDITLIESEQIGTVGVGESTVPPIRSFHRFLQIDEQEFLRAVAGTFKLSISFENWRRPGERYLHPFGLTGQSTLACAFHHFWLEAQRRGMLSELGDYCLETVASRMDRFALQQSPPVNYAYHLDAGLYARLLRRHAERYGLKRVEGRIQQVRQHAESGGVEALLLEDGTLVEGELFIDCTGFRGLLIEQTLHTGYEDWQQWLPCDRAVAVQTEAVAAPVPYTRAIAHAAGWRWHIPLQHRVGCGLVFSSAHLSDDEARAKLLHDAAAPPIKEPWLVPFRTGRRRKAWNKNVVALGLASGFIEPLESTSIHLTIAAVMRLITLFPSESIAPSMVDLYNAVSRAEMEHVRDFIILHYHANQRDEPMWQACREMALPDSLQQRLRAWRERAHAWQGADELFRVDSWIHVLLGQGIVPAQHHPLARALPDQPLQQFLDAIRQPIDRAVAQMPSQQDFIARYCKAGPEVWAGRAPVAAPA

SEQ ID NO: 82324 - protein, 509 aa, unidentified
  source 1..509: note = Sapientia aquatica
  REGION 1..509: note = tr|A0A4R5VPZ1|A0A4R5VPZ1_9BURK Tryptophan 7-halogenase OS=Sapientia aquatica OX=1549640; GN = E2I14_18010 PE=4 SV=1
MKVNNIVIIGGGTAGWLAANHLAVELRAETDITITVIESPEIGIIGVGEGTVPHIKKSLMKFGISEAELLATCDATFKKGIKFSNWMNPSAANPSNSYYHPFTSPFPGGVDVTARYLSNPQHMNFAEVTEVAALADAMKAPKKVSSAPYEGVVNYAYHFNAVKFGKLLSKNARERLNVKHLSATIVDAKLNEQGEIAYLITKEGEHLHYDFYVDCSGFHSLLLGKLLNVPFVNKSNQLLTDSALAVQLPTDDKVDIAPYTLATAHSAGWIWDIPLTTRRGIGFVYSSAHMSEEAAVENMSRYLQLDVDQFSPRKIPMRMGYREKFWCKNVVALGLAQGFVEPLEATSIFVTDFTAELFARNFCVERESMSIAANYCNKVANYAWERVIDFVQMHYCISDRRDSEFWRINTEETPRSDVLAERFEMWRYHPPKQTDFFSRFDLFNVDNFLFVLYGMKYATKPKNMTDYEQQFFHREIAEVRLREEKLLKELLGHRDWLERFNAAYQLSLG

SEQ ID NO: 82325 - protein, 515 aa, Pseudoalteromonas sp.
  REGION 1..515: note = tr|A0A4Q6Y3K7|A0A4Q6Y3K7_9GAMM Tryptophan 7-halogenase OS=Pseudoalteromonas sp. CO325X OX=1777262; GN = EXT46_15205 PE=4 SV=1
MKDLSRVIVVGGGTSGWLSAAYLASSFKRTGRDIKVSIIESDTIPTIGVGEGTFPTIVNTLYEIGLSEKEFITACDASFKQGALFKNWLYNPSDKPHAYYHPFDPPAKPKGLDLSAYWVSRKHQGTMQQDFAHATSVQSFLCDENLAPKTPETGEYAWLAKYAYHLDAAKLGQLLKKHAMNKLQVEHIVADIEQVELDEQGFIAHLVDKQQRQHDADFFVDCTGFSSLLLAKALNVPFVDKSHYLTVDTAVVLPVEYADAETPITTHTVSTAQDAGWIWDIALQNRRGTGYVYNSHYCSKEQAEKTLCDYHGIAHDSEKRYRHISFKTGYREKSWAKNCCAIGFSSGFVEPLEATAIAMVEAGVRSLAARFPATREAMLEREKQYNRIFTSRWDNIIDFIKLHYCLTKRDDTPFWREQKNPKTIPTSLQEKLKAWQHYGITDGDLPYKYDLFTLASWQYILYGLEFLPDYVEKAPINEEIIDKAFASIAAQKRSAASKLLSNRALLEAFGASCKS

SEQ ID NO: 82326 - protein, 535 aa, Saccharopolyspora jiangxiensis
  REGION 1..535: note = tr|A0A1I1YKQ8|A0A1I1YKQ8_9PSEU Tryptophan halogenase; OS = Saccharopolyspora jiangxiensis OX=418522; GN = SAMN05216506_109211 PE=4 SV=1
MTQTDAAAKNLGDPGKTRRVVVVGGGTAGWMTASYLTAAFGDKIDVTVVESAQIGTIGVGEATFSDIRHFFEFLRLAESDWMPACNATYKLAVRFENWREPGHHFYHPFEQMGSIDGFPLSDWWLRHPRTDRFDKDCFVMASLCDAQRSPRYLDGTPVDQGVFETGHGEETARATMAEYQGAQFPYAYHFEAHLLAKFLTKYATDRGARHVVDNVVDVALDEHGFISHVKTAEHGELAGDLFVDCTGFRGLLMNKALGEPFISYQDTLPNDSAVALQVPLDMDREPLRPCTTATAQEAGWIWTIPLISRIGTGYVYASDYCEPEEAERVLREFVGPEAADVEANHIRMRIGRSRRSWVNNCVAVGLSSGFVEPLESTGIFFIHHAIEQMVKYFPSGRDDDRLRNMYNRSTANVMDGVREFLCLHYRAAKRADTQYWKDTKTRPVPEALEERLENWKYKVPDAETVYPYYHGLPPYSYNCILLGAGGFDIRHSPALDLADETAALAEFERIRLKAEKLVQELPTQNEYFAKMRESA

SEQ ID NO: 82327 - protein, 509 aa, Stenotrophomonas maltophilia
  REGION 1..509: note = tr|A0A0R0BFS7|A0A0R0BFS7_STEMA Tryptophan halogenase; OS = Stenotrophomonas maltophilia OX=40324 GN=ARC23_05665; PE = 4 SV=1
MDTESTPAGRIRRVVIAGGGTAGWLAGCALAHQFRDQLEITLVESEQIGTVGVGESTVPPIRTFHRFLQIDEQEFLRAVAGTFKLSISFENWRLPGERFFHPFGTIGHGTWAAPFHHFWLDSLRRGMPSDLGDFCLESVASRGDRFSLQTQPQASYAYHFDAGLYARFLRRRAEAHGLRRIEGRIAQVRQHAHDGSVQALVLEDGQVVEGDLFIDCTGFRGLLIEQTLGTGYEDWHEWLPCDRAVAVQTEAVAPPVPYTRAIAHEAGWRWHIALQHRVGCGLVYSSRHLSDDEATAKLLRDVGAPPLRDPWQVPFRSGRRLKAWNRNVVALGLASGFIEPLESTSIHLTISAVVRLIQLFPFDGISASLVQLYNDVSRQEMEHVRDFIILHYHATQRSEPMWKACREMRVPESLQQRLQAWRERAHAWQDPGELFRVESWTSVLLGQGIPPGPPHPLARAVSDADLRTLLKGIQQPVQQAAAQMPTQAEFIAHYCRSGADVWRPIATTA

SEQ ID NO: 82328 - protein, 496 aa, Stenotrophomonas maltophilia
  REGION 1..496: note = tr|A0A2T1INM3|A0A2T1INM3_STEMA Tryptophan halogenase; OS = Stenotrophomonas maltophilia OX=40324 GN=C7E18_17220; PE = 4 SV=1
MSVSPLCRRSAPSTASCRSTSRSSCAQITLVESEQIGTVGVGESTVPPIRTFHRFLQIDEQEFLRAVAGTFKLSISFENWRLPGDRFFHPFGTIGHGTWAAPFHHFWLDSLRRGMPSDLGDFCLESIASRGDRFSLHTQPQASYAYHFDAGLYARFLRGRAEAHGLRRIEGRIAQVRQHAHDGSVQALVLDDGQVIEAICSSTAPASALLIEQALCTGYEDWHEWLPCDRAVAVQTEAVAPPAPYTRAIAHEAGWRWHIALQHRVGCGLVYDSRHLSDDEAAAKLLRDAGAPPLRDPWKVPFRSGRRLKAWNRNVVSLGLASGFIEPLESTSIHLTISAVVRLIQLFPFDGISASLVQLYNDVSRQEMEHVRDFIILHYHATQRSEPMWKACREMRVPESLQHRLQAWRERAHAWQDPGELFRVESWTSVLLGQGIAPGPAHPLARAVSDVDLRTLLKGIQRPVQQAAAQMPAQAEFIAQYCRSGVDVWRSTAASA

SEQ ID NO: 82329 - protein, 489 aa, Sphingomonas sp.
  REGION 1..489: note = tr|A0A1R1Z1X9|A0A1R1Z1X9_9SPHN Tryptophan halogenase; OS = Sphingomonas sp. Sph1(2015) OX=1628084 GN=BSZ14_04995; PE = 4 SV=1
MSAPIRHVLVAGSGLTAWSAAAALKRRAPFLDVTLLATPPAADALADRIACTLPSLPGFHADLGISEDDGVTRTGSGYRLGTRFSGWAEGLPDYVHAYGGYGHAIGPAAFHLHWLRAARDGSAAPFDAYCPAAQLARAGGFVPPSPGTPFAGHDYGLTLDLPRQVAMMRAFALHVGVREVTDSITEVQVDPTGHVTAIAVQHGAALTAHLYIDATGPAALLRGSIDDAWQDWNEWLPCDRVLLGTQVSGEGAPVLTPVTAHAAGWRWSSGEQVGIAYSSEHLSDTGAAAMLARDGAVVDTPIAIRPGTRPQAWRGNCIAIGDAATQVEPLEWCNLHLALSAIDRLVTMLPDTAMAEVEAADFNRQTLAEAERVRDFLAAHYRTARRPEPMWQAVAKAELPASLAHTLGQFGERGRLPFYEEETFTRDSWAAILLGQGYLPRRIDPLVHGIPAAQVDAAMARMTDAIAAALPHVPAHAQWRAAQMRRLAR

SEQ ID NO: 82330 - protein, 510 aa, Stenotrophomonas maltophilia
  REGION 1..510: note = tr|A0A246I554|A0A246I554_STEMA Tryptophan halogenase; OS = Stenotrophomonas maltophilia OX=40324 GN=CEE63_11910; PE = 4 SV=1
MLDTQSTPSGRIHKVVIAGGGTAGWLAGCALAHQFRDQLQITLVESEQIGTVGVGESTVPPIRTFHRFLQIDEQEFLRAVAGTFKLSISFENWRLPGDRFFHPFGTIGHGTWAAPFHHFWLDSLRRGMPSDLGDFCLESIASRGDRFSLHTQPQASYAYHFDAGLYARFLRGRAEAHGLRRIEGRIAQVRQHAHDGSVQALVLDDGQVIEGDLFIDCTGFRGLLIEQALGTGYEDWHEWLPCDRAVAVQTEAVAPPVPYTRAIAHEAGWRWHIALQHRVGCGLVYDSRHLSDDEAAAKLLRDAGAPPLRDPWKVPFRSGRRLKAWNRNVVSLGLASGFIEPLESTSIHLTISAVVRLIQLFPFDGISASLVQLYNDVSRQEMEHVRDFIILHYHATQRSEPMWKACRETRVPESLQHRLQAWRERAHAWQDPGELFRVESWTSVLLGQGIAPGPAHPLARAVSDVDLRTLLKGIQRPVQQAAAQMPAQAEFIAQYCRSGVDVWRSTAATA

SEQ ID NO: 82331 - protein, 510 aa, Stenotrophomonas maltophilia
  REGION 1..510: note = tr|A0A2W6LCV3|A0A2W6LCV3_STEMA Tryptophan halogenase; OS = Stenotrophomonas maltophilia OX=40324 GN=B9Y88_11370; PE = 4 SV=1
MLDTQSTPAGRIRKVVIAGGGTAGWLAGCALAHQFRDQLQITLVESEQIGTVGVGESTVPPIRTFHRFLQIDEQEFLRAVAGTFKLSISFENWRLPGDRFFHPFGTIGHGTWAAPFHHFWLDSLRRGMPSELGDFSLESIASHGDRFSLHTQPQASYAYHFDASLYARFLRRRAEAHGLRRIEGRIAQVRQHAHDGSVQALVLDDGQVIEGDLFIDCTGFRGLLIEQTLGTGYEDWHEWLPCDRAVAVQTEAVAPPVPYTRAIAHEAGWRWHIALQHRVGCGLVYDSRHLSDDEAAAKLLRDAGAPPLRDPWKVPFRSGRRLKAWNRNVVSLGLASGFIEPLESTSIHLTISAVVRLIQLFPFDGISASLVQLYNDVSRQEMEHVRDFIILHYHATQRSEPMWKACREMRVPESLQQRLQAWRERAHAWQDPGELFRVESWTSVLLGQGIAPGPAHPLARAVSDADLRTLLRGIQQPVQQAAAQMPAQAEFIAQYCRSGVDVWRSTAASA

SEQ ID NO: 82332 - protein, 509 aa, Erythrobacter litoralis
  REGION 1..509: note = tr|Q2NC66|Q2NC66_ERYLH Tryptophan halogenase, putative OS=Erythrobacter litoralis (strain HTCC2594); OX = 314225 GN=ELI_03165 PE=4 SV=1
MNPTDLPPIVIAGGGTAGWMAAATLGRFAGRKVLLVESEAIGTVGVGEATIPQIRLFNAALGLDEAEFLRETQGTFKLAIEFAGWGGEGERYLHAFGTVGHGAGVLPFQHYWLRARQAGKAGPLSDYALNDVASRAGKMQMWQAEPGKPVPDMPWAYHFDAGLYAAYLRRYAEAHGVERVEGTIASVERDGESGDIAALVLDGERRIEGGVFVDCTGFRSLLLGGALGVEFMDWTQWLPCDRAVAVPCETKGEFTPYTRSTARKAGWQWRIPLQHRIGNGHVFCSDFMGEDEATKTLLANLDGAPTADPRVLKFTTGMRAQQWSHNCMALGLAGGFMEPLESTSIHLIQASIARLLQMLPGAEVAPAMRAEFNRQAEFEWTRIRDFLILHYWANGREGEPFWDRCRAMDVPDTLSTKVETFRASGFVHREHEELFTEPGWLQVLIGQGVVPENYNPIADAMPEVELTAMLARIAETNQRLVAAMPDHAPFLRAHIDPRKQAPTQQRIPA

SEQ ID NO: 82333 - protein, 505 aa, unidentified
  source 1..505: note = Phycosocius bacilliformis
  REGION 1..505: note = tr|A0A2P2ED60|A0A2P2ED60_9PROT Flavin-dependent tryptophan halogenase PrnA OS=Candidatus Phycosocius bacilliformis OX=1445552 GN=prnA_2 PE=4 SV=1
MQDRNLDNLVIVGGGSAGWMAAAAAANAAGRACEITLIESDEIGTVGVGEATIPPIKVFNRSLGIDEREFVVQTKGTFKLGIEFVNWGRQGHRYFHPFGTYGVDFDMVPLHQYFLRARQRGMSPGSLDDFTMAWQVAKRGRFAPPTQDPRLIQSTYDYAYHFDAGLYARYLRSYAEARGVKRLEGKIADVGLSQKDGRIDFVRLEDGRVVAGDFFVDCSGFRGILIEGALKTGYEDWSHWLPCNRAVAVPCAHGGEFTPYTRSTAREAGWQWRIPLQHRIGNGYVYSSDFISDQEAQRTLLANLDGKALADPRPLRFTTGRRKKAWNKNCVAIGLAAGFMEPLESTSLHLIQTGITRFLALFPDKEIDPVLEAEFNRLTTYEWERIRDFLILHYCATERTDTELWRYCANMSLPDTLAYKLAHFRKYGRMVSDGPELFLNPSWLAVYLGQFVEPSGYDPLVDARPQVEADRHLASLKKLMAETAETLPTHRMFIAQNCQAATVET

SEQ ID NO: 82334 - protein, 509 aa, Stenotrophomonas maltophilia
  REGION 1..509: note = tr|A0A4S2CTA9|A0A4S2CTA9_STEMA Tryptophan 7-halogenase OS=Stenotrophomonas maltophilia OX=40324; GN = E5352_18415 PE=4 SV=1
MNVANTPHARVRKVVIAGGGTAGWLAGCALSHQFRDQLDITLVESEQIGTVGVGESTVPPIRAFHRFLQIDEQEFLRAVAGTFKLSISFENWRRPGDRFIHPFGTIGQGTWAAPFHHFWLDSLRRGMPSELGDFCLESVASRGDRFSLDTRPQLNYAYHFDASLYAKFLRRRAEAQGLRRVEGKIRNVQQHADDGSVAALVLEDGQIIEGDLFIDCTGFRGLLTEQTLHTGYEDWHDWLPSDRAVAVQTGSVSPPVPYTRAIAHEAGWRWHIALQHRVGCGLVFSSRHMSDDEAHAKLLRDVEGPPLRDPWLVPFRSGRRLKAWNRNVVALGLASGFIEPLESTSIHLTISAVVRLIQLFPFDGISPALMTLYNDVSRQEMEHVRDFIILHYHANQRDEPMWKACREMPLPESLAIRLRAWRERAHAWQDPGELFRVDSWTSVLMGQGIQPGPPHPLARAIDDADLRTLLARIRQPVQQAVATMPSQAAFIERYCRAGEDVWPRAPALT

SEQ ID NO: 82335 - protein, 506 aa, Pseudoalteromonas sp.
  REGION 1..506: note = tr|A0A4Q6YA66|A0A4Q6YA66_9GAMM Tryptophan 7-halogenase OS=Pseudoalteromonas sp. CO325X OX=1777262; GN = EXT46_15200 PE=4 SV=1
MKKLRKVVIVGGGTSGWLAANHIGKRLLGSDIEVCLIESPTIPTIGVGEGTVPMMVSTLQSFGISEQTFITQCDATFKQSIKFINWLDKHHHGEHNYYHHLFEYPFPNNQDVTQTWLSDTTAASFAETVSFQHMLCEQGVGPKAITHAQYTGHASYAYHLNALKFAQLLKDNATSRFNVKLLKTNVTAVKCNDEGHISELQTDDSGQVSGDFFVDCSGFSSILHRQALGVKSVDVSDQLPIDKAITAQVPTSADDAIPPYTLATAHQAGWIWDIALTTRRGTGFVYASDYLTKEQAYTKFERYLGQPLSGLKVREIDMKAGFAERAWHKNCVALGLAQGFVEPLEATSILLTDFSAKLLAENLPVQHHALALAAKKYNEIVDYAWRRVVDFIQLHYYLSDRQDSAFWRAMKSTDSMSVVLKERLALWQYQVPKKSDFNSKYEVFELENYLYILYGMHFKPCAHLVAKPEHKELIAMLTSYGEQLLKQLPKHRALLNNIAQHGLQKI

SEQ ID NO: 82336 - protein, 497 aa, Sphingomonas sp.
  REGION 1..497: note = tr|A0A2U1FX08|A0A2U1FX08_9SPHN Tryptophan halogenase; OS = Sphingomonas sp. URHD0007 OX=1298856 GN=H952_0157 PE=4; SV = 1
MRKILIVGGGTAGWMTAALFGKLFQGLYDIELVESEAIGTVGVGEATIPAIKKYNELVQLDEVEFMRRTQGTFKLGVQFVDWLKPGHSYIHGFGVIGQDWEWLRCHHYWLRANQRGRARDFADYSINTAAALANKFIHPRPDMADSPIGHIVHAFQFDAALYAKYLRGLAEQHGVRRTEGKIVDVGLHDNGDIASVTLEVGQKIEADFFIDCSGFRGLLIGQTLKTEYEDWTHWLPCDRAMAVPCTRVAPLTPYTRATARDAGWQWRIPLQHRTGNGLVYSSKHIDDDAAEKLLLANLDGEQLANPNKLRFTTGKRRKMWTRNCVAIGLAAGFLEPIESTSIHLVQSAAIRLVRLFPDAATDQATIDEFNRQSDFEWERVRDFIILHYWANQRDGDFWKYCREMELPETLQRKIDLWCSNGRIFREDDELFSEESWIEVFLGQGVVPRSYDPLVTIKSDAQIEQYLGNIAATIERCVEVMPTHAEYVAKYSAAEPVA

SEQ ID NO: 82337 - protein, 505 aa, Sphingomonas sp.
  REGION 1..505: note = tr|A0A1R1Z201|A0A1R1Z201_9SPHN Tryptophan halogenase; OS = Sphingomonas sp. Sph1(2015) OX=1628084 GN=BSZ14_04990; PE = 4 SV=1
MTKVTNDVVRVVIVGGGTAGWMAGAALTRLLSGQCSVRLIESEAIGVVGVGEATLPHIRSFNERLGIPEAEFMARTRATFKLGIEFRDWGRIGDSYIHPFGTFGRGTGAIDFHHYWSRLVREGRDLPPLDQLSYACTLAREARFEHPDQDRGGLSSTFGYAYQFDALLFAPYLRSLAEEAGAVRTEGLVVDVERDGQNGLIRAVVLDSGERVEGDLFVDCSGFRSLLLGQTLDEPFEDWSKWLPTDRAVAMPCRTETAVTPYTSAIAMPAGWRWRIPLQHRTGNGYVYASAFVSDADAAHALEKAVEGEKLAEPRLLRFKAGRRRRSWVGNCVAIGLASGFLEPLESTSIYLVQQAITALIELFPGRRMEASDRDEFNRVIDLEYDRIRDFLILHYHATSRDDSPFWNYVRTMPIPDSLGEKLELWRRRGRVVKYREGVFLDASWIAVYLGQGIVPEGWDPRADAAGTGDLVQAVAALRSEIAAEVAIRPDHRAFLERYCPMVAA

SEQ ID NO: 82338 - protein, 506 aa, Sphingomonas sp.
  REGION 1..506: note = tr|A0A2U1G2H7|A0A2U1G2H7_9SPHN Tryptophan halogenase; OS = Sphingomonas sp. URHD0007 OX=1298856 GN=H952_2144 PE=4; SV = 1
MDQELRRRIVIVGGGTAGWMTAAALARFCLPLFDVTLVESDEIGIVGVGEATIPSIREFNSALAIDEAEFLAATGATYKLGIAFEGWGRPDKGYVHAFGLVGAALGVVPFHHYWLRGRALGISKPLGHYILHTIAIAGNRFAHVERPPDSVLPPMPYAFQFDASLYAKYLRGDAERGGVTRQEGKIVAVERNAENGDVAAVVLANGTRLAGDLFVDCSGFRGLLIEQELEAGFEDWSEWLQCDRAIAVPCARVDPLMPLTRVTARQAGWQWRIPLQHRTGNGHVFSSRRISEDEATATLLDNLDGEPMADPRTIRFVPGRRRKTWIRNVVAIGLSAGFIEPLESTSIHLIQTGINRLLELLPSGEISDEMRANYNRRSAFEMEAVRDFIILHYHANQREGEPFWDELRTMEVPEPLRHKIDLFRASGRIHPGLDELFDGRAWIQVMIGQNIIPESYHPIADKLPEAKLREFLDGLERSHTAEVSRMPDHGAFVAKFGPMKREKVGA

SEQ ID NO: 82339 - protein, 509 aa, Stenotrophomonas maltophilia
  REGION 1..509: note = tr|A0A2T1IDE7|A0A2T1IDE7_STEMA Tryptophan halogenase; OS = Stenotrophomonas maltophilia OX=40324 GN=C7E14_06235; PE = 4 SV=1
MDTESTLAGRIRKVVIAGGGTAGWLAGCALAHQFRDQLQITLVESEQIGTVGVGESTVPPIRTFHRFLQIDEQEFLRAVAGTFKLSISFENWRLPGDRFFHPFGTIGHGTWAAPFHHFWLDSLRRGMPSDLGDFCLESIASRGDRFSLHTQPQASYAYHFDAGLYARFLRGRAEAHGLRRIEGRIAQVRQHAHDGSVQALVLDDGQVIEGDLFIDCTGFRGLLIEQALGTGYEDWHEWLPCDRAVAVQTEAVAPPVPYTRAIAHEAGWRWHIALQHRVGCGLVYDSRHLSDDEAAAKLLRDAGAPPLRDPWKVPFRSGRRLKAWNRNVVSLGLASGFIEPLESTSIHLTISAVVRLIQLFPFDGISASLVQLYNDVSRQEMEHVRDFIILHYHATQRSEPMWKACREMRVPESLQQRLQAWRERAHAWQDPGELFRVESWTSVLLGQGIAPGPAHPLARAVSDVDLRTLLKGIQRPVQQAAAQMPAQAEFIAQYCRSGVDVWRSTAASA

SEQ ID NO: 82340 - protein, 526 aa, Sphingomonas sp.
  REGION 1..526: note = tr|A0A2U1FY78|A0A2U1FY78_9SPHN Tryptophan halogenase; OS = Sphingomonas sp. URHD0007 OX=1298856 GN=H952_0585 PE=4; SV = 1
MAAVDQPVKTVTIVGGGTAGWMTAAVLSQWLSHVEVRLIESEEIGTIGVGEATIPHIRNYIALAGIDPLKMISESKATFKLGIQFVDWGGPGETYIHGFGKIGRDMLWLHPHQLWLAARERDAAKVRHFDHYSLNCVACLKDKFAFPDKRNPNSPVADLDYAHHFDASLFARFLRAESEARGVKRIEGRIVEVIQNPESGYVERVRLKDGREIDGELFVDCSGMRALLIGDALGIGYEPWKQWLLCDRAQAVPCASVSPLTPYTRSTARKAGWQWRIPLQHRIGNGYVYASDLIGDDEVAESLLANLDGEALADPRPVRFEPGRRLKAWEKNVIAIGLSSGFLEPLESTSIHLIQTAIHRLLAMFPSAGFSEADIHEFNRQSRFEYEDVRDFIVAHYKVTRRSGDPFWDYVREMEVPDSLTERFELFRSSGRFFKHGAAELFAEESWVQVLLGQGFEMRPDPVARFVPDEELFGFLDDISEVIEEVSNDLPDHGEFVSRLPPSTEAQPAAQQPAVNFTMRYERIIH

SEQ ID NO: 82341 - protein, 493 aa, Cellvibrio sp.
  REGION 1..493: note = tr|A0A1U9NAI0|A0A1U9NAI0_9GAMM Tryptophan halogenase; OS = Cellvibrio sp. PSBB023 OX=1945512 GN=B0D95_10275 PE=4; SV = 1
MSQTIKKVVIAGGGTSGWCTAVALSRQFGTLLDITLIESAEIGTVGVGEATFPTICSFHKIHGIDEQEFLSATKGSIKLAISFENWARKGDRYIHPFGSFGNASWIGDFYHYWLAAKARGYDGELDDICFELQAAKSHKFAITENPKLNYAYHFDAALYAKFLRKLSEEKGVHRIEGKIVQVKQHLDNGFIESVVLESGVAIEGDLFIDCTGFRGLLIEETLNAGYETWGQWLRNDSAVALQTEFSGDIPPYTRAIAHDSGWQWKIPLQHRQGTGHVYSSAYISDEDARNTLLQNLDGDIRAELRLLKFNTGRRKQAWVKNCVAIGLAGGFVEPLESTSIHLIQIGVHRLLKLFPFEGCNEYLIRRYNELSRIEYENIRDFIILHYKATERDDTPYWRDCRDMAIPDSLAERLELFRATGYVHHNSDEVFGVTSWLKVMTGQRIVPQGYHHFPHVISDEKIFSGLTSMKEKIANAVKKMPSHTDFLEAYCTVK

SEQ ID NO: 82342 - protein, 487 aa, unidentified
  source 1..487: note = Verrucomicrobia bacterium
  REGION 1..487: note = tr|A0A1Z8TP75|A0A1Z8TP75_9BACT Uncharacterized protein OS=Verrucomicrobia bacterium TMED56 OX=1986792; GN = CBC16_10065 PE=4 SV=1
MNSITIVGGGTAGLITALILKKRLDVKIQAIVPSNIGIIGVGEGSTEHFDDFRQHLHLDVKDVLRETKGTLKSGIMFEDWTNKHSRYLHHIHSMWNIKLGLSARNYEYLMINNKGASCFAPMTLFHNEVGLEPSDRLVQYHFNTFKLNEYLIKLCKENNINIIDDEIVDVNLNDKGIKELKGKKKTYKSSFYIDCTGFKKLLISKLGAKWQSYSKYLKTNSAIAFPTGDQEDYNIWTLAKAMKYGWMWQIPTYGRTGNGYVYSDQYTNKEEAKKEIEKLLGKEIEIAKHIKYDPGALDKPWIKNCVAVGLCANFVEPLEATSIGTTIQQAFLLMQYLENYNQQSINIYNKQVSTVMENVRDFIQLHYINDKKTTNFWKDVNKVEPSDTLKQYMHVWKSGRLLKSTDMESIGHYNLFTLFKEDNFNLIAYFNGLIDTKLLRNSYNIVNKNLKRYWLENRIEGDMLWRNTDRTRKMSHKKYIQEIHDKN

SEQ ID NO: 82343 - protein, 491 aa, Amycolatopsis alba
  REGION 1..491: note = tr|A0A229RLL3|A0A229RLL3_9PSEU Tryptophan halogenase; OS = Amycolatopsis alba DSM 44262 OX=1125972 GN=CFP75_24500; PE = 4 SV=1
MSVEDFDVVVAGGGPGGSTVATLVAMQGHRVLLLEKEVFPRYQIGESLLPATVHGVCRMLGVADELANSGFPIKRGGTFRWGARPEPWTFHFGISAKMAGSTSHAYQVERAKFDQILLNNAKSKGVVVREGCSVDTVVEEGERVTGLRYTDADGNAREVSARFVIDASGNKSRLYSHVGGTRNYSEFFRSLALFGYFEGGKRLPAPVSGNILSVAFDSGWFWYIPLSDTLTSVGAVVRREDADKIQGDREKALADLIAECPMISEYLSDAKRVTTGKYGELRVRKDYSYQQTTFWRPGMILVGDAACFVDPVFSSGVHLATYSALLAARSINSVLAGELDEKTVLTEYEARYRREYGVFYEFLVSFYQMNVNEESYFWQAKKVTRNENTDIESFVELIGGVSSGETALTAADRIAERSAEFASAVDEMAAGDGDNMVPMFKSQVVKQAMQEAGQVQMKALLGEDAEPEMPLFPGGLVTSPDGMKWLPYHPA

SEQ ID NO: 82344 - protein, 515 aa, Cellvibrio sp.
  REGION 1..515: note = tr|A0A1U9NAN5|A0A1U9NAN5_9GAMM Tryptophan halogenase; OS = Cellvibrio sp. PSBB023 OX=1945512 GN=B0D95_10705 PE=4; SV = 1
MHTHEFAPDHSSEDNSITDILIVGGGTAGWMAAAALSHVYKNNPCRIRLVESDHIGTVGVGEATIPVIQKFNQMLGIDEHDFIKHTQGTFKLGIEFVNWGSLGNAYIHPFGSYGMSMGYLSFYHYWLRLADAGHTQNPGEFSIAIQAALRGRFMPPANIPNSPLSQIAYAYHFDASLYAKYLRHFAQERGVVRIEGEIAQVLLRSTDGFVDKLLLKNGESLSAQLFIDCTGFRGLLIEQAMNTGYDDWSHWLPCDTAVAVPSHNISEPRPYTRSTAHSAGWQWSIPLQHRTGNGHVFCSKYMDDEQAKKILLENIDGDALAEPRFIRFKTGMRRKFWNKNCVAMGLASGFLEPLESTSIHLIQSSISKLIALLPTTDFEQSTIDKYNELLTAEFMFVRDFIILHYKVSQRTDSDFWNYCRHMPVPESLQKKLDLYEASGRLFRDNNELFDEVSWFAVMQGQGLRPRHYHPLANQVEANEFHRIMQEIKAVVQRAADAMPTHAEYIAAHCAASKNH

SEQ ID NO: 82345 - protein, 553 aa, Amycolatopsis alba
  REGION 1..553: note = tr|A0A229RZG9|A0A229RZG9_9PSEU Tryptophan halogenase; OS = Amycolatopsis alba DSM 44262 OX=1125972 GN=CFP75_11945; PE = 4 SV=1
MSRTLPDRAIGTYARLRSLVGVSGPQRSISVARPIQKIVIVGGGTAGWLSAAYLNRAFGRKVDITLIESPRIPRIGVGEATVPTLRTTFSFLGMKEEDWMPKTNAVFKSAVRFNDWRKPHEGRDSHTYYHPFFDVPEPAVRNYEQPFHKRFGRGVSLAHFWLKQRLAGDTRVRETFGDAGMALQRLCELDKAPKPLPGTDAPDPGYRYAYHFDAALIAKYLRDLATGRGVKFVSADVKSVTVDPRGVIEKVVTDTAGEIEADLFLDCTGFRGLLINQTLNEPFVSANDVLLCDSAVALPAEHQEGGLRPYTSATAKPDGWIWEIPLADRDGTGFVYSSAFTTPEKAEQQLRQHLGGRGHDIAGNHIKMRVGHNRRSWVNNCIAVGLSSCFVEPLESTTIALIEYQLALLVLHFPDSDFDERRKARYNELMVSAFEDLRDFIVMHYTLTDRDDTEFWRAVREAPIPASLEEKLTEYAESVIIPDGSQLRLFETRSLWAILSGMDFDFKKAPPSVELMNDAAAWEMFEQIDKEREIYSAGLPSHREYIDALHRGL

SEQ ID NO: 82346 - protein, 502 aa, unidentified
  source 1..502: note = Phycosocius bacilliformis
  REGION 1..502: note = tr|A0A2P2ED58|A0A2P2ED58_9PROT Flavin-dependent tryptophan halogenase RebH OS=Candidatus Phycosocius bacilliformis OX=1445552 GN=rebH PE=4 SV=1
MDAQPIERIVIVGGGTAGWMTASALAKVLGPRILIDLIESDEIGTVGVGEATIPQINIFNSILGIDENEFVAKTNGTFKLGIEFVNWHRQGERYIHAFGGIGHNLGFVPFHHHWLRHQKTGKGRSLWDYSTAGQAAYCNRFDRLERLGTSPLPGPTWAFQFDAGLYARFLRQFAERLGVTRNEGKIGSVALDPLTGFIASVRLETGREIPGDLFIDCSGFRGLLIEEALKTGYEDWTEFLPCDRALAVPCESVSPLTPYTRATARQAGWQWRIPLQHRIGNGHVYCSAFMSDDEAAQALLANLDGRALADPKPLKFTTGRRKKFWNKNCVAVGLASGFMEPLESTSIHLIQSAVSRLISLFPNKACDTVLSDEYNQQAGEEYALIRDFLVLHYHANARTDSPFWLACQTMKIPDSLAHKIDLFRATGRIERRPNDLFAEPSWLQVLLGQGIEPRSYHALADNLSDQDLDEFMTNVATIIDKAVANMPSHDDFIARNCRAILG

SEQ ID NO: 82347 - protein, 533 aa, Streptomyces sp.
  REGION 1..533: note = tr|A0A3N4T579|A0A3N4T579_9ACTN Tryptophan halogenase; OS = Streptomyces sp. SAI-083 OX=2485146 GN=EDC86_9064 PE=4; SV = 1
MTSAENRLQKVVILGGGTAGWMTAAYLGKALQGTVDVTVLESPAIPRIGVGEATVPNLQRCFFDYLGIAEDEWMRECNASFKMAVRFVNWRTPGRSEASARTLLDGRPDQFYHPFGLLPDCDGTPLSHFWFKRRYEGLTTEPFDYACFREPPVMDAMKAPRWLDGRPATRYAWHFDAQLVADFLRRFATEKQHVHHVHDEMTRAERDERGFVTALHTKGGRVLPADLFVDCSGFRGLLINQAMAEPFIDMNDHLLCDSAVATSVPHDDEANGVEPYTSAIAMSSGWTWKIPMLGRFGTGYVYSSTFTDEEEAMREFAGLWGLDPERTAFHQIRFRVGRNRRAWVKNVVSIGLSSCFLEPLESTGIYFITAAIHQLAKHFPDRAFNEGLIDSFNREIELMFDESRDFVQAHFFHAPRNDTAFWRANKELKLAENIQQKVSAYKAGLPINPPITDESTYYGNVEAEILNFWTNGSYYCIFTGLGLEPDAPLPALAHNLDSVAAAEPLFEAVKRQQQNLLETLPSLYVYLKQLHNA

SEQ ID NO: 82348 - protein, 150 aa, Jishengella sp.
  REGION 1..150: note = tr|A0A2W2CVR9|A0A2W2CVR9_9ACTN Tryptophan halogenase (Fragment) OS=Jishengella sp. NA12 OX=1655439; GN = C1I95_34445 PE=4 SV=1
DRAVAMPTALVETEDIPSETVSTALRHGWAWQIPLTSRHGNGYVYSSAFVSDDEAERELRAHLGAAAEGMEARRLRMRVGRVARHWSHNCVAIGLAQGFIEPLEATALMLIQLSVEQFIGALEAGNFGPRHREAYNRRVNEMFEGVRDYV

SEQ ID NO: 82349 - protein, 538 aa, Burkholderia ubonensis
  REGION 1..538: note = tr|A0A107F970|A0A107F970_9BURK Tryptophan halogenase; OS = Burkholderia ubonensis OX=101571 GN=WL73_00620 PE=4 SV=1
MSNPIKNIVIVGGGTAGWMAASYLVRALQQQANITLIESAAIPRIGVGEATIPSLQKVFFDFLGIPEREWMPQVNGAFKAAIKFVNWRKSPDRSRDDYFYHLFGSVPNCDGVPLTHYWLRKRELGFQQPMEYACYPQPGALDGKLAPCLPDGTRQMPHAWHFDAHLVADFLKRWAVERGVNRVVDEVVEVHLNDRGYISSLSTKEGRTLEADLFIDCSGMRGLLINQALKEPFIDMSDYLLCDSAVASAVPNDDAHVGIEPYTSAIAMNSGWTWKIPMLGRFGSGYVFSSKFTSRDQATADFLNLWGLPDKQPLNQIKFRVGRNGRAWVNNCVAIGLSSCFLEPLESTGIYFIYAALYQLVKHFPDTSFDPRLTNAFNAEIVHMFDDCRDFVQAHYFATSRDDTPFWLANRHDLRLSDAIKEKVERYKAGLPLTTTSFDDATYYETFDYEFKNFWLNGNYYCIFAGLGLLPDRSLPLLRHRPESIDKAEAMFARIRREAERLRTSLPTNYDYLRSLREGDAGLSRSQPGPTLAAPEIL

SEQ ID NO: 82350 - protein, 497 aa, unidentified
  source 1..497: note = Mycobacteroides sp.
  REGION 1..497: note = tr|A0A0R3H4Z5|A0A0R3H4Z5_9MYCO Tryptophan halogenase; OS = Mycobacteroides sp. H054 OX=1720567 GN=AOT85_07035 PE=4; SV = 1
MTASYLKVAFGDRITVTVVESARIGAIGVGEATFSTIRHFFDYLGLEEHEWMPSCCATYKLGIRFQDWRRPGHHFYHPFERQRVVDGFGLTDWWLDNPRSDSFDRDCFLIGTLCDNDKSPRRLDGSLFMGTDGEDTAYRTTLSEQDTQFPYAYHFDASLLADFLREFAVRRGVRHVVDDVVDVLQDDRGWISEVRTRAHGSIEGDLFIDCTGFSGLLLGRAMAEPFESYQGSLLNDRAVALRVPTDQNGGHLPPYTTATAQDAGWIWSIPLFDRIGTGYVYAEDYCSPEDAERALRNFVGPAAEGLEANHIRMRIGRSRRSWVGNCVAIGLASGFVEPLESTGIFFIQHGIEQLVKHFPDENWEESLRDSYNRVINRCMDGVREFLVLHYYLAARVDTQYWRDTKSVQLPAALAERIEHWRSKLPDAGSVYPHYHGFEPYSYVCMFVGLGGIPARPSTVVRYLDATRAQREFDLLAQQASRLRHSLPTHREYLAQMY

SEQ ID NO: 82351 - protein, 511 aa, Micromonospora sp.
  REGION 1..511: note = tr|A0A5D0T4R6|A0A5D0T4R6_9ACTN Tryptophan 7-halogenase OS=Micromonospora sp. WP24 OX=2604469; GN = FXF53_14070 PE=4 SV=1
MNDDGFDYDLVVVGGGPAGSTVATLVAMQGHRVLLLEKETFPRYQIGESLLPATIHGICRLTGVADEIARAGFPLKRGGTFRWGRNPEPWTFAFGISPKFASDGATAYQVERMKFDQILLDNARRKGVTVRERCAVVDVLEDGERVCGVRFDDEDGVRRELRSRYVVDASGHRSRIQNRVGGERHYPEFFRNLALFGYFEGGKRLPEPNSGNILAVAFPGGWFWYIPLSDSLTSVGAVLRPEALDRVRAGDRETVLRQLISECPMIAEYLAEATRVTSGPYGEVRIRKDYSYIRDTFTRPGMFLVGDAACFIDPVFSSGVHLATFSALLASRSINSRLAGELDEASVLAEFEARYRREYGLFHDFLVAFYDMQQDEDSYFWTAKRVSDDRVASDMQAFVQLVGGAGSDERAFVDADYYLRERKAAFQELADVVQGPVAEAGEDRNLLGASMLKEVLKEGVHVQTQAELGGNVDEQRPIRPGGLIPSDDGMRWRQSEPVAQAPGPAPQGPGA

SEQ ID NO: 82352 - protein, 516 aa, Sphingomonas sp.
  REGION 1..516: note = tr|A0A4R1U4Y9|A0A4R1U4Y9_9SPHN Tryptophan halogenase; OS = Sphingomonas sp. PP-CC-3G-468 OX=2135656 GN=C8J41_10210; PE = 4 SV=1
MTKRILIVGGGTAGWLTAGYLAKRLGADLPGGVAITLVESQDIGILGVGEGTFPTIRRTLATIGIDEADLIRRCGATFKQGAKFVHWRHAPGQGATDHYSHPFQVADSSDGLDLLPYWLLGHGGPENWDEVSNPQKKASDRHRAPKLPTNPDYVGPLNYAFHFDAIALAGLLREQGVKNGVRHLTDTVSEVLLDAEGAIGGVRTERNGVLDADLYIDCTGFRAELIGKAMKVPYRSCRDVLFCDRAIAAQLPYARPDDPIASYTISTAQKNGWIWDIGLDRRRGIGHVYSSDHGDDETAERVLRGYLGAAGEKADVRHFKFDAGYREVNWYKNCVAVGLSSGFFEPLEATGIAFAEVSAGMIANLFPWGGDYETSARQFNANMLRRYERALDFIKLHYCISERRDTAFWRDNVADASVPDSLLELLDRWRFRPPNELDIDGQVDIFTDASWQYVLYGMGWKTDLSAKAGALRYHEDARRAFAEVQRQARYAIANLPSNRDLVSYAQTRNFGTRAAA

SEQ ID NO: 82353 - protein, 497 aa, Pseudoalteromonas sp.
  REGION 1..497: note = tr|A0A4Q6Y3U9|A0A4Q6Y3U9_9GAMM Tryptophan 7-halogenase OS=Pseudoalteromonas sp. CO325X OX=1777262; GN = EXT46_12615 PE=4 SV=1
MANINRVVILGGGTAGWLSAALLAKMLGKQLSITLVESSDIGTVGVGEATIPPIVAFNNALGIDEKTLIQRTGATIKLGIQFENWGRKGDSYMHAFGHLGKALPFCDFHHLFHHAKEQGLGHSLWDYSLNFQAAKAGRFAPLRHLPNTQLAGTEHAYHFDASLYAQLLRERAEHFGVQRIDAKVNKVEQSDNGDVQALVLQSGERVEGDLFIDCSGQRALLIAQTLGVGFEDWSHWLPCDRAIAVQSHHGDDKDPLPYTRSIAHDGGWQWQIPLQHRVGNGLVYCSRYLDDDQAKAQLLANLPGEALHEPRVIPFRTGARRQQWHKNVVAIGLSSGFLEPLESTSIHLIQTAVIRLLKHFPHQGIAPASVRAFNRLFSTEMAQIRDFIILHYAQNQRQDSRFWRYCADMELPPSLGERIAQFQQSGQVHRYQDELFAEVAWQQVFIGQNCWPQQHHPLAEQLSNEQLDELLQSLRTLINQAVQSMPSHQQFIKRNLS

SEQ ID NO: 82354 - protein, 515 aa, Sphingomonas sp.
  REGION 1..515: note = tr|A0A1R1YVP0|A0A1R1YVP0_9SPHN Tryptophan halogenase; OS = Sphingomonas sp. Sph1(2015) OX=1628084 GN=BSZ14_16095; PE = 4 SV=1
MVETEVRRVVVVGGGSAGWIAACRLAAQACRIGSGVQVTLVESRHVPTVGVGEGTWPTMRNTLARIGITETDFIRSCDAAFKQGARFVGWTDGTADDGYYHPLNPPAGATEIDLAPHWLHGAAETASFADWVDYQAMLCDAGLGPKTIVMPEYAGHANYAYHLDAGKFATLLREHGVGTLGIDHVLGDVVRPEMSDHGDIVHLELADGRIVPGDLFVDCTGFAARLIGGVYQVPFRRCGDVLFADRAMALQVPYEDEDAPITCHTVSTAQGSGWIWDIGLWTRRGVGHVYSSAHSSDDAAEAALRRYVGPAAEGLNVRRITIDAGHRTRFWQNNCVAVGLSAGFIEPLEASALMLIEASMDAIADRLPRTRAAMDVMARQFNATFTHHWMRIIEFLKLHYVLTRRTDTDFWRDNVAASSIPDGLAEQLELWRHHSPGPQDFTHAREVFSWPSYQYVLHGMGFASRQPRIDPAAPDTALAQRFVTRMARARDDLRTRAPRHRDLLRAIREHGLQRV

SEQ ID NO: 82355 - protein, 538 aa, Burkholderia ubonensis
  REGION 1..538: note = tr|A0A108BWL3|A0A108BWL3_9BURK Tryptophan halogenase; OS = Burkholderia ubonensis OX=101571 GN=WM15_11670 PE=4 SV=1
MSNPIKNIVIVGGGTAGWMAASYLVRALQQQTNITLIESAAIPRIGVGEATIPSLQKVFFDFLGIPEREWMPQVNGAFKAAIKFVNWRKSPERSRDDHFYHLFGSVPNCDGVPLTHYWLRKRELGFQQPMEYACYPQPGALDGKLAPCLSDGTRQMSHAWHFDAHLVADFLKRWAIERGVKQVVDEVVEVRLNDRGYISSLSTKEGRTLEADLFIDCSGMRGLLINQALKEPFIDMSDYLLCDSAVASAVPNADARVGIEPYTSAIAMNSGWTWKIPMLGRFGSGYVFSSKFTSRDQATADFLDLWGLPDNQPLNQIKFRVGRNARAWVNNCVAIGLSSCFLEPLESTGIYFIYAALYQLVKHFPDTSFDPRLTNAFNAEIVHMFDDCRDFVQAHYFASSRDDTPFWLANRHDLRLSDAIKEKVERYKAGLPLTTTSFDDATYYETFDYEFKNFWLNGNYYCIFAGLGLLPDRSLPLLRHRPESIDKAEAMFARIRREAERLRTSLPANYDYLRSLREGDAGLSRSQPGPTLAAPEIL

SEQ ID NO: 82356 - protein, 530 aa, Xanthomonas translucens
  REGION 1..530: note = tr|A0A1M4JGA2|A0A1M4JGA2_XANCT Tryptophan halogenase; OS = Xanthomonas translucens pv. graminis OX=134874; GN = XTGNCPPB3709_1201 PE=4 SV=1
MGRAAATAARERRDAHASTLGRAAPPVATYVNAGEPLRHIAIVGGGTAGWMAAAALVRVLGAGATRITLVESEAIGTVGVGEATIPPIALFNALLGIDENAFLRATQGSFKLGIEFVDWLQPGQRYFHPFGTYGADFGTVPFDGLWQRMHRAGRAAPLAAYSLNTLAAMRGRFMRPQQGDALLSRLGYAFHFDAALYARLLRESAEGRGVTRLEGKVEQVLRRSPDAAIASIVLACGTRIDADFFIDCSGFRGLLIEDAPGAGFVDWSHWLFNDRAVAVPSARASAFTPYTRSTAREAGWQWRIPLQHRTGNGYVYSSAHLSDDAAAATLLANLDEEALAEPRTLRFRAGRRGLFWSGNCLALGLAAGFLEPLESTSIHLIQAGIARFLEMLPDRAGNPADIRRYNRLMAQEFDSIRDFIILHFHATARPGAYWERARTMPIPDSLAERLQIFAHSGRVFREADELFSKTSWLAVMQGQGLSARGFDPLAAAMPDAEAAARLQRVAAAMAMAVERMPAHADFIRAHCAAT

SEQ ID NO: 82357 - protein, 500 aa, Erythrobacter litoralis
  REGION 1..500: note = tr|Q2NC62|Q2NC62_ERYLH Tryptophan halogenase, putative OS=Erythrobacter litoralis (strain HTCC2594); OX = 314225 GN=ELI_03185 PE=4 SV=1
MSDSKAPNVVVLGGGSAGWITACLLHRQWSEKGGSVTVVESPEIGIIGVGEGSTPQLKAFFDQLGIAESEWMPACNATYKLGIRFNGWSERAGFESYYHPFPGPIDLHSEPGFIGNCMLARHQIDVAAHPDDWFLATHLSEAGKSPIAAENFPFAPSYGYHFDAYALGAFLRDWAVKRGVVHRPLKVTAVERADDGDIAALLCEGGERIEGDLFVDCSGFRAMLAEQELGATFLPFAENLFNDSAVVLPTGHGAPFKPQTEATAMRAGWRWSIPLTTRVGNGYVYSSKYISNEDAEAELRGALGLAGDGPEARFLKMKVGRLENSWTRNCLAVGLSQGFLEPLEATALHIVIVTALEFAQAYEQGGYGPQHRDAFNASIAARYEGIRDYIVAHYRVNQRSDTQYWRDNAANDRLSNGLKTMMTAWFRHQDIHAANDEAYGGKRYYANASWHCLFAGYGTFPPQERMEAVPEGIRPADPAEARAMLEACAQNFPSYDPIAS

SEQ ID NO: 82358 - protein, 499 aa, unidentified
  source 1..499: note = Streptomyces fungicidicus
  REGION 1..499: note = tr|A0A494V5P1|A0A494V5P1_9ACTN Tryptophan halogenase; OS = Streptomyces fungicidicus OX=68203 GN=CNQ36_25600 PE=4; SV = 1
MSTGQHEEFDVVVVGGGPSGSTLSTLVAMQGHSVLLLEKETFPRYQIGESLLPSTIHGICHLLGVTDELAAAGFPHKRGGTFRWGASPKPWNFSFSVSSKVSGPTSFAYQVERSKFDKILLDNAARKGVVVRQDRTVTDVVDDADGRARGLRYTDPDGTEHEVSARYVVDASGNTSRIHKRVGGSRTYSDFFKSLALFGYFENGKRMPAPYAGNILCVAFGSGWFWYIPLSSTLTSVGAVVRREDAAKVQGDPESALRGLIDECPMIKEYLADATRVTTGQYGQLRVRKDYSYHHTTFWRPGMVLVGDAACFVDPVFSSGVHLATYSALLAARSLNSVLAGRIDERRAFDEFEARYRREYGVFYEFLTSFYDMHVDEDSYFWTAKKVTRSSHAELESFVELVAGMSSTDFDLSDAESSVLRLKQQSAEFADAVDDMAGRQEENMAPLFRSSAVSRAMQEGSQVQTRAQLGEYAGEDVPLFDGGLVASSDSMFWEEPHPS

SEQ ID NO: 82359 - protein, 538 aa, Burkholderia ubonensis
  REGION 1..538: note = tr|A0A107K9T3|A0A107K9T3_9BURK Tryptophan halogenase; OS = Burkholderia ubonensis OX=101571 GN=WL80_10130 PE=4 SV=1
MSNPIKNIVIVGGGTAGWMAASYLVRALQQQTNITLIESAAIPRIGVGEATIPSLQKVFFDFLGIPEREWMPQVNGAFKAAIKFVNWRKSPERSRDDHFYHLFGSVPNCDGVPLTHYWLRKRELGFQQPMEYACYPQPGALDGKLAPCLSDGTRQMSHAWHFDAHLVADFLKRWAIERGVKQVVDEVVEVRLNDRGYISSLSTKEGRTLEADLFIDCSGMRGLLINQALKEPFIDMSDYLLCDSAVASAVPNADARVGIEPYTSAIAMNSGWTWKIPMLGRFGSGYVFSSKFTSRDQATADFLGLWGLPDNQPLNQIKFRVGRNGRAWVNNCVAIGLSSCFLEPLESTGIYFIYAALYQLVKHFPDTSFDPRLTNAFNAEIVHMFDDCRDFVQAHYFASSRDDTPFWLANRHDLRLSDAIKEKVERYKAGLPLTTTSFDDATYYETFDYEFKNFWLNGNYYCIFAGLGLLPDQSLPLLRHRPESIDKAEAMFARIRREAERLRTSLPTNYDYLRSLREGAAGLSRSQPGPTLAAPEIL

SEQ ID NO: 82360 - protein, 538 aa, Burkholderia ubonensis
  REGION 1..538: note = tr|A0A106V5U2|A0A106V5U2_9BURK Tryptophan halogenase; OS = Burkholderia ubonensis OX=101571 GN=WK55_25970 PE=4 SV=1
MSNPIKNIVIVGGGTAGWMAASYLVRALQQQTNITLIESAAIPRIGVGEATIPSLQKVFFDFLGIPEREWMPQVNGAFKAAIKFVNWRKSPERSRDDHFYHLFGSVPNCDGVPLTHYWLRKRELGFQQPMEYACYPQPGALDGKLAPCLSDGTRQMSHAWHFDAHLVADFLKRWAIERGVKQVVDEVVEVRLNDRGYISSLSTKEGRTLEADLFIDCSGMRGLLINQALKEPFIDMSDYLLCDSAVASAVPNADARVGIEPYTSAIAMNSGWTWKIPMLGRFGSGYVFSSKFTSRDQATADFLDLWGLPDNQPLNQIKFRVGRNGRAWVNNCVAIGLSSCFLEPLESTGIYFIYAALYQLVKHFPDTSFDPRLTNAFNAEIVHMFDDCRDFVQAHYFASSRDDTPFWLANRHDLRLSDAIKEKVERYKAGLPLTTTSFDDATYYETFDYEFKNFWLNGNYYCIFAGLGLLPDRSLPLLRHRPESIDKAEAMFARIRREAERLRTSLPTNYDYLRSLREGDAGLSRSQPGPTLAAPEIL

SEQ ID NO: 82361 - protein, 512 aa, unidentified
  source 1..512: note = Caulobacter radicis
  REGION 1..512: note = tr|A0A2T9K8I7|A0A2T9K8I7_9CAUL Tryptophan halogenase; OS = Caulobacter radicis OX=2172650 GN=DDF62_03780 PE=4 SV=1
MSEDVRNGRIRSIVIVGGGTAGWMAAASLRRHFGKAPIDITLVESSEIGTIGVGEATIPTIRNFYQSLGLDDLEVLRATQGTCKLGIRFKDWMAPGSAFIHPFSLYGQDLNGVPFQHYWLKARASADVGEMGEYSLGASLAAAGKFTVPTANPPSSLSVFDWALHFDAALFAQLMRRVAEANGVRRIDAKVVKVNLRPEDGFVASLDLHTGANIEGELFIDCSGFRGLLIEEVLGTGYEDWSRWLFCDRALAVQSQPPEGAQPPPYTDVTAHSAGWRWRIPLQHRYGNGYVYSSRHIDDEAAKAELVAAVPDRLLHEPRLIRFTPGRRKQVWNRNVVALGLASGFLEPLESTSIALIETGIEKLKALFPDRSFDPAVVDEFNDWSRREMERVRDFVVLHYKAAQRGDTPFWRTTRDADIPETLARKVELFRSRGHIARYRWEMFQPPSWLAIFAGFDILPGGWDPALDGIDGQALAASLNQMRAGVARAVAQAPTHGDFLRRYVGAAPAAAE

SEQ ID NO: 82362 - protein, 498 aa, Cellvibrio sp.
  REGION 1..498: note = tr|A0A1U9NEV0|A0A1U9NEV0_9GAMM Tryptophan halogenase; OS = Cellvibrio sp. PSBB023 OX=1945512 GN=B0D95_20015 PE=4; SV = 1
MDKPVRLVVLGGGTAGWMAANLFAKRWSRTQVHITLMESPEIPIIGVGEGSTPSLKRFFKQLDLTEQEWMPACHATYKTNIRFAGWSPASGVQEYSHPFYSQPDVFNERTFFTNCRTRRLGLDVITDPEKFFINGELARQGKMPIAPPNFPFQMEYGYHFDSQLLGRYLANVARARGVVHHQATLAEVLRNDRGEITALQTDAGDLLAGDFFIDCTGFASLLMQKALAVPFHSYQQQLFNDSAVVMPTPALAQPPVETRSTALSAGWCWQIPLTHRTGNGYVYSSQFISRDQAETEFRAHIGMSNSSESCRHLSMRVGQLAQHWSHNCVGLGLSQGFIEPLEATALHLVQLTVEALMDAWDDHQFTSNGRDHFNRTVTNHFDGVRDYIIAHYKLNTRGLNNTQGSDYWRANRDNTQLPESLLQILDVWYRCGDLTAELAQRTIKPAFNSASWHCLLAGYGAFPPLATNQPGQGKGDLYRECKVADFVEGCAMNFPLFL

SEQ ID NO: 82363 - protein, 505 aa, Nostoc sp.
  REGION 1..505: note = tr|A0A318AZ87|A0A318AZ87_9NOSO Tryptophan halogenase; OS = Nostoc sp. 3335mG OX=2204170 GN=DMC47_31300 PE=4 SV=1
MRVVIVGGGTAGWMTAAGLSRLLSPRDYAITLIESDAIGTVGVGEATLPHIKTFNDMLGLDEAEFMRETQASFKLGIEFVGWTQDGDRYIHPFGAFGEPWAGVDFQHHWARAKLAGREVAPLQAYSFAVAACRANAFQAPDTDPQSIRSTFAYAYHFDASLYADYIRRWSIARGVERIEGLVLGVSQNAETGHVRALTLKSGAVIEGDLFVDCSGFRSLLVGQTMGVGWQDWSEWLPCDRALAVPCERAGPFTPYTRATAQAAGWIWRIPLQHRVGNGYVFSSRFCDEDRARETLIRNLESPPLAEPRLLHFQAGRRERMWEGNCIAIGLAGGFLEPLESTSIFLVQAAVTDLANLIPVPGRPIDPRLAAEFNRLSTLQYDRVRDFLVLHYIANAREGQPLWDHVRQMALPDTLAHKIALFEESAAPPSYQYGLFSRDSWLSVLIGQGIEPKGYSRLADRLSLDQLEAWLGDLRSRIDAGVEGMTSHEDFIAGHCGIRAAESVPA

SEQ ID NO: 82364 - protein, 510 aa, unidentified
  source 1..510: note = Gammaproteobacteria bacterium
  REGION 1..510: note = tr|A0A3R7S3T1|A0A3R7S3T1_9GAMM Tryptophan 7-halogenase OS=Gammaproteobacteria bacterium TMED243; OX = 1986753 GN=CBE03_005375 PE=4 SV=1
  VARIANT 167: note = Xaa can be any naturally occurring amino acid
  VARIANT 173: note = Xaa can be any naturally occurring amino acid
  VARIANT 175: note = Xaa can be any naturally occurring amino acid
  VARIANT 191: note = Xaa can be any naturally occurring amino acid
  VARIANT 202: note = Xaa can be any naturally occurring amino acid
MARVIVVGGGSAGWITAGLLAAEHAEVSISLIESPNVPIIGVGEGTWPSMRRTLQRLGLSEAEFVRDCDASFKQGTWFRDWSCQGDSGYLHPFSLPTEFSSLNLANYWLTFEHSGAFADFVTPQADVVKAGLAPKQCGTPDFAFNVNYGYHFDAGKFAQVLKRHVTXNLGVEXVXAHINGVERAENGDIAXLILDDGELAGXLFVDCSGQQSLLLGQQMGVDLVPADGILFNDRALAVQVPYESPDASIASTTHSTAQDAGWIWDIGLQSRRGLGYVHSASHTTPDQAHEALCRYIEQTAPAIAVADLTFRELSFVPGYRKTFWDHNCVAVGLSAGFIEPLEASALALVEQSANILCDHFPSTRQIMDVVSKRFNEKMHYHWQGIIEFLKLHYVLSQRDDSDYWRANRDPSSCPESLTEKLLLWRQQAPWHDDAPRIDELFPSASYQYVLYGMKQRQMHGKQSSARLAKDLAKAQGAVKMTRERGTQMRAALPSNRDLIRSMTERAGTAA

SEQ ID NO: 82365 - protein, 536 aa, Sphingomonas sp.
  REGION 1..536: note = tr|A0A1R1Z208|A0A1R1Z208_9SPHN Tryptophan halogenase; OS = Sphingomonas sp. Sph1(2015) OX=1628084 GN=BSZ14_05000; PE = 4 SV=1
MTSSSDHQIRRVVIVGGGTAGWMAAAAFARLLNNGYTHVTLVESEEIGTVGVGEATIPPIITFNQMLGLDENDFLAKTAGTFKLGIEFVDWGAKGERYIHPFGRHAQDLQGVHFHQLYLRERSRRALPDIAEWSMSAVAAKAGKFGRAKPDARSPIRELFYAFHFDASLYARYLRGYAERGGVTRVEGRIEAVNPRPEDGYVEAVTLAHGRRIEGDLFIDCSGFRGLLIEEALGTGYESYAQWLPCDRAVAAPCALLNPTEPDPFTRATAREAGWQWRIPLQHRMGNGLVYCSEYLDAETAEAQLLGNLEGELLGDPRHLRFTAGRRRQSWNRNVVALGLSSGFLEPLESTSIHLVQAAIQRLVALFPDKRFDPAERDEFNRQMHDLYEDVRDFIILHYKATRRDDTPFWNRVRTMEVPDSLARKMALWAGKGRLFREGYDLFSNPSWVAVCLGQGLVPESWEPAADALDEDLVAQALEQMRAGYADTAARMPSHGDFLRMTAPSPLAPAMAARSGTEGFDFARAPGTVQSKAPLL

SEQ ID NO: 82366 - protein, 502 aa, Amycolatopsis alba
  REGION 1..502: note = tr|A0A229S2E1|A0A229S2E1_9PSEU Tryptophan halogenase; OS = Amycolatopsis alba DSM 44262 OX=1125972 GN=CFP75_07825; PE = 4 SV=1
METRTENVDVVVVGGGPGGSTAATLLARRGRSVVLLEKEQFPRYQIGESLLPSTVHGICRLLGVEKEMEAAGFMYKRGGSFRWGTNPVPWNFLFSISPEFSGPTSHAYQVERAKFDDILLKHAAASGVDVRERSEVIAAVRDEEAVRGVTYRDADGNEHEISARYVIDASGNRSSLWKATGGERQYSEHFKNVAVFGYFEGGGRLPGSNSGNILCEAFGEGWLWYIPLTDGLTSVGAVISREHVAQIQGDREAALMRFIGKSSYVKDMLTTATRVNDDSMYGEIRIRKDYSYANTKFHAPGIVLVGDAACFIDPVFSTGVHLATYAGVLAARSINSVFEGNVDESRAFAEFEGRYRREYSVFYEFLSSFYNMEQAEDSYFWQARKVTNLSESSFESFVSLVAGGFSHERVLTDPNEVAERFEQSTRQMAEAAERTGGMETDSGQRMNHLFGTPVVREVMEEMNAIQARGVAGEALVEPPLLPDGLVPTEDGLGWAEPAVVPA

SEQ ID NO: 82367 - protein, 531 aa, unidentified
  source 1..531: note = Bartonella tamiae
  REGION 1..531: note = tr|J1JW97|J1JW97_9RHIZ Uncharacterized protein; OS = Bartonella tamiae Th239 OX=1094558 GN=ME5_01828 PE=4; SV = 1
MIDLRQAKRLAIIGSDIGGWFAALTLRRIFSSAVEIVVFEDPKKTDIGIGEGGLNNLIQSLNRNKIDVEEFVRESGATFKLGTSFEGWRNGEKSDVFYHLSPMIGEQVQELEFIAFGIMPLLAARVSAGADLHSFFPGFSLIQDNASQIEARAVLATKRSGLAPSYHFHHQKAEQYLKSVALKRGIKHRLMKVDKLLLTSEGLTYALKVEGEEVAVDFVVDASGFKRIAMGETYKEKWQSFKDFQILDRVLPFSTAHPQKNPALLTNAVAMSSGWMSQIPLQDQVSASYIFSSKHISEDHARKEIEHYVGHDITPMGLIRFDPGNFETAWRKNVLALGAASGFIDLLEATSSGQMFEQLRNVEKVFIDGRGVIGNNIIDSFNRSNNEGWLGLIDFCRMHFEGGRDDTRFWKDVSKLPRSDRYQELRACFDHRLPRMLDIENYIGHGWAPIFHMVNWLLVGAPLNLITARAGASELLGLPTSLREQITPYMSRLQNMGLNGRNNMNDFQDSELIRLIMSGDMRETDYQQRLG

SEQ ID NO: 82368 - protein, 488 aa, Nostoc sp.
  REGION 1..488: note = tr|A0A318AY74|A0A318AY74_9NOSO Tryptophan halogenase; OS = Nostoc sp. 3335mG OX=2204170 GN=DMC47_31305 PE=4 SV=1
MSGVETVLVAGRDAPLWLAAATIRQALAPAGVTVRAVELPSGLTPADGHATQPALEALHNRIGIEETVLLRLTGGAYSLGRNIVEATGEISPFMIPFGSFGTRIEGQDFFACWLKARGLGLDVALEHFSLTAAAARQGRILFPDDATDSYGRCDYGYHLPAIPYARSLKALAGHLGVEIHETSAIEAVRGADGIEALLVDGGRRIEADLFVDVGAGLTTGHLRESWRGAFPVDRVLAATGPRFGSIPAYAEIRASEGGWTALHPAASHTQVVHAWSSLHRSDEEAVREAGEVGGLTLGDIAIRAIEPGWLAEPWSQNCVAIGEAADAIDPIHDLGLHLVQLGLVHLLACFPAWASFAAQRAEYNRTMRSAIDRVRDFQSAFYVGNRFAGSFWDVARGVDHSPELEHLVATFAARGEIAPFEDEGFTADIWRALLTGQGIVPDSHVPTIDRIDPQAIKDGFRTMLGFVREQVMSRPTHDDLLRRIAHAP

SEQ ID NO: 82369 - protein, 514 aa, unidentified
  source 1..514: note = Deltaproteobacteria bacterium
  REGION 1..514: note = tr|A0A2D4RRA0|A0A2D4RRA0_9DELT Uncharacterized protein OS=Deltaproteobacteria bacterium OX=2026735; GN = CL915_01490 PE=4 SV=1
  VARIANT 39: note = Xaa can be any naturally occurring amino acid
  VARIANT 152: note = Xaa can be any naturally occurring amino acid
MNDNSSSSEKKIVVLGGGTAGWLSAFLLQDFCRQHELSXKVTVIESSKIPVIGVGEGTTAIFKTFLDSFGLEEAEFLRETRGTIKYGIRHKDWRKLGHHYDGPIDDPHFLIPPAGEDGFEYLNSYCVAAGRSVSEAHLFQILLSKGLAPVKXQKDQLVPNHPFLHAYHIDNALVGIYLRKKSKGIRIVDGVVKEAIRDKDNGHIRSLKLDDGALIEGDLFIDCSGFRRILIDKTLGNEWVDYSAELPVNRAMPFFLDQDTSKEIPAYTLAWAQKSGWMWQIPTQDRLGCGYVYCDEYCSPEEAQEEIEFVLGHSIEPRQDLRFQVGRMKDSWRNNCVAVGLSAGFLEPLEATSIHSTLVQLILFTKEYLAATLNEDYSGREDFNQRIAHQFDDFKTFLNIHYRSERRDTPFWEFVHQECLGQESIDRLEQWQKSLPKRQHFQRFLSGLPHVETELYFPVLDGLGLLSQAAARQEMSNRNLKRQAQEELKQLHSKYLKMTQGSLGHREYLSKVSV

SEQ ID NO: 82370 - protein, 553 aa, Nostoc sp.
  REGION 1..553: note = tr|A0A318BLT5|A0A318BLT5_9NOSO Tryptophan 7-halogenase OS=Nostoc sp. 3335mG OX=2204170; GN = DMC47_04550 PE=4 SV=1
MARPIRNITIVGGGTTGWLAAAVLNHRLQWGYAHPDGVSITLIESPDVPIIGVGEATIPGMRHTLNSIDVDEAEFIARTNGTFKLGVKFDDWHKPGGPKRQSYFHPFTGGLQVGGRNPAASLLAYGLPDGVNEDDQLGNLVGHGVAAALAGKSPKRTSDRAYDGALGYAYHVDARLFSDFLREVAVARGVTHVSDTVQSVEKDERGHISALNLEQGGRHEIELVIDCTGFRGLLINEAMGEPFESFADYLPNDRAAVVQIAHREGDLLEPFTTSTAMEHGWRFRIPLQSRIGTGYVHSSAHVDEQAAIDELVRSLNGAGRLTDPRIIRTRNGRSRRSWVGNCVAFGLSSGFLEPLESTAIQFVDFACRRFLQCLPSSEFEPAAIAKFNAQMAGLYDDVRDFLGLHFTLGDRDDTPYWRSIRHDVKRSDQLEECLALWRDALPDVYDPRPNDVFTFWSVSAVLFGKGFYDGPPRVGTDLLPREVWDNYVRRFLRLRPPLLDIMPDHAEALKAICATAETGASASRPPRAAVSPTMGFALGPPVPVMSPDANAAA

SEQ ID NO: 82371 - protein, 470 aa, Sphingomonas sp.
  REGION 1..470: note = tr|A0A2U1G268|A0A2U1G268_9SPHN Tryptophan halogenase; OS = Sphingomonas sp. URHD0007 OX=1298856 GN=H952_1974 PE=4; SV = 1
MSASGAIKSVAIAGGGITAWSAAAALKRRLPKLDVVVVSSPPPPDALADRMTCTLPSIGEFHSDIGLSDEDTIVRARSGIRLGTTFKGWAEGLPDYVHAYGSYGAPVGGIPFHQLWLKERPAAFDTYSLAAELARSARLPGAGAQCGSDDKVGYGLRLTTELYLELMSAYALHLGVVERPGEVADVEIRGGTGFVECLMLADGERIAADLFVDCTGPLALVRSRVDDGFDDWGRWLLCDRLAVETGEADPDQSVLDAVTATVTGWRWRSGTVFSSAHANDSQDSTAIRRGRLSDPWVRNCVAIGDSAVSVEPLEWTNLHLAHSQIDRLVSMMPGADCAAVELAEYNRQCNAEADRVRDFLCMHYIAARRSEPFWKDASAVEPPPSLAHTLSLFAERGRLPYYEEETFARDSWLAVLFGQGFLPRRTDPLADSIPPDEAERALSGYRQSLERVVEAQPVYSLAQLGQRAPS

SEQ ID NO: 82372 - protein, 493 aa, Acinetobacter sp.
  REGION 1..493: note = tr|N9LRS5|N9LRS5_9GAMM Uncharacterized protein; OS = Acinetobacter sp. ANC 3862 OX=1217705 GN=F900_03016; PE = 4 SV=1
MLDLRGMTRVAILGGGTAGWLAALYLRKALQPHVEVLLISAPEIPIVGVGEGGILNFITALKQLDIPLFEFMSETNAVHKLGFVYEGWRKNNKDPNDYFYHMFPIIEDTSPIVTMMVNHDIPVSYITDSIQLREKNISQIELTHMLTQQKLKNNFNSSFHFDTYKVGQYLRKIALKRGVIHREGLYKDIQRHTENGLVTALLVNDECIPVDFVIDASGFSRQILGKKMMGEWQSFQESLSLNTAIPFHLKHTQKNPDLVTRSTAMNAGWVWQIPLQERIGAGYVYNSNFISAEQAVDEVEQWLGHAIEPIRTITFEAGFYKEIWKGNVLAIGLASGFVEPLEATSIGQTLQQLRLFMNIIFECQAVVSKSSVDYFNKQNANAWYEIRDFIAMHYDTGREDTPFWKFVSKDLVFSSQYLSLKKCWQHRMPKDIELMCYTMGFTSLFGRYSWITIAQALGIIKADATVADLMAVPVEEQKELISFMQRLKKKLGK

SEQ ID NO: 82373 - protein, 511 aa, unidentified
  source 1..511: note = Rhodanobacteraceae bacterium
  REGION 1..511: note = tr|A0A2Z6E389|A0A2Z6E389_9GAMM Tryptophan halogenase; OS = Rhodanobacteraceae bacterium Dysh456 OX=2010829; GN = ALSL_0860 PE=4 SV=1
MSDGAEDLRLRRVVIVGGGTAGWISAALLARALGRQVRIVLVESPEIGTVGVGEATIPQIRLINTFLGIDEDELLRAVQGTFKLGIQFCDWHRIGHAYYHAFGEIGAPLGLLPFHAYWLRDRSRPDAADLWAYALNAQACEARRFDRRQRIGTSPLSGLRYAYHFDAGLYARHLRRHCDGRVVEAVEGTVIEVERRAADGFIAAVHLRDGRRIEGDLFIDCSGFRGLLIEGALEAGYEDWSHWLPCDRALAVPSARQGPMRPYTQALARSAGWQWRIPLQHREGNGHVYCSRYLSDDEACAMLLSNLEGEPLAEPRPLRFTAGVRKRFWSHNCIALGLASGFLEPLESTSIHLVQSGLGRLLALLPDRACAPALREEYNRQTRFEYERIRDFLILHYRATERRDTPFWRDCAALPMPASLAHKIALFRAGGRIVREGEELFTEGSWLQVMLGQGIVPHAYPALADTLPGPQFDGFLADLRTLIARAIADMPAHERFIADHCAAGTGAGMLN

SEQ ID NO: 82374 - protein, 500 aa, Novosphingobium taihuense
  REGION 1..500: note = tr|A0A562JZ92|A0A562JZ92_9SPHN Tryptophan halogenase; OS = Novosphingobium taihuense OX=260085 GN=IQ25_00442 PE=4; SV = 1
MTASPLPRRIVIAGGGTAGWMTAAALARTLGPVAQVTLVESEQIGTIGVGESTIPPLVTYNRLLGINEAEFMRATQATFKLGINFENWRVQGENYFHSFGGTGKDHWSAGFQHFWLNGLERGHTEPYGEYCLELKAAEAGKFAHLPDDRMNYAYQLDSALYARFLRAMAEADGTTRIEGKIAHVELDGESGDIAALVLEGDRRIEGDLFIDCTGFRALLIEGALRAGYDDWTHWLPCDSAIAIQTSSVRPPVPYTRAIAHEAGWQWRIPLQHRQGNGVVYCSDYLSHEAALEKLLSTVEGEKLVKPNHIRFRTGARRKQWHRNCVAVGLSGGFMEPLESTSIHLIQRAILRIVRMLPAGPISSRDIAEFNDQQFTDMEQIRDFLVLHYKATDRRDTPFWRHCASMAIPASLEQKIELFRETGRVFRKNEELFAENSWVQVMMGQGINPASHHPVAAKLRDEELAHLLGTLREQVSRTVAALPSHGDYVARYCCAEVPAAA

SEQ ID NO: 82375 - protein, 510 aa, Rhodanobacter sp.
  REGION 1..510: note = tr|A0A1V3P5Y3|A0A1V3P5Y3_9GAMM Tryptophan halogenase; OS = Rhodanobacter sp. C05 OX=1945855 GN=B0E51_07445 PE=4; SV = 1
MRRIVVVGGGTAGWMTALALANSAYGSRLEVTVIESPQVATIGVGEGSTPFLRRFFEDLGIEEAEWMPACNATYKNGITFDKWSTRPGFESYFHAFASMLDNLTMTQFINNVHSRLNHADVHAHPDRFFIASRLARDCRAPKPAHSFPFDIWHGYHFDATLLGAFLLRKALERGVRHVARHVNGVILKDNGDIGSLHLEGGETLDADFFIDCTGFASLLIGKALKTPFVPYAENLFNNAAIALATPIDGPIMSQTISTALTNGWAWKIPLTNRYGNGYVYSTDFCSPEQAETELRAHLGVLDADVPARHLKMRVGRVAESWNRNCLAVGLAQGFIEPLEATTLLFVQRTAYMFVAALEKGDLGAEARANFNQTINVQFEGTRDYIVTHYKTNTRTDTDYWRANAANTHLSNPLKHLLTTWLSSKPIIPGLKKGVFGQGYPTMSWYSLLAGVGLFPDSQSMRPPTPEEAQHDLAQIDNLLERSAMNYPDQRELLQRIPLKSREPSLQVYLW

SEQ ID NO: 82376 - protein, 538 aa, Burkholderia pseudomallei
  REGION 1..538: note = tr|A0A0E1SGR6|A0A0E1SGR6_BURPE Tryptophan halogenase PrnA OS=Burkholderia pseudomallei 305 OX=425067; GN = BURPS305_6299 PE=4 SV=1
MSNPIQNIVIVGGGTAGWMAASYLVRALQQQANITLIESAAIPRIGVGEATIPSLQKVFFDFLGIPEREWMPQVNGAFKAAIKFVNWRKSPDRSRDDYFYHLFGSVPNCDGVPLTHYWLRKREQGFRQPMEYACYPQPEALDGKLAPCLPDGTRQMSHAWHFDAHLVADFLKRWAIERGVNRVVDEVVQVHLNERGYISSLSTQEGRTLEADLFIDCSGMRGLLINQALKEPFIDMSDYLLCDSAVASAVPNDDARVGVEPYTSAIAMNSGWTWKIPMLGRFGSGYVFSSKFTSRDEATADFLNLWGLSDKQPLNQIKFRVGRNRRAWVNNCVAIGLSSCFLEPLESTGIYFIYAALYQLVKHFPDTSFDPRLTDAFNAEIVYMFDDCRDFVQAHYFTTSREDTPFWLANRHDLRLSDAIKEKVQRYKAGLPLTTTSFDDSTYYETFDYEFKNFWLNGNYYCIFAGLGLLPDRSLPLLRHRSESIDKAETMFARIRREAERLRTSLPTNYDYLRSLREGDVGLSRSRPGPTLAAPEIL

SEQ ID NO: 82377 - protein, 480 aa, Burkholderia pseudomallei
  REGION 1..480: note = tr|A0A0E1SJS8|A0A0E1SJS8_BURPE Putative tryptophan halogenase OS=Burkholderia pseudomallei 305 OX=425067; GN = BURPS305_6708 PE=4 SV=1
MHLPNRTQVLVIGGGPAGATGAAFLAREGVEVTLVDKEVFPRYHIGESLLPSCLEILTLMGARDTFDRHGFQRKPGAYFNWKGETWKLDFGELGGTYRYSYQVRREEFDHLLLQHARAVGAQVHEGVSVREILFDDGRPCAALCVAQGAEEATTVEFDYLVDASGRNGLMSTRYLDNRKFHEIFRNVAAWGYWEGLSWPDDCAPGSILVSSIPDGWWWAIPLADRPTSVGVVMHRDAFVAARRTGTLEQVYAQALALSPVMANLTEHARLVTPLKTEQDYSYTCDSFAGNGYFLSGDAACFLDPLLSTGVHLAMYSGMLAAASLASILRAEVTEREAAAYYRDSYRQAYLRFLVFVQTFYEAHGKLGYYSKADELSHYMIEAGDIRRAFLNLVSGLEDIADAEQATSHLMGEMSRRIDQNLALRKDKRALSSAIGSTQVEDNARFFDAIEGLPCLSANMALDGLYVSTRPRLGLQRVAAM

SEQ ID NO: 82378 - protein, 507 aa, Caulobacter segnis
  REGION 1..507: note = tr|A0A2W5V482|A0A2W5V482_9CAUL Tryptophan halogenase; OS = Caulobacter segnis OX=88688 GN=DI526_19500 PE=4 SV=1
MTPVRKIVIVGGGTAGWMSAAGLAAILKGLPVSIQLIESAEIGTVGVGEATVPHIRDFNARVGLDEADFMRRTQATYKLGIEFRDWGEKGQSYIHPFGTFGHSIGGVHFHQHWLRARAQALATGRPFDALERYSLPVMAARAGKFAPPASDPRSLGSTYNYAFQFDAALYALYLRDHAQARGVTRTEGKIVAVDQRPEDGFVTAVVLEDGRRIEGDLFIDCSGFRGLLIEQTLQAGYDDWTRWLPCDRAVAVPCASVEPPVPYTRATADDSGWRWRIPLQHRVGNGYVYCSSYIDDDEAARVLLSKLDGQAQADPRVLRFVTGRRRKAWLKNVVAIGLSSGFLEPLESTSIHLIQVGISTLLELFPSQGFEAADQDEYNRVMALEFERVRDFLVLHYHATQRTDSAFWNDRRTGPIPDSLAYKMDLFRERGTVVGYKDGFFKEPSWVAVYLGQNIMPEHWDPLLDAVDAEQAAKIMAGLSGEISRVVEAMPRHEAFLRTAAGAGAAA

SEQ ID NO: 82379 - protein, 516 aa, Caulobacter segnis
  REGION 1..516: note = tr|A0A2W5X889|A0A2W5X889_9CAUL Tryptophan halogenase; OS = Caulobacter segnis OX=88688 GN=DI526_14365 PE=4 SV=1
MKRGRSILIVGGGTAGWLTAAYLAKALRIAEQAHLSITVLESPEIGAIGVGEATFPTIRNTLQFLGIDEARFIRQTSATFKQGIRFVDWGHAPTEQGRHSFFHPFEAPFSTDGVSLAPYWLLQDEASRAPFAEAVTIQARVADAARAPKRPHESDFGGPLNYAYHFDAAKLAEVLAERARELGVRHLQGHVGETVLDATGAIARIVSPEQGPLAADLYIDCSGFRAELIGKALNAPFKSARPVLFADRAVACRAPYTRPDAPIQSFTVATAHEAGWLWDIGLSGARGVGCVYSSDHIDDDRAEAILRDYVGGAEVETRRLAFEAGYREKQWIGNCVAVGLSAGFLEPLESTGVVLIEAAVAMIAELFPHTGPVSAPARRFNELMAARYENIIVFLKLHYALSRRPERFWRENTAPETIPERLQDLLEQWRHRPPARFDFILDLETFAFFNYQYILYGMGFETDLADGAAEFPDAAGAAKLFAKIRGFADRATQDLPSHRDLIAQINRFGFEERALA

SEQ ID NO: 82380 - protein, 503 aa, Caulobacter segnis
  REGION 1..503: note = tr|A0A2W5X4A8|A0A2W5X4A8_9CAUL Tryptophan halogenase; OS = Caulobacter segnis OX=88688 GN=DI526_19485 PE=4 SV=1
MTDHRLRRIVIVGGGTAGWMTAAALGRFLKDGYTTVTLVESEAIGTVGVGESTIPQINIFNRMLGLDENDFVRKTKATFKLGIDFVDWKRIGHAYHHPFGPYGVDMEGVSFHAYWLKLHALGLEDDLGAYSLQTVGARQGKFMRPNGQANSPLGQIAYAFQFDAGLYARFLRDYAEARGVTRREGRIQSVQQDGETGFVTSIALESGEVVEGDLFVDCSGFRGLLIEQALKAGYEDWSQWLLNDRAVAVPCALGGSLAPVTRATARPHGWQWRIPLQHRLGNGYAFCSQFVSEDEATALLLANLDGEPLAEPNLLRFTAGRRKKTWDKNVVAIGLSSGFMEPLESQSIHLIQVGIAQLLAHFPDRRFRQADTDRFNRVMTFEYETIRDFLILHFKATQRDDTPYWDYLREMPIPDYLADKIELFKGSGRVFRENEELFNDTSWFAVMIGQGVMPESYDPMADCMDEGLFKARMAEIKAVIARSAEVMPYHFAFIRANCDAMVG

SEQ ID NO: 82381 - protein, 517 aa, Novosphingobium pentaromativorans
  REGION 1..517: note = tr|A0A2W5R1U9|A0A2W5R1U9_9SPHN Tryptophan 7-halogenase OS=Novosphingobium pentaromativorans; OX = 205844 GN=DI555_00435 PE=4 SV=1
MTTDYPSSGRVVILGGGTAGWLAAAYLSRTLKMRDISLVESSEIGIIGVGEGTFPTIRTTLAGLGISEAEFLVRADATFKQGVLFNGWATGSDSYFHPFNLPIGGEDEALLPHWIAEDSAARLPWADAVTVQEQVIRAGRAPKRVEDPDFSGPMNYAYHFDAARFADYLRDISVAAGVTRIEGLVAQVEQAEDGDIAALVLADGRRVEGDFFLDCSGFRALLIGQTLGADFTSCSESLFNDRALAMQVPYARPGAPVRPYTLATAHDAGWTWDIGLTERRGVGYVYSSSHCSDDEAEATLRRYLGDEGGSLTPRQLRFETGYRQTQWIGNCVAVGLSAGFFEPLESTGIMLIEAALKMIGEFLVPGERSARQAAARSFNRLMAARFERIVHFLKLHYCITRRTDTAYWRDNTDPASIPEALQDMLAQWRHRPPSRFDFVVDLETFLPPSYHYILYGMGFETRLAAGIQRYPGAQEARDVFARVRAAHAGARGALPDHRALLDHYHARFAPPLDKVSR

SEQ ID NO: 82382 - protein, 506 aa, Rhodanobacter sp.
  REGION 1..506: note = tr|A0A1V3P0T5|A0A1V3P0T5_9GAMM Tryptophan halogenase; OS = Rhodanobacter sp. C05 OX=1945855 GN=B0E51_12920 PE=4; SV = 1
MTDSRIKNIVIVGGGTAGWMAAAAFSKVLGAEYSIRLVESEEIGTVGVGEGTVPHLKLFNDLLGIHDIEFMQNTQGTFKLGVQFNDWSRLGDSYIHGFGTIGHNVSLLPFHQFWIKAMQKGVASDIGAYCINTLAAPRGKFMTSATDVPASSPLADIAYSYQFDATLYAKFLRGYAEKRGVRRTEGKVAQTVLRPDDGFVEAVVLESGERVEGELFIDCSGFRGLLIEQALHTGYIDFTHWLPCDRALAVACEKVEPPTPYTRASARPAGWQWRIPLQHRTGNGYVYSSAHVSDDEAAATLLKHLDGKPMGDPRLLRFTTGVRKKSWNRNVVALGLASGFLEPLESTSIYMIQSGIARLLNLFPQRDFSEIVIDRYNAQATFEYEHIRDFLILHYHATERDDTPFWNQCRTMSIPAQLQDNIRLFKDSGRFFRDAEEMFATTSWVQVMLGQRIMPQSYHPLVDQMPDKELVGFMASVGQVVASCVDAMPSHQAFIDRHCIAPSVVA

SEQ ID NO: 82383 - protein, 508 aa, Novosphingobium taihuense
  REGION 1..508: note = tr|A0A562JJD9|A0A562JJD9_9SPHN Tryptophan halogenase; OS = Novosphingobium taihuense OX=260085 GN=IQ25_02949 PE=4; SV = 1
MSGLDQRRIVIAGGGTAGWMTAAALARVAAPHWQITLVESEEIGTVGVGEATIPMIRLFNQTLGIDEAQFLRETHGTWKLGIAFEGWGAFTDRYIHGFGLTGRSLGVLPFHHYWLRGRAEGFAGPLGEYVLNAVACDASKFAHIDRPQGSALPPMPYAYHFDASLYAAFLRRFAEARGVVRIEGRIVGFDRDALNGDLSALRLDRGEVIEGDIFVDCSGFRSLLLGQEMGVDYVDWSHWLKCDRAVAVPCARVEPLVPYTRSIAQPAGWCWRIPLQHRTGNGHVFCSDTMSEDEATARLIGRLDGEGLAEPRTIRFKAGRRAKFWERNVVAIGLSSGFIEPLESTSIHLIQTAISRVIDFLPNGPVQDADRDAYNRLATFEIERIRDFVILHYVANGRHGEPFWDSLRQMKVNGQLPKALGERMAMFRATGRIVREHDELFDVPGWVQVMIGQGVLPERWHPLADQVAPGSLKAFLDTVRGAYEKDVARMPTHAEYVAHVCRQVPAHA

SEQ ID NO: 82384 - protein, 500 aa, Caulobacter segnis
  REGION 1..500: note = tr|A0A2W5V6L3|A0A2W5V6L3_9CAUL Tryptophan halogenase; OS = Caulobacter segnis OX=88688 GN=DI526_06785 PE=4 SV=1
MSDQPSPIRSILIVGGGTAGWMAATWLAGRLARQNIAITVVESPDIRTVGVGEATVPAIRDYFRDIGVTEAQVMAATQGTVKLGIEFEGWNRPGGRFFHPFGLYGMPSRGTPFHQFWLRRRAEGDTTPLEAYSLCTQLALANQMMDPPASPPNDLGVFNWAVHFDAGLFAGFLRQKATSELNVTHIEGAVIEVERDGESGLLTGVTLADGKTLAADLFIDCSGFRSLLLGQALGVDYDDWSDLLPCDRAVAMPCERDGPLTPYTRSTALAAGWQWRIPLQHRVGNGYVYASAHISDDEAAATLASRLEGRALAEPNFLRFRTGHRRTFWRKNCVALGLAAGFLEPLESTSIVLIQSGVERLGQLFPDRGFDPALAEEYNRITRLEYARIRDFLLLHYIANGRVGEPMWDAVRSLNPPEALAHKMRMFERRGTFVRYEWESFQDPSWLSMFAGFERLPPAHDPMADYFTPTELDSAMRRMREAIDRAKALAVPHEAFLAAR

SEQ ID NO: 82385 - protein, 491 aa, Sphingomonas yabuuchiae
  REGION 1..491: note = tr|A0A147IQL1|A0A147IQL1_9SPHN Tryptophan halogenase; OS = Sphingomonas yabuuchiae OX=172044 GN=NS355_11570 PE=4; SV = 1
MTDKRIRRIVIMGGGTAGWMTAAALSRALAGQGVAITLVESDAIGTIGVGEATIPTIHWFNQIIGLDERQFMAETQATVKLGIEFVGWNGEGSRYFHPFGTFGPPGDGAMFLHRLIRARADGDMAPTEAYSLTVQAARAGRFTLPVNDRRSLLSTLGYAYHFDAGLYARYLRVLAERGGVRRIEGVVASVQQDGESASVRSLTLDDGQVVAGDLFIDCSGLRALLIGQTLGVAFDDWSHWLPCDRAWAAPSAAESDRTPYTRATAAEAGWRWRIPLQHRVGNGYVFSSRFQDEEAARASLLAGMDGAPLAEPRLIRFIPGMRREAWRANVVAIGLSSGFLEPLESTSIHLIQSGIAKLLSLFPARDCSPLLARQFNRVFGQEMLDVRDFLILHYHATTGRDEPMWRERQKMAIPDTLAEKLAHFRSSGRIVLSSDELFRDASWFAVLDGQGERPGDHNPLVEVVGRDNNLHQLAALRAEIAKTATAMPPLP

SEQ ID NO: 82386 - protein, 531 aa, Rhodanobacter sp.
  REGION 1..531: note = tr|A0A1V3NVT0|A0A1V3NVT0_9GAMM Tryptophan halogenase; OS = Rhodanobacter sp. C05 OX=1945855 GN=B0E51_17950 PE=4; SV = 1
MSRLKKVLVVGGGTAGWLAACYLAKAMNAVHPDSVQVHLVESDHIGLLGVGEATFPSIRGTLAAIGLDERRFLVGATATYKQGIHYRHWVRPPGTPGSDHFFHPFSQPSQRPGGPELLPYWLLGAAPAGVSFADAVTMQSTLVDHGRGPRRSTDPDYQGPMNHAFHFDAACFAKVLAEHGQETLGVKRHVATVERAVLDEQGAIACVVTKELGELTADLYVDCTGLRGTLIGGIMQSPFRSRRDVLFADRAVAMQVPYAKPDAPIPPYTISSAQEAGWIWDIGLQKRRGVGYVYSSRHTDDERAEAVFRRYLGSAGEGLAAMHIKFETGYRPEHWRKNCVAVGLAGGFVEPLESTGIALIELATYLLTHLLPGDTDNMESAARHFNEMMVARYDRIIDFIKMHYCLSQRRDSRFWIDNSDAASIPQTLQEKLAKWKHRPPHRLDFVGDLEMFMTASWQYVLYGMEFQTDFEPMRSAYPHMEAASREFAMIQQAASHALDDLPDHRALVEQLCREHMQRIRPRADMAAAAGS

SEQ ID NO: 82387 - protein, 485 aa, Streptomyces sp.
  REGION 1..485: note = tr|A0A2U2ZN18|A0A2U2ZN18_9ACTN Tryptophan halogenase; OS = Streptomyces sp. Act143 OX=2200760 GN=DI272_05630 PE=4; SV = 1
MTQEYDLIVIGGGPAGSTAATAVARRGHRVLLLERETFPRYQIGESLLPATVHGLCRILGVADEVQRAGFTLKRGGTLRWGRDPEPWQFSFAMTPRVPEPTATAFQVERSRFDEILLRGARRAGAEVREGSTVRRVVADDERVRGVEFTDADGNSRTVHARYVIDASGSTSRVHAEVGGGRVYSDFFRNLAVFGYVAGGARLPEPNTGNIFCAAFDAGWLWYIPLRDDLTSVGAVISPEHTAAVQRDARGTWRDMIDACPEVSRLVAGVPEATEAPYDQVRVRRDWSYWKQSFWRPGMALVGDAACFVDPVLSSGVHLATYGALLAARSVNAALDGSVPEARGFAAFEERYRREYRVFYEFLIAFYDMERNEDSYFWSAKKITEVDLGEAAAFAELAGGLVSRDSVMVRTDWHTAAAQLDGAVGRLAASDGRVNPLLAAPVVGETFRTGNDLQEQALYGGPLDGPGPAAPGGLTVTPDGLSWAKG

SEQ ID NO: 82388 - protein, 522 aa, Alteromonas sp.
  REGION 1..522: note = tr|A0A2V3UWA7|A0A2V3UWA7_9ALTE Tryptophan halogenase; OS = Alteromonas sp. I10 OX=1938740 GN=BZA03_105198 PE=4 SV=1
MTTATPITHIVVVGGGSAGWLTAGRIAAQHQCATRKDIKVTLIESPNVPIIGVGEGTWPTMRSTLIALGISETTFIKECDATFKQGAKFAKWTTGEEHDFYYHPLMLPQGFSQTNLGPYWQTVAPELNESFSHAVCVQESICEAGCAPKSIRHAEFAGTANYAYHLDAGKFTAFLTKHCTEKLGVHHVLADVNRIESSNNGDIKALHTEQGVKVEGDLFVDCTGFKSMLLGEHYKVPFIPCDDVLFIDRALAVHVPYDTPQSPIASHTISTAQDAGWIWDIGLQSRRGVGHVYSSRHQSKDDAYARLDTYVRQTSTLNGIDGINVKDITIQSGHRQRFWQNNCVAVGLAAGFLEPLEASALVLVELSASMIAEQLPANRAVMDIVAKRFNDTFSYRWQRIIDFLKLHYMLSKREDSAFWRDNRDSHTIPDSLKELLALWQYHPPSDKDFTSNNEVFPAASYQYVLYGMGFTSDLGAHQQWVNADFAKQQLMQNRKARGMAVEKLPKHRELINKIHQFGLQAV

SEQ ID NO: 82389 - protein, 506 aa, Xanthomonas sp.
  REGION 1..506: note = tr|A0A3A5ED82|A0A3A5ED82_9XANT Tryptophan halogenase; OS = Xanthomonas sp. CFBP 7698 OX=2082399; GN = XnspCFBP7698_20520 PE=4 SV=1
MIPAPLRNIVIVGGGTAGWMAAAAFARVLGPSFNVQLIESEQLGTVGVGEATVPHIKAFNNLLGIDEAEFVRQTQGSFKLGIEFVDWQRPGTSYMHGFGTQIGHPLGLLPFHQYWIKQHARGKAQPLGAYTLNTVAAVRGKFMTSPGDVPATSPLANIAYAYHFDAALYARFLRGFAEARGVTRIEGMVEQVQLHPESGNVVALHLASGQVIAGDLFIDCSGFRGLLIEDALHTGYQDFTHWLPCDRALAVPCENVGPPTPYTRCTARAAGWQWRIPLQHRTGNGYVYCSAHISDDEAAATLLANLDGKPLAAPRPLRFTTGRRKQCWNRNVVALGLASGFLEPLESTSIHLIQSGISKLLELFPREGISPVLLQRYNDRLAFEFDRIRDFLLLHYHATERDDSAFWQHCRQMPITPELQATLDLFRDSGRFYRNAEEMFAEISWVQVMVGQGIVPTGYHPLVDQVPDRDAEGFLASVAQTIAHCVDVMPTHQQFIDRFCKAPATR

SEQ ID NO: 82390 - protein, 500 aa, Alteromonas sp.
  REGION 1..500: note = tr|A0A2V3V3W2|A0A2V3V3W2_9ALTE Tryptophan halogenase; OS = Alteromonas sp. I10 OX=1938740 GN=BZA03_102477 PE=4 SV=1
MTTPHRIVIAGGGTAGWMAANLLAHRWANQAVTITLIESEDIGTIGVGEGSTPTLKRFFQTLDIPEYDWMEECQATYKVNIKFTGWNGNNSHNYSHPFISQLDVFSERAFHVNALTRRLGLDVETRPDKFLMAGYLAKKNLAPLPSHNFPFDIEYGYHFDSLKLGRFLRERAKSKGVYHVVGNIESVHTSPSGDISHLVCQDGQKLDGDLFIDCTGFSGLLLQKTLGVPFRDFSDNLFNDSAVVLPTPACANLPVETESVAMSNGWRWQIPLRNRTGNGYVYSQQYQEKDAAECELRRALGMENTDVEAKHLSMRVGQCERHWEKNCLALGLSQGFIEPLEATALHLVQTSIELFADNYSFNETSAQQRQAFNREVSERFERVRDYIVCHYKLNGRNDSDYWRDNRANMKLSESLLSLLDVWYRKGDIVEEIKRQGIGRHFSTTSWHCLLSGYGVFPPLALNQPASLKESGDLFEEKKLAAFFNRCSLNFDKQSTLFNAG

SEQ ID NO: 82391 - protein, 501 aa, Sphingomonas yabuuchiae
  REGION 1..501: note = tr|A0A147IUE9|A0A147IUE9_9SPHN Tryptophan halogenase; OS = Sphingomonas yabuuchiae OX=172044 GN=NS355_07685 PE=4; SV = 1
MTPDAPLRSIAIIGGGTAGWMAAAALARVLGPQGPTITLVESEEIGTVGVGEATIPPIQAFNALLGIDEKDFVRATGGTFKLGIEFVDWWQRGQRYFHPFGVYGIDVGAVPFEALWRRLHQMGEAEPLAAYSICTAAAMAGRFGRPQPGNTPLAQIGYAFHFDATLYAAFLRRHAEGAGVARIEGRVVEVGLHPETGFIEGVTLADGARLSADLFIDCSGFRSLLLGQALGTGFEDWGHWLPNDRAVAVPSAVTGPPAPYTRSTAKPAGWQWRIPLQHRIGNGHVYASAHISDDEAVATLLEGLDGEALADPRLLRFRTGRRNAFWVRNCVALGLASGFMEPLESTSIHLAQAGIARLLEMLPTRAFEGADIRRYNRLMTAEFESIRDFLILHFHANSRGDTAYWRDLAAMPIPESLAERIAIYRRTGRVYREADELFSRTSWLAVMDGQGLNADSSDPIALGVSVEAARARLGRIAEMTRAAVQHLPAHEEFIARHCGVR

SEQ ID NO: 82392 - protein, 501 aa, unidentified
  source 1..501: note = Alphaproteobacteria bacterium
  REGION 1..501: note = tr|A0A257HLC6|A0A257HLC6_9PROT Tryptophan halogenase; OS = Alphaproteobacteria bacterium PA1 OX=2015569; GN = CFE27_11620 PE=4 SV=1
MAIETIVIVGGGTAGWMAAAALSRLRAGKPVNVIVIESEQIGTVGVGEATIPPFLDFNRLLEIDEREMLSAVQGSFKLGIQFVNWGKIGDSYIHPFGNYGYQVDGISFHHIWHKFKEAGDKRPIQIFNIETMAAHYGRFARTEDYQRDDLPPINYAYHLDAGRYAKYLRAYAEKRGAIRIEGKVNDVALDGETGFVTSVTMDNGVVIEGDLFVDCSGFRGLLIEQALKTGYDDWSNFLPCNRAVALPCKRDDGSPPPPYTRATAHRAGWQWQVPLQHRNGNGHVYCSEFMSDDEALDILVNNIAGKPQAEPNFLRFVTGRRKKFWNKNVVALGLAAGFMEPLESTSIHLINTGINKLIALLSLDGITQAQEDAFNRLTGKEYARIRDFLILHYNATTRDDSPFWNYCRNMAVPESLTEKTDLFRLNGQIFREDDELFTETSWAAVMMGQGISMQGHNAMADALMNTKTTDELRGIEQSIQFVVQHMPSHRDYLERYCPAPM

SEQ ID NO: 82393 - protein, 527 aa, unidentified
  source 1..527: note = Croceicoccus ponticola
  REGION 1..527: note = tr|A0A437H1E5|A0A437H1E5_9SPHN Tryptophan 7-halogenase OS=Croceicoccus ponticola OX=2217664; GN = EKN06_03925 PE=4 SV=1
MGGTVDHVVIAGGGTAGWLAACTIAARSAKEVARPIAVTLVEAPDIPTIGVGEGTWPTIRSTLAAIGIAEDEFILACDASFKQGSRFDGWRNGGAGDSYLHPFTAPAGAVHRAAVAAWQAKGANTGHGFADTVTAQTAVCARDLAPRQTGMPAYAGALNYAYHLDAGKLVDLLRRHAVGKLGVTHLSARIDGVERADNDDIAALMLDNGKRLTGDLFIDCTGMRGLLIAGEMGASWIDRSDVLFNDRALASQVATAPESAIASVTVGTAHDAGWIWDIALPTRRGIGCVYSSRFCTDDAALATLCDYVARAVPGAPPPEPRLLRFESGHRDRFWVGNCLAIGLSAGFVEPLEASAIVLIELSLRALMDGFPHDRAEMAIHARRFDSLFRYRWDRIVEFLKLHYVLSDRTGAYWQAHRDSVPADLADMLALWQRNVPGPADFPMVEEIFPAASWQYVLYGMGQAVPDFAGQGPANNDPAHNDPAHNDFADDVHRRARQLAAALPTNRSYLDTLRGDRARVAQVTGSLA

SEQ ID NO: 82394 - protein, 509 aa, Porphyrobacter sp.
  REGION 1..509: note = tr|A0A0N1AVW0|A0A0N1AVW0_9SPHN Tryptophan halogenase; OS = Porphyrobacter sp. AAP60 OX=1523423 GN=IP79_14400 PE=4; SV = 1
MGDGSVRKLVIVGGGTAGWIAAAAFSRLLGQRLTIELVESETIGTVGVGEATIPQIIRLNTILGIDEHDFLRRTSGTFKLGIEFVDWGSLGSRYLHTFGDTGMTIGNVAFHHHWRRSVTGQNAPDAKGLWDYSLHQHAADQARFGKLDRVGNTAMTGLAYAYHFDASRYALYLRDYAEARGVTRTEGMVESVTRDGTSGDITAITLAGGREVAGDFFIDCTGFRSLLLGGELGVQYDDWSRWLPCDRALAVPSERLPTLVPYTRATAKAAGWQWRIPLQHRTGNGHVYSSGFISDDAAADTLLAGLDTKALGDPRPIRFTTGRRQTFWAQNCAAIGLSSGFLEPLESTSIHLIQSHISRLIQLFPRSSHADAERAEYNRRCADEFDQIRDFLILHYHRTDRDDSEFWRYCKHMAVPDSLTHKLELFAASGRVGRDADDLFRDASWVQVMLGQGIMPADYDPMADQMAPAQLAEFLANLRTLVTRAVAGLPTHEDYLRQHCAADPASMAA

SEQ ID NO: 82395 - protein, 511 aa, Porphyrobacter sp.
  REGION 1..511: note = tr|A0A0N1L8F3|A0A0N1L8F3_9SPHN Tryptophan halogenase; OS = Porphyrobacter sp. AAP60 OX=1523423 GN=IP79_09825 PE=4; SV = 1
MSSEASQPAKSPVRVVVLGGGTAGWMTAAGIARLLPDLASVQLVESEEIGIVGVGEATLPHIRGFVEKLGIDEAAFMKATHATFKLGIDFRDFGRIGESYIHPFGSFGEEVGGVGFHHYWLELARHGMARDLGDYSLAVAAAKANRFRPPSQDDSLASTYGYAYQFDATLFGPFMREFGLGIGIERHEGRVVTVERDGASGDVTALVLADGRRIEGDLFIDCSGFRSILLGQELDVPWEDWTHWLPCDRAAAMPCTHATDDIRPYTTATAMPAGWRWQIPLQHRMGNGYVFSSAHISEEQACDAIRASAEGTPLADPRILKFRPGRRAQSWSHNVIGVGLASGFLEPLESTSIYLAQMAITYLIELFPERGAIDPRDRDEFNRLVDMEYDRVRDFLILHYNATTRDDSEFWNHVRTMRLPDSLEGKLELWRKAGRIEKYSDGLFYDASWIAVYVGQGLLPEAHDPRAAMIAPDALARATERLRMAVTGEVAAMPGHRDFLRAEAARLAEAA

SEQ ID NO: 82396 - protein, 493 aa, Sphingomonas yabuuchiae
  REGION 1..493: note = tr|A0A147IR97|A0A147IR97_9SPHN Tryptophan halogenase; OS = Sphingomonas yabuuchiae OX=172044 GN=NS355_10755 PE=4; SV = 1
MSTPRRIVIAGGGTAGWMAAAALARTLGRAVTVTLVESDAIGTIGVGESTIPPIITFNRLLGINEAEFMAATQATFKLGIQFDGWKGPEDRYFHSFGLTGKDHWAAGFQHFWLDGLSRGHDAPYEDYCLELIAAREGRFAHLPDERMNYAYQLDSTLYGRFLRGMAEGDNAVRIEGRIAEVDLDGDTGDIAALVLDGGRRVEGDLFLDCTGFRALLIERALHVGFDDWSHYLPCDAAVAVQTESVRPPVPYTRAIAHEAGWQWRIPLQHRAGNGIVYCSRYIDHDAARERLLSTVEGKVLTEPNMLRFQTGARRKQWHRNCIAVGLSGGFLEPLESTSIHLIQRAILRLIRLLPGGPISAHDVAEFNDQQMTDMLQIRDFLILHYKVHERRDSAFWRQCADMEVPDSLAHRIALFRETGRVFRRNDELFAENSWVQVMMGQGIMPEAHHPITARLTDEELERLLSTLRQNIATTVRGLPAHPDYVARHCGTAA

SEQ ID NO: 82397 - protein, 489 aa, Sphingomonas yabuuchiae
  REGION 1..489: note = tr|A0A147IWU6|A0A147IWU6_9SPHN Tryptophan halogenase; OS = Sphingomonas yabuuchiae OX=172044 GN=NS355_05195 PE=4; SV = 1
MSAPIRHVLVAGSGLTAWSAAAALKRRAPFLDVTLLATPPAADALADRIACTLPSLPGFLADLGIGEDDGVTRTGAGYRLGSRFSGWAEGLPDYVHAYDGYGHAIGPAAFHLHWVRAARDGHAAPFDAYCPAAQLARAGGFVPPSPGTPFAGQDYGLTLDLPRQVAMMRAFALHVGVHEVTDSIAQVQVDTTGHVTAIAVQHGPALTAHLYIDATGPAALLRGSIDDAWQDWRDWLPCDRVLLGTQVLGEGAPVLTPVIAHAAGWRWSSGEQVGMAYGSEHLSDPEAAAMLTRDGTVVDAPIVIRPGTRPQAWRGNCIAIGDAATQVEPLEWCNLHLALSAIDRLVTMLPDTAMAEVEAADFNRQTLAEAERVRDFLAAHYRTARRPEPMWQAVAQAEPPSSLAHTLGQFGERGRLPFYEEETFTRDSWAAILLGQGYLPRRIDPLVHGIPAPQVDAAMARMTDAIAAALPHVPAHAQWRAAQMRRLAR

SEQ ID NO: 82398 - protein, 515 aa, Sphingomonas sp.
  REGION 1..515: note = tr|A0A514WLG2|A0A514WLG2_9SPHN Tryptophan halogenase; OS = Sphingomonas sp. IC081 OX=304378 GN=DM450_14440 PE=4; SV = 1
MAPDTVSQPIRSILIVGGGTAGWMAANLLATRLRRLPIEITLVESPDIGTVGVGEATVPAIRDYFKAIGVTEAEVMQATQGTVKLGIEFRDWRAPGTSFFHPFGRYGVDAFSVPFHQYWLKRRMAGDETPLAEYCLPTQVAMRNLMLLPPEQPVNDLGVFDWAIHFDAGLFARFLAERARDTLGVRHVQGTISAASRDGESGRIASVVLSDGRSLEADLFVDCSGFRSLLLGQTLEVPYEDWTHLLPCDRAVAMPCAHGGELTPYTRSTAREAGWQWRIPLQHRVGNGYVYSSRHISDDEATATLIASLEGEALAEPNMLRFRTGHRTKVWEKNCVALGLAAGFLEPLESTSIVLIQSGIERLLAHFPDRDFDPSLADEFNRITALEYARIRDFLLLHYWGGQRGEALWQECRALDLPETLAQRIRAYKGAGKLPRFEWDSFQPPSWLSMFAGFEIWPARYDPLADQFTAEELGGTFAQMRAAIARAVSLAGSHEQFIAETCAAPAAQQSAHQPA

SEQ ID NO: 82399 - protein, 500 aa, Novosphingobium taihuense
  REGION 1..500: note = tr|A0A562JJF4|A0A562JJF4_9SPHN Tryptophan halogenase; OS = Novosphingobium taihuense OX=260085 GN=IQ25_02942 PE=4; SV = 1
MIDSGLMIRSVAVIGGGTAGWMTAAALAQALRHNCSITLVESDEIGTVGVGEATIPPIRTFNETLQIDEREFVRKTKGSFKLGIEFVDWGSLGNSYFHPFGPHGRAFDIVNLHHYWLRARESGETAPLDEHSMAWALAKENRFAPPMPDQRNVLSTYDYAYHFDAGLYARFLREYSEAKGVTRVEGKVASVEQDAESGFVTGVTLEDGRKVEAELFVDCSGFRGLLIEGALKAGYKDWTHWLPCDRAMAVPCKNVGPLTPYTRSTAREAGWQWRIPLQHRTGNGYVFCSHFLSEDQAAEKLLSRLDGKALADPRPLRFVTGRRKSFWEKNVIAIGLSSGFMEPLESTSIHLIQAGISKLLALFPDRTFDPLVIEEYNRIAINEYERIRDFLILHYKLTERDDSELWRYCAAMDIPDTLHTKIEHFRRYGRLVQRDADLFGAPSWLAVHIGQGNIPERTDPLADYRGIDGREWLAKLRGAMHHAALQQPTHEQFIGANCAA

SEQ ID NO: 82400 - protein, 446 aa, unidentified
  source 1..446: note = Halobacteriovorax sp.
  REGION 1..446: note = tr|A0A2D5YN24|A0A2D5YN24_9PROT Tryptophan halogenase (Fragment) OS=Halobacteriovorax sp. OX=2020862; GN = CME69_05535 PE=4 SV=1
MNKPIHIVIAGGGTAGWMAANYFAHKWSSGKVNITLVESSDIGIIGVGEGSTPTLKRFFDELNIPENDWMPKCNATYKVSIQFNNWSPGSGINQYRHPFISQTDTFTQRAFEVNCRTRRLGLDTHVKPEDFLINGMLAKQNKAPLTPDNFPFRMEYGYHFDSALLGNYLRELAIGKGVTHVNAIISDVVLHPSGDISHLVTDKGIIEGDFFLDCTGFSSTLLQQALGVKFNSYSENLFNDSAVVLPTQAQKNIKVETQSTALSSGWCWTIPLQNRTGNGYVYSTAHLSKDQAEEELRRHLGFESTDVEARHLKMKVGQVGQHWHKNCLALGLSQGFIEPLEATALHLVQICIEYFSDTFEKNGFSTKPCSNYNSFARERFDRVRDYIVAHYKLNTREDSDYWHDNRENMVMSDSLNSILSAWFSRQDLASEIKRQNIGMHWDSVSW

SEQ ID NO: 82401 - protein, 504 aa, Sphingomonas yabuuchiae
  REGION 1..504: note = tr|A0A147IS66|A0A147IS66_9SPHN Tryptophan halogenase; OS = Sphingomonas yabuuchiae OX=172044 GN=NS355_10255 PE=4; SV = 1
MTTPSPDAIRSVVIVGGGTAGWMTAAALAHAMPHGLSITLVESDAIGTVGVGEATIPPIRLFNQTLGIDEAEFLRETKGSFKLGIEFVGWGRAGHRYFHPFGTHGKSFDLVAVHQHWLAAGGPDSDIAFDDLSMAWGAGKRGRFAQPMADPRSVASTFDYAYHFDAGLYARFLRRYAEARGVVRVEGKIAGHALEDTLGHVASVTLDDGRVLAGDLFVDCSGFRGLLIEEALGTGYEEWAHWLPCDRAVAMPCATGGDGLTPYTRSTAREAGWQWRIPLQHRTGNGYVYCSRHISDDQATATLMANLDGQALGDPRFLRFTTGRRKLMWNRNVVAIGLSSGFMEPLESTSIHLIQAGIAKLLAYFPTKAFEPAGIAEYNRVAITEYERIRDFLILHYKLTERTDSALWRDCAGMDIPDTLAMKIDHFRAAGRLVARDMDLFGPASWAAVHIGQFNMPEGLDPLLAYGDPAQSRVFVAKLAGAIGQMAESMPTHAQWLTKIGATQ

SEQ ID NO: 82402 - protein, 499 aa, unidentified
  source 1..499: note = Phenylobacterium zucineum
  REGION 1..499: note = tr|B4R8W6|B4R8W6_PHEZH Tryptophan halogenase; OS = Phenylobacterium zucineum (strain HLK1) OX=450851; GN = PHZ_c2922 PE=4 SV=1
MEQVVKKVVVAGGGSAGWMAAAALSRQLGGLLDITLVESDAIGTVGVGESTIPTARTFVALLGLDEREFMRETGATFKLGILFENWGEVGDRYIHSFGQVGKSTLMAHFHHMWMEARAQGFGGDLGDYCLELRASEEGKFYAADDFPMNYAYHIDATRFGRFLRRRCENNGVRRVEGKIQRVEQHPETGFITALVLESGERVEGDLFVDATGFRGLLIEQTLKAGFEDWGQWLPNDRAVAVQTATSEPPLPLTRAIAHRAGWQWGIPLQHREGNGWVYCSEFMSDDEARDSFLGQLKGEKLTEPWFLRFRPGRRRKAWDKNCVAIGLAGGFIEPLEATSLHITMIAITRLLQLFPFAGVNAALQTRFNFLADQEIQRVRDFIILHYKATERTDSPYWDRCRTMQIPDSLAERIELFRETAQLYHVPGELFLIDSWLQVMLGQRIRPKTHHRMGALMPPERLRGALGDLKGNVDRAVGKLPSHQEFLDRYCPVSPAEAAA

SEQ ID NO: 82403 - protein, 515 aa, Porphyrobacter sp.
  REGION 1..515: note = tr|A0A0N1L9A9|A0A0N1L9A9_9SPHN Tryptophan halogenase; OS = Porphyrobacter sp. AAP60 OX=1523423 GN=IP79_09840 PE=4; SV = 1
MTGASAPKPVTKIVIVGGGTAGWMTAAALTRVLGGMPGLSITLVESDAIGTVGVGEATIPQIIGFNRLLGLDEAQFMRETRATYKLGIEFVDWLRPGHAYVHPFGSFGIDMLGIEFQHFWLRGQQVGDTSPIDDYSIAAVAGKSGRFAWPRADNPKSPLSKLSYAFQFDAGRYAKFLRAFAENGGANRIEGRITEVLQDGESGFVTALRLEDEREIAGELFIDCSGFRSLLLGQTLGVPFTDWSKWLPCDSAVAVPCELGGRNEPLTRSTARPAGWQWRIPLQHRIGNGHVFSSAHIDRGAATDLLLANLDGKPLADPNQLAFKAGHRARAWDKNVVALGLASGFLEPLESTSIHLVQSGIARLLALFPDTGFSAVERDRFNTDTSREYLNIRDFLVLHYRASERDDSEFWRYCRNLEAPDGLVEKIDMFRSSGRIFRENNELFTEASWLSVMLSQGITPQGYHPAAHMLDDAETRTRLAHIRDVIRNTVDQLPSQAEFLRQSGGAIAAEEYLTA

SEQ ID NO: 82404 - protein, 421 aa, Amycolatopsis keratiniphila
  REGION 1..421: note = tr|A0A1W2LKM3|A0A1W2LKM3_9PSEU Tryptophan halogenase; OS = Amycolatopsis keratiniphila subsp. keratiniphila; OX = 227715 GN=AVR91_0234760 PE=4 SV=1
MSATLHGMPERFDVIVIGGGPAGATCAGLLAKEGRTVLVLERERFPRYHIGESLIPVGMRPLQELDLLDRMEARGFERKYGGSLVWGNRDVPWNFSFMKASEGTYAYHTRRADLDTLILDRARELGAYVVEETTVKDVIQSDTGRVTGVRFTLRGSAGDYEASASLVVDASGQSRVIGRKFSDITWHNELRNVAVWTYYDNCDRLPGDEWTNILIEGTADGWFWGIPIDKGTMSVGYVTKSDLANADDQSLEQLFLRERDKTTRLKGLLANARQHAGYRTARDWSYTNETFYGDGWVLVGDAAAFVDPLFSTGVALATLAGSSLSKVVNRILDHPAIEEKALDRYAGNYRAFFDEIRNFVERFYDRTKYKEYYYDLAQEIVDPEQLHAPSTDFVTLISGLSGKHPLLKINLDDLVANVTEP

SEQ ID NO: 82405 - protein, 526 aa, Novosphingobium pentaromativorans
  REGION 1..526: note = tr|A0A2W5NSI1|A0A2W5NSI1_9SPHN Tryptophan 7-halogenase OS=Novosphingobium pentaromativorans; OX = 205844 GN=DI555_03955 PE=4 SV=1
MDAKVKRVLVVGGGTAGWLTAGYLAKMLGADLPGGVGITLVESPEIGIIGVGEGTFPTIRRTLERIGVREKDLLRRCEATFKQGVKFVDWLHPAGQGGSDNYLHGFQEADDRNGGPEYLPYWLLGEAGKMPWDEASTPQKRAVDALRGPKLATHPEYAGVLNYAFHFDAGALAELLRDQGVANGVTHIADTVQEVLCGGDGAIAGVRTQKNGMLEADLYIDCTGFRAELIGKAMGRKWKSCKDILFCDSAIAAQVPYDSPDAPIQSCTLSTARDAGWIWDIGLQTRRGTGYVYSSAHCDAEEAERTLRSYLGAQGQTATTRRLQFDAGYREVNWYKNCVAVGLSSGFFEPLEATGIVFSEIAAGAIANLFPWAGDYETSARQFNATMLERYERARDFLKMHYSLTRRTDTDFWRDNVRTETIPGSLLELLDRWRHRPPNEKDFNPNIDIFPATSWQCVLYGMGWKTDLSAKAGVMRLRPEAHQAFEQVQRQSDYAVANLPDNRALLQQMLAGDTVSTIKAFAATAG

SEQ ID NO: 82406 - protein, 509 aa, unidentified
  source 1..509: note = Croceicoccus ponticola
  REGION 1..509: note = tr|A0A437GWJ8|A0A437GWJ8_9SPHN Tryptophan 7-halogenase OS=Croceicoccus ponticola OX=2217664; GN = EKN06_10630 PE=4 SV=1
MPAPITSITIVGGGTTGWLAAAFLATRFEPGITSGKMTITVVESPTIPIIGVGESLSPAAPETLKTLGVPERAFMVETDATFKLAGYFLNWDVGARGQPMSWVNPFIGYLTAGYEFERFELAGKPFGDAPDYAATISPCRDAIERTRGPRRIGQGDFEAVLRYAYHTDASRYAGLLKKVALHRGVVHVADDVVDVALREDGFVDSLLLAKGGRHPVELVIDATGFAGVILKKALGIGHVDYSQTLLNDRAAVIQLDWPAMGEIEPATRATALGHGWAFRVPLYHRTGNGYVYSSRFISDDDARVEFAAHLGDPKLAERMRIIPMRIGRASRNWVGNCIAMGLSSGFVEPLEASAIYTVETSLKWLMNYFPTSDFPQSLADRYNQRTAALYDEVVEYIALHYHLSNRADTAYWRAQRTEPKLPERLAENLAIWRHALPVQADVQPTNYFDHNTYLAALFGKGFYKGGELRPERTLDPGEWAQLRQTIDDTHRRAINALPGHRELLDSFRR

SEQ ID NO: 82407 - protein, 505 aa, Sphingomonas yabuuchiae
  REGION 1..505: note = tr|A0A147IWX4|A0A147IWX4_9SPHN Tryptophan halogenase; OS = Sphingomonas yabuuchiae OX=172044 GN=NS355_05200 PE=4; SV = 1
MTKVTNDVVRVVIVGGGTAGWMAGAALTRLLSGQCSVRLIESEAIGVVGVGEATLPHIRSFNERLGIPEAEFMARTRATFKLGIEFRDWGRIGDSYIHPFGTFGRGAGAIDFHHYWSRLAREGQDLPPLDELSYACTLAREARFEHPDQGRGGLSSTFGYAYQFDALLFAPYLRSLAEEAGAVRTEGMVVDVERDGESGLIRSVTLADGERVEGDLFIDCSGFRSLLLGQALDEPFEDWSQWLPTDRAVAMPCRTETAVTPYTSAIAMPAGWRWRIPLQHRTGNGYVYASDFISDGDAARALEQEVEGEKLAEPRLLRFKAGRRRRSWVGNCVAIGLASGFLEPLESTSIYLVQQAITALIELFPGREMDASDRDEFNRVIDLEYDRIRDFLILHYHATSRTDSPFWNYVRTMPIPDSLGEKLELWRRRGRVVKYREGVFLDASWIAVYLGQGIVPEGWDPRADVAGTGDLVQAVRSLRSEIAGEVAMRPDHRAFLERYCPMVAA

SEQ ID NO: 82408 - protein, 501 aa, unidentified
  source 1..501: note = Croceicoccus ponticola
  REGION 1..501: note = tr|A0A437H177|A0A437H177_9SPHN Tryptophan 7-halogenase OS=Croceicoccus ponticola OX=2217664; GN = EKN06_03910 PE=4 SV=1
MKNDPAKPLRIVVAGGGTAGWMTAAALSRTLGRTASVTLVESDMIGTVGVGESTIPPLVNYLRLLKIAEADFMRATHATFKLGIQFDNWRVPGESYFHSFGAAGQDHWAAGFQHFWMEGKERGHDAPYDDYCIELIAAREGKFAHLPDNRMNYAFQLDATAFARFLRGIAEGEGTTRIEGKIADVNLDGESGDIAAITLENGTRIEGDLFVDCTGFRALLMGQALHIGYDDWTHYLPCDSAIAVQTSSVRPPVPYTRAMAHDAGWQWRIPLQHRVGNGIVYCSRYLDHDAAEERLLGNIEGEATTKPNRLRFTTGARRKQWHRNCVAVGLSSGFMEPLESTSIHLIQRAVLRIARMLPAGRVSQRDVDEFNHQQLLDMDQIRDFLILHYKATDRRDSPFWRHCAAMEIPDSLDHKIELFRETGRVFRSSEELFAENSWIQVMMGQGIMPQSHHPIAGKLSDAELDHLLRSLRDNIAKTVATLPSHGDYVTRYCGAQAVEAA

SEQ ID NO: 82409 - protein, 518 aa, Sphingomonas sp.
  REGION 1..518: note = tr|A0A514WNF8|A0A514WNF8_9SPHN Tryptophan halogenase; OS = Sphingomonas sp. IC081 OX=304378 GN=DM450_20080 PE=4; SV = 1
MTSDDPSSGRIVILGGGTAGWLAAAYLARTLGMRDVVLVESSRIGIIGVGEGTFPTIRTTLAGLGIGEAEFLTRADATFKQGVLFEGWATGADSYFHPFNMPVGGEDEALLPHWIAAAEDPARPSWADAVTVQERLIRAGRAPKRPGDPDFSGPMNYAYHFDAARFADYLRDISIAAGVTRIEGTVASAERAPDGDIAALMLTDGRRVAGGFFLDCSGFSALLIGKTLGAGFTSCADHLFNDRALALQLPYDCPDAPVRPYTLATAHDAGWTWDIGLSERRGIGYVYSSRHCSDEDAEATLRRYLGPQGAALAPRPLRFETGYRETQWIGNCVALGLSAGFFEPLESTGIMLIEAALKMIGDFLVPADQTARKAAARSFNRLMAARFEHIVTFLKLHYCITRRTDTAYWRDNTDPASIPESLQDMLLQWRRRPPSRFDFVVDLETFLPPSYHYILYGMGFETRLAAGERHYPGASEAREAFARVRTAQSGALGALPDHRSLLNHYHARTGTAPAKVSR

SEQ ID NO: 82410 - protein, 515 aa, Sphingomonas yabuuchiae
  REGION 1..515: note = tr|A0A147IYW0|A0A147IYW0_9SPHN Tryptophan halogenase; OS = Sphingomonas yabuuchiae OX=172044 GN=NS355_01965 PE=4; SV = 1
MVQPVQNIVIVGGGTAGWLTAGVIAARHQGRRPHGFTVTLVESPNVPIIGVGEGTWPTLRTTLRKMGVSETAFFRECDASFKQGARFNRWTTGAADDGYYHPLMLPQSFAQVNLAPHWLTAEGEDVSFCDAVTPQGRICEAGLAPKTIATPEYEAIANYAYHLDAGKFADFLRRHCCEQLGVRHVLADVEEVLLTESGDIRSVRTAQAGEVTGELFVDCTGFRSLLLGEAMGVPFKPLNDVLFCDTALAIQVPYDDPEAPIASHTISTAQSSGWIWDIGLPTRRGVGHVFSSSHIDRDAAERELRAYLGEAGHDLPVRELKIHAGHRTRFWERNCVGVGLAAGFLEPLEASAIVLIELSAKLIAEQMPACREVMDTVAKRFNETTLYRWGRIVDFLKLHYSLTKRTDSDFWRDNCRPETMPDRLQELMELWRYQAPWMHDEFDRVEEVFPSASYQYVLYGMGQRTDIAPGSLIAETVSAQRARRENDVQTGRLLAGLPKHRDLIRKIVERGLPTI

SEQ ID NO: 82411 - protein, 487 aa, Porphyrobacter dokdonensis
  REGION 1..487: note = tr|A0A1A7BHW3|A0A1A7BHW3_9SPHN Tryptophan halogenase; OS = Porphyrobacter dokdonensis DSW-74 OX=1300349; GN = I603_0274 PE=4 SV=1
MAAAALSRLKAGRPVEITLIESEAIGTVGVGEATIPPFVGFNQLIGVDEREMLSAVGGTFKLGIQFENWGRIGDSYIHPFGAYGYTMGGISFHHVWHRMAQGGDKRPIQVFNLETMAAYFGKFARTEDYKRDDLPPVNYAYHLDAGRYAAFLRQLAESRGVVRQEGRIADAAIDGESGFVTGVTLDDGRQFAGDLFIDCSGFRGLLIEQSLKTGYEDWTHYLPCDRAVALPCKRDDGSPPPPFTRATAHRAGWQWQVPLQHRNGNGHVYCSAHMEDQEALDILLGNIAGKPQAEPNWLRFTTGRRKKFWNKNVVALGLAAGFMEPLESTSIHLINTGIDKLLSLLSLDGITQAQEDAFNRLTGREYARIRDFLILHYNATSRTDSDFWNYLRTMPVPDTLTEKVELFKANGQIFREEDELFTETSWAAVMMGQGIAMGSHNAMADALDPAKTAEEVNEMEQSIRYLVQHMPGHGDYLARYCPAPAAA

SEQ ID NO: 82412 - protein, 515 aa, Sphingomonas yabuuchiae
  REGION 1..515: note = tr|A0A147IMI8|A0A147IMI8_9SPHN Tryptophan halogenase; OS = Sphingomonas yabuuchiae OX=172044 GN=NS355_14215 PE=4; SV = 1
MGETEVRRVVVVGGGSAGWIAACRLAAQARRIGSGVQVTLVESRNVPTVGVGEGTWPTMRNTLAKIGITETDFIRSCDAAFKQGARFVGWTDGTAQDGYYHPLNPPAGATEIDLAPHWLHRAAETGSFADWVDYQAMLCDAGLGPKTIVMPEYAGHANYAYHLDAGKFAVLLREHGVGTLGIDHVLGDVVRPQMSDHGDIVHLELADGRTVAGDLFVDCTGFAARLIGGVYQVPFRRCGDVLFADRAMALQVPYEDEDSPITCHTVSTAQEAGWIWDIGLWTRRGVGHVYSSAHTSDDAAEAALRAYVGPAAKGLSARRITIDAGHRTRFWQNNCVAVGLSAGFIEPLEASALMLIEASMDAIADRLPRTRAAMDVMARQFNATFTHHWMRIIEFLKLHYVLTRRTDSDFWRDNVASSSIPDGLAERLELWRHHSPGPQDFDHAREVFSWPSYQYVLHGMGFDSRQPRIDAAAPDTALAQRFVTRMARAKDDLRTRAPRHRDLLRAIREHGLQRV

SEQ ID NO: 82413 - protein, 178 aa, unidentified
  source 1..178: note = Unknown
  REGION 1..178: note = tr|T1AY27|T1AY27_9ZZZZ Tryptophan halogenase (Fragment) OS=mine drainage metagenome OX=410659; GN = B2A_01577 PE=4 SV=1
MPFYTYWHRCALAGTAAPIEHYSLQALAARQSKFMRPIDRPHSPLATIVYALHLDAKRFATYLRAYAEARGTLRTEGKVRSVALRPEDGFIDAITLESGERITSDLYIDCTGFRGLLIEGALKTGYEDWTHWLPCDRAVAVACEHRGPLSSHTLATARPVGWQWRIPLQHRVGNGYVY

SEQ ID NO: 82414 - protein, 400 aa, unidentified
  source 1..400: note = Unknown
  REGION 1..400: note = tr|T1W5E6|T1W5E6_9ZZZZ Tryptophan halogenase (Fragment) OS=uncultured organism OX=155900 PE=4 SV=1
MIDGLGQHIVILGGGTAGWMTACLIAHRWRDRGVRVTLVESPEIGIVGVGEGSTPQLKHFFDTLGIAEAEWMPACNATYKLGIGFEGWSDREGYDQYFHPFPTELDGHTASQFFYNTRARRTGRDVDAHPDRFLLPARLASANCAPQPAANFPFEVSYGYHFDAYKVGAFLATHATETLGVVHLQRRIASVERASTGEITALIDTDGERIGGEFFIDASGFRSTIFGALEVPFVSYAGALFNDRAVVMPTAHTPGAPIPSQTRATALSAGWAWHIPLTSRNGNGYVYSSRHLTEAHAEAELRAHICVDTGEARHLKMRVGRVRDSWSHNALAVGLAQGFLEPLEATALHLVIATVEAFLDMVDQGGATDAVRTAFNARIAARYDGVRDYIVAHYRLNQRH

SEQ ID NO: 82415 - protein, 539 aa, unidentified
  source 1..539: note = Unknown
  REGION 1..539: note = tr|T1W939|T1W939_9ZZZZ Tryptophan halogenase; OS = uncultured organism OX=155900 PE=4 SV=1
MNEHSIRRVVIVGGGTAGWMAAAAFARFLNNGYTQVTLVESEEIGTVGVGEATIPPLINFNQMLGLNENAFLAATAGTFKLGIEFVNWGGLGERYFHPFGKFGHDLQGVHFHQLWLREKARRPTEDIAAWSMSAIAAAHGTFGRAADDARSPVRDLFYAFHFDASLYARFLRDYAEKAGIARIEGKIAKVDQRAEDGYLTAVTLEDGQRIEGDLFIDCSGFRGLLIEETLATGYESYAHWLPCDRAVAVPCALPNPAEPDPFTRSTAHQAGWQWRIPLQHRMGNGLVYCSQYLDDDAAEAQLLANLEAEPLAAPRRIRFAAGRRRQSWNRNVVALGLSSGFIEPLESTSIHLVQAAIQRLLALFPDKRFDPAERDEFNHQMQDLYEDIRDFIILHYKATRRDDSPFWNQVRTMEVPDSLQRKIDLFAGKGRLFREGYDLFTDPSWVAVFLGQGIVPQSWEPAADALDEQKVAIALEQMRRGYLDTAQRLPTHGDFLRRTALSPLAAPVPAPAPAATDDVPFFAFTAESPFDVNGGGSPL

SEQ ID NO: 82416 - protein, 495 aa, unidentified
  source 1..495: note = Unknown
  REGION 1..495: note = tr|T1W8J0|T1W8J0_9ZZZZ Tryptophan halogenase; OS = uncultured organism OX=155900 PE=4 SV=1
MTAQRIRRVVIVGGGTAGWIAAAALVKQLGPLLDITLVESDEIGTVGVGESTIPTSRRFHQLLGIDEPTFMRETQASFKLGIAFENWTREGDRYFHSFGQIGRQASWMADFHHFWLEAQAQGFGGSLAEYSLELQAAEAERVASGADAPVQYAYHLDATLYARFLRRLSEPAGVRRIEGKISKVEQDPESGFLTALILDSGERIEGDLFLDCTGFRALLIEQTLDTGFDDWGRWISTDSAFAVQTEAVAPPVPYTRAIAHQAGWRWKIPLQHRVGNGLVFCSEFLSTDAARQQLLDAVEGKPLIEPRLIRYRTGQRRKAWKKNCIALGLASGFIEPLESTSIHLIKTAVTRLIQTFPFSGIGEAQVDRFNAQARHEMEGVRDFIILHYHLNQRPEPFWERCRTMMIPDSLAARIALFQESAQAYQAADDLFRVDSWVQVLLGQGMTPRGHHQLARMMPPGELNRVLSGLRAGISGTVRGMPLHAETLARYCAASQ

SEQ ID NO: 82417 - protein, 514 aa, unidentified
  source 1..514: note = Unknown
  REGION 1..514: note = tr|T1W662|T1W662_9ZZZZ Tryptophan halogenase; OS = uncultured organism OX=155900 PE=4 SV=1
MSQTPSASPRPLRKICVVGGGTAGWVAAALMAEHFKGLYELELVESDDIGTIGVGESTVPPFLQLLAKLGVNEQEFIQETQASFKLGIQFKDWFRKGEDYFHPFGAIGSPVDLSEFYQLWLKARANGYPGALQDFAPATAMAKEGRFTLPFKAIRTPIGGAAYAVHVDARLVARFLRRFAEARGVVRTEGIVEDVALRPDGGVEKLILKSGKVIEADFFIDCSGFRALLIGKALKVGYQDWSEWLLCDRAIAVQTENVGPPPPYTLAHAQDFGWRWRIPLQHRTGNGYVFASKYLSDDEATATLMAQVEGAPVVKPMVVPFKTGVRDRIWDKNVLSLGLASGFIEPLESTAIHLIYRGMDFFFRYLPGMDGEQPLIDEYNRRMTADYEEIRDFIILHYCTTRREDTAFWRECKTMVLPESLQRKIDLFRVNGSLAEGLDELFRSVSWQSVMEGMGVHPRGYHPLVDRIPFDRATETLDQAAAVLKRMVQDLPTHEQFLRDHCPATPPEPAAKAS

SEQ ID NO: 82418 - protein, 505 aa, unidentified
  source 1..505: note = Unknown
  REGION 1..505: note = tr|T1W4T1|T1W4T1_9ZZZZ Tryptophan halogenase; OS = uncultured organism OX=155900 PE=4 SV=1
MTLGAPIRRVVIVGGGTAGWMAAAALARLIPTGMSITLVESDAIGTVGVGEATIPPIRTFNTMLGIDEAEFLAATAGTYKLGIEFTDWSQIGHRYLHPFGSFGFDIEGVRFHQHWRRRRAAGIVEDIEDYSLCAVAARAGRFLPPSPDPASVLSQMAHAYHFDAGLYASFLRARAERDGVVRIEGEVLDAALDSETGHVRHVSLAGEHRIEGDLFLDCSGFRGLLIEQALNAGYEDWTRWLPCDRAVAMPTTNENSSITPYTRSTARAAGWQWRIPLQHRTGNGYVYSSAHCSDDEAAATLRAGADGTPLAEPRMLHFTAGRRRKQWIGNVVALGLASGFTEPLESTSIHMVQTGISKLLALFPDQGFSPVEIDTYNRLAETQFDQVRDFLVLHYHATRRDDSPFWREARDRAIPDSLAEKIALWRRRGRLFRREDDLFAEESWVAVLLGQGVIPEGWDRLAEAIDLRQVDARFDRLRAMFVQTVERMPRHEEYIRRTCLTKVRV

SEQ ID NO: 82419 - protein, 500 aa, unidentified
  source 1..500: note = Unknown
  REGION 1..500: note = tr|T1WC67|T1WC67_9ZZZZ Tryptophan halogenase; OS = uncultured organism OX=155900 PE=4 SV=1
MMGGPLTRICIVGGGTAGWVAAAMLAHLHPDITIELVESDDIGTIGVGESTIPPFLELIAKLGIDEAEFVREVQASFKLGIDFRDWKRLGEGYFHPFGAIGMPVAGDFYQLWLRTALNGHPLPLQHLAPASVMAREQRFMPPRQAPRSPVGGASYALHVDAKRVAGYLRKFAEARGVVRTEGIVTDVATRPDGFVSHVVLKDGRTVGADFFVDCSGFRALLIGKTLASEFDDWSHWLLCDRAIAVQTQNAGPPAPYTVAQAQSAGWRWRIPLQHRTGNGHVFSSRHMSDDEATARLLEQVEGALVTNPMSVPFRTGVRREIWKNNVLAVGLSAGFIEPLESTAIHLIYRAMDFFARLMPERDCAPELQREYNRRMVADYEEIRDFIILHYCLTQRDDTPFWREYQAMEVPASLRDRIALFRVNGTMPEHVDELFRPVSWQSVMEGMGVRPRSCHPTLNRITSPDLPGELDRAANSLLAAVRQLPTHSEFIARSCAALPPA

SEQ ID NO: 82420 - protein, 581 aa, unidentified
  source 1..581: note = Unknown
  REGION 1..581: note = tr|A0A170PPQ2|A0A170PPQ2_9ZZZZ Tryptophan halogenase; OS = hydrothermal vent metagenome OX=652676; GN = MGWOODY_Smn709 PE=4 SV=1
MGRIMATTPTGAPSRTPAYAWYVLGILFLVYILNFVDRQIISILAEDIKRDLGLKDEDLGFLYGTAFGVFYSLFGIPLGRLADNWNRVRLMTIGLALWSGMTALSGFARSGGMLAAARIGVGVGEATVPHIRFFNQRLGIDEADFMRRTNATFKLGIEFRDWARIGDSYIHPFGDFGRDIAGLPFHQHWLRLVRAGRIPPELEAFSLPILAARADRFAPPSPDPSAIESTFSYAYQFDAGLYAAYLRSYAEQRGVRRIEGKIGPVGQDGETGFVHSVTLESGEEVTGDLFVDCSGFRGLLIEGALKAGYESWSHWLPCDAALAVPSAHGGPLTPYTSATARDAGWQWRIPLQHRVGNGHVFSTAFTDIDSARDILMSNLEGEALAEPRLLRFATGKRRSQWLGNVVAIGLASGFLEPLESTSIHLIQLAITKLIDLLPLDGWDPLDAAEFSRSMAVEYERVRDFLILHYCATERTDTAFWNHCRTMSLPESLAYKMAAFRERGVVVRYREGMFLEPSWLAVYYGQRIEPGRINPLVEALPIDKVASRAEAMASAFRAAAQAMPDHADYLHDLCGSAGAVRA

SEQ ID NO: 82421 - protein, 504 aa, unidentified
  source 1..504: note = Unknown
  REGION 1..504: note = tr|T1W585|T1W585_9ZZZZ Tryptophan halogenase; OS = uncultured organism OX=155900 PE=4 SV=1
MANHPLRIVIAGGGTAGWMAAATFARFLEMGYEIDLIESDDIGTVGVGEATIPQIHLFNDALGLDENAFLRATGGTFKLGIEFVDWFKQGHRYMHAFGDVGRDVGLLPFHQYWLRARSLGLAGDLGAYSLNTHAALAERMQRGPARTARTLPSMPYAYHFDAALYARYLRRFSETRGVNRIEGKIVRVTRDGESGDVSGLVLENGTTVAADLYIDCTGFSGLLIEEALGTGYEDWTHWLPCDRAIAVPSARSEAFTPYTRSTAHAAGWQWRIPLQHRTGNGVVFSSAHISEDEATATLLAGLDTPAMADPRTIAFRTGRRKRMWNRNVVALGLAAGFMEPLESTSIHLIQSAIARLLKLLPGRVIAEADRNEFNRQSDFEYERIRDFIILHYKATARDDTPFWRQCRDMAVPDTLAAKIELWRGNGHIVREHEELFTEVGWLQVLAGQGIMPAGHHPLADAISTSDLGEFMDTIDKLNAREAGQMQGHAAFVAQHCASPAGLGA

SEQ ID NO: 82422 - protein, 460 aa, unidentified
  source 1..460: note = Unknown
  REGION 1..460: note = tr|T1W5H3|T1W5H3_9ZZZZ Tryptophan halogenase; OS = uncultured organism OX=155900 PE=4 SV=1
MTQTIAIVGANLCGWMTAAALARRLPYAAYQIMVIDDGAAGDGLGDFAPMITVPPALVAFHAEIGLDHAALVGAGGGHALGVAFDGWRGDGSAAFLSYGETGAPYEAIAFHHLVGRLRATGANVRLADHALAAVAAQTGRFAPDGSIAHAVHVRTDRYSALLRSLASNAGATASSTPLAAVHSDADGIVETLTLADGSEISPLLVLDCSGSTAVVAGRTSPAFEDWSALLPCDRTQVALLPAEGAPPPYTQVDAQNDGWIATWPVDGVDVRLICRVGGEGHPFRAGRRVEAWRGNCVALGAAAGVLEPLHPTALSLLLRSLARLIQLWPATPRAPVEAAAFNRAGAAAIEGARDFLVTQYAVAGRAGAFWDDRRSASLPEHVAAKRDLFAARGRLPMYDDEPFEEEDWAAMFDAMGVVPRRYDARADLVPVDAIERHLAENRARIIARVRALPSYAGVAA

SEQ ID NO: 82423 - protein, 506 aa, unidentified
  source 1..506: note = Unknown
  REGION 1..506: note = tr|T1W6B1|T1W6B1_9ZZZZ Tryptophan halogenase; OS = uncultured organism OX=155900 PE=4 SV=1
MPVAAESKLRVVIVGGGTAGWMTAAALTRLLPDHCSVRLVESEAIGVVGVGEATLPHIRAFNERLGIDEAEFMARTRATFKLGIEFRDWNRIGDSYIHPFGTFGRGSGAVDFHHYWARLLREGAALPSLDTVSYACALARSGKFDHPASDRTPLSGTFGYAYQFDALLFAPYLRELAEQGGARRTEGTIANVERDAESGDITAVVLESGERIAGDLFVDCSGFRSLLLGSALDEPFVDWSQWLPTDRAVAMPCRTRTAVTPYTSAIAMPAGWRWRIPLQHRTGNGYVYASAFVSDEEARRALETAVEGEPLAEPRMLRFKAGRRRRSWVGNCVAIGLASGFLEPLESTSIYLVQQAITTLIELFPERPVGASDRDEFNRIIDLEYDRIRDFLILHYHATTRDDSPFWDHVRTMTVPDSLSEKLELWRTRGRLVKYREGVFLDPSWVAVYLGQGIVPEGWDPRIDTVAPDVLLRGLETLRAEIDSDVARRPDHRSFIGRYCAMEQAA

SEQ ID NO: 82424 - protein, 218 aa, unidentified
  source 1..218: note = Unknown
  REGION 1..218: note = tr|T1CC55|T1CC55_9ZZZZ Tryptophan halogenase (Fragment) OS=mine drainage metagenome OX=410659; GN = B1B_00460 PE=4 SV=1
VYCSRFIGDDAAAQVLLDHLEGTPLAEPRFLRFTAGRRRQFWNRNCIAIGLAAGFMEPLESTSIHLIQSAITRLLALFPDRDFDPITAQEFNRITHAEYERIRDFLILHYHATRRDDAPLWRYTRSMPIPETLQYKIDHFRRHGRLVAESLELFQNPNWLAVLTGQEVWPERYDPLVDLRSDVDAPRQLGSLRRVIAEAVQAMPTHRQYIERHCRARS

SEQ ID NO: 82425 - protein, 261 aa, unidentified
  source 1..261: note = Unknown
  REGION 1..261: note = tr|A0A1B6NQN0|A0A1B6NQN0_9ZZZZ Tryptophan halogenase; OS = marine sediment metagenome OX=412755 GN=MGSAQ_002747; PE = 4 SV=1
MVATVFIQEISMTTATPITHIVVVGGGSAGWLTAGRIAAQHQCATRKDIKVTLVESPNVPIIGVGEGTWPTMRSTLIALGISETTFIKECDATFKQGAKFAKWTTGEEHDFYYHPLMLPQGFSQTNLGPYWQTVAPELNESFSHAVCVQEAICEAGCAPKSIRHAEFAGTANYAYHLDAGKFTAFLTKHCTEKLGVHHVLADVNRVESSDNGDIKALHTEQGVTVEGDLFVDCTGFKSMLLANTTRCRLFPVTMYFLSTEH

SEQ ID NO: 82426 - protein, 88 aa, unidentified
  source 1..88: note = Unknown
  REGION 1..88: note = tr|A0A3B0RLJ4|A0A3B0RLJ4_9ZZZZ Tryptophan halogenase (Fragment) OS=hydrothermal vent metagenome OX=652676; GN = MNBD_ALPHA02-996 PE=4 SV=1
MNDRKIRHIAVVGGGTAGWMTAAALVNALRGNCRISLIESEDIGVVGVGEATIPPIKLFNQSLGLDENDFLRHTQGTFKLGIQFVDWA

SEQ ID NO: 82427 - protein, 178 aa, unidentified
  source 1..178: note = Unknown
  REGION 1..178: note = tr|K7WTA0|K7WTA0_9ZZZZ Tryptophan halogenase (Fragment) OS=uncultured microorganism OX=358574 PE=4 SV=1
GVGEATIPTLRQTLQKVGLPEADYFARCNASFKLGIKFVDWHYSPEPGREDVFWNPFGSLPTAWTVPAMNFWLDRHPGREPEHFTDLFTLHTHLAKAMLAPKAKDSKPFEGLVNYAYHMDTHLFGAWLREVATARGVTRVLDKVVTVEKDERGWIERLCLEKNPPLTGDLFIDCSGNR

SEQ ID NO: 82428 - protein, 229 aa, unidentified
  source 1..229: note = Unknown
  REGION 1..229: note = tr|T1AQT2|T1AQT2_9ZZZZ Tryptophan halogenase (Fragment) OS=mine drainage metagenome OX=410659; GN = B2A_02619 PE=4 SV=1
MNDRSVRRLVIVGGGTAGWMTATALRRLLYPELSIEVIESEEIGIIGVGEATIPPFRRHNMLLGIEEREFVCATQATFKLGIEFRDWARHGDSYIHGFGPMGLDLEGQPFHQYWTRALRLGVAKDLGLYSFNVLAARQGRFMPTPTDAPKNTPLEDIVYAYHFDATLYARYLRRFAEAEGVRRVEGRIVDVRLRPDTGFVDSLVLQDGRTVSGDFFIDCSGFRGLLIEQ

SEQ ID NO: 82429 - protein, 168 aa, unidentified
  source 1..168: note = Unknown
  REGION 1..168: note = tr|K7X7I3|K7X7I3_9ZZZZ Tryptophan halogenase (Fragment) OS=uncultured microorganism OX=358574 PE=4 SV=1
LGVGEATIPTLVRFHQLLKVNEQEFMAATQATFKLGIGFESWRDLGEDYIHSFGDTGRDHWSAGFQHFWLKGRQRGLAGDFGDYCLELRAALESKFAHIPSPGINYAFHIDATLYAQYLRKFSEKLGVRRVEGKIVEVGTHPETGYIESLMLDSGQRLEGDLFVDCSG

SEQ ID NO: 82430 - protein, 512 aa, unidentified
  source 1..512: note = Unknown
  REGION 1..512: note = tr|A0A3B0SAG7|A0A3B0SAG7_9ZZZZ Tryptophan halogenase; OS = hydrothermal vent metagenome OX=652676; GN = MNBD_ALPHA01-1187 PE=4 SV=1
MTQENRIQKIVIVGGGTAGWMAASMLAKTLEGNSTGDKADRIDITLIESDEIPIIGVGEATIPPIQLFNDYLGLDEDEFLRQTQGSFKLGIQFNNWGRLGDKYMHAFGTTGRPLGGVDFHHYWLKAGMEGGTSDLWDYSFNDKVARANKFSRMAKIKDSPLEGLTYAFHFDATLYAKYLRSYSERLGVNRIEGKVITASLRGEDGFISHLTMENGTEITGDFFIDCTGFRSLLIEETLKTGYVDWSGFLPCNRAIAVPTASVGDIQPYTRSTALSAGWQWHIPLQHRTGNGHVFCSDYISEDEATAMLLDNLEGETLADPRVVHFNTGRRRKFWNKNCVVLGLASGFMEPLESTSIHLFQSGITRLIKMFPDKSCSRADADEYNRQAISEFESIRDFIIFHYHATERTDTPFWRDCAGMDIPDSLTERLELFRTNGRIFRKGDELFSENSWLQVMIGQGIRPAGYHPLADQVASPDVREYLENIDRIQNRALSELPLQKDFIARNCSAAIQL

SEQ ID NO: 82431 - protein, 511 aa, unidentified
  source 1..511: note = Unknown
  REGION 1..511: note = tr|T1W5G6|T1W5G6_9ZZZZ Tryptophan halogenase; OS = uncultured organism OX=155900 PE=4 SV=1
MVETRDTRIRKVVIVGGGTAGWMTAAALTRHFRSTPMSITVVESSEIGTIGVGEATIPTIRRFYAQLGMTDAEVMQATQATCKLGIRFTDWGRPGSDFIHPFGLYGQDLGGIGFHHYWMRLHEQGDATPLSAFSLGASLAEAGKFIHPSRNPPSALSVFDWALHLDASLFAQHLRRFAEAGGCERIDAKVRSVDLRPADGFVDSITLEDGRAIEGDLFIDCTGFRGLLIGEAMGSTYEDWGQWLPCDAAFAVQSENAPDEEPAPFTRVTARSAGWQWGIPLRHRAGNGLVFSSQHMTDQQALDELMPNLLGKPITEPRRIGFRPGRRREAWVKNCVSIGLSAGFLEPLESTSIALIENGIERLKSLFPDRNFAAPVIEEFNDQSAREMERTRDFIILHYKLNGRDEPMWKACREGAIPDTLRRKIDLWKARGQFVRYRWEMFHPASWLAIYAGFDALPDSYDPGVDAFAPADLSLALGEMSSAIARTVGDTPTHARFLAALDRSFAAQDPS

SEQ ID NO: 82432 - protein, 511 aa, unidentified
  source 1..511: note = Unknown
  REGION 1..511: note = tr|T1WBH1|T1WBH1_9ZZZZ Tryptophan halogenase; OS = uncultured organism OX=155900 PE=4 SV=1
MDAPQDSRIRSIVIVGGGTAGWMTAAALVQHFRNTPLKITVVESSEIGTIGVGEATIPTIRRFYAQLGMTDAEVMQATQATCKLGIRFVDWSGPGSDFIHPFGLYGQELKGIGFHHYWMRLKAQGDTTPLSDFSLGASLARAGKFTHPSPNPPSSLSVFDWALHLDASLFAQHLRAYAEAGGCARIDARVGRVDLRATDGFIETITLEDGRQIEADLFVDCTGFKGLLIGEALGSTYEDWGQWLPCDTAYAVQSENAPGQLLQPFTQVTARSAGWQWGIPLRHRAGNGIVFSSAHLDDQQALDTLMPNLMGQPVTEPRRIGFRPGRRHQAWVKNCVAIGLSAGFLEPLESTSIALIENGIERLKSLFPDRNFAQPVVDEYNEQSAREMERTRDFIILHYKLNGRDEPMWRDCREAAVPETLQRKIDLWKARGQFVRYRWEMFHPASWLAIYDGFDAMPETYDPGVDSFAVEDLSRGLSEMRAAVARTVAETPTHAQFLAQFPAGLDRPRAA

SEQ ID NO: 82433 - protein, 501 aa, unidentified
  source 1..501: note = Unknown
  REGION 1..501: note = tr|T1WA55|T1WA55_9ZZZZ Tryptophan halogenase; OS = uncultured organism OX=155900 PE=4 SV=1
MVEQARVQKVVIVGGGTAGWMTAAALAGMLEDQGLAITLVESEAIGTVGVGEATIPHIRNFNTKLGIDENEFMARTQATFKLGIEFRNWGRLGDSYIHPFGAYGQPLERVGFHHHWLRLRQLGLAGEIGDYSLPVVAARKGRFSRPGSDPRSLLSTFSYAFQFDAGLYAAFLRSHAERRGVVRREGKVVDVTVDQTGHIRAILLDTGEEISGDLFIDCSGFRGLLIGEALGTGYHDWKRWLPCDRAVAVPCDTVEPATPYTRATALEAGWAWRIPLQHRVGNGYVYASDFITDEAASERVLGQLEGPPRQDPRFLRFTTGKRHRQWVGNCVAIGLSSGFLEPLESTSIHLIQVAITTLIELFPQRKMDPVDASEFNRVMDLEYERIRDFLVLHYKATERDDTPFWDHCRTMAIPDSLAEKMALFEESGVVAKYRDGLFLEPSWLAVYLGQRIEPRTWDPLGAHIPTDALGAAMEDLRRSVEQSAQAMPSHDAFVQSCCAAS

SEQ ID NO: 82434 - protein, 510 aa, unidentified
  source 1..510: note = Unknown
  REGION 1..510: note = tr|T1W9Q4|T1W9Q4_9ZZZZ Tryptophan halogenase; OS = uncultured organism OX=155900 PE=4 SV=1
MSPPDISSERRIRRIVIVGGGTAGWMAAAALAKVLGPGYADITLIESEAIGTVGVGEATIPQLRTFNALLGLDEDDFVRRTQGTFKLGIEFCDWGRLGDRYFHPFGPFGVDMEGVSFHAYWLRLNQLGDARPITDYSLQAMAAARGKFMRPIDAGRSPLSKIAYAFHFDAGLYAAWLREFAEARGVTRLEGRIVDVSLREEDGFVRSVTTSDGRIVEGDLFLDCSGFQGLLIEGALQTGYDDWSHWLPADRAIAVPCARVADPVPYTRATARPGGWQWRIPLQHRTGNGYVYSSRFIDDEAATADLLGQLDGAPMADPRMLRFTTGRRRKAWNRNVVALGLASGFIEPLESTSIHMVQSGIANLLAMFPTLAFEPAEVARYNRVIAYEAERIRDFIVLHYNATQRDDSELWRYCRDMSLPDSLLEKYEIFASRGRVFRENEELFNDTSWFAVMTGQNIRPSGFDPVAVVLSVDETRLRLQQTADAIRNSADYMPSHGDFIRDHCQAASAV

SEQ ID NO: 82435 - protein, 522 aa, unidentified
  source 1..522: note = Unknown
  REGION 1..522: note = tr|A0A3B0Z5S3|A0A3B0Z5S3_9ZZZZ Tryptophan halogenase; OS = hydrothermal vent metagenome OX=652676; GN = MNBD_GAMMA15-90 PE=4 SV=1
MSERINTVTIVGGGSAGWITALVLTTMLNRVDKNRIKITLIESPRIPNIGVGEGTVTGFSRLLRQLNIDEAEFMMKSDATFKCAGRFKGWHVDSNGKPTTSYNPFMEGGFVDGFQTYYYHQKFGAGGRSLIQTTQPTIELVERGLSPKLIGSKPYDALVPYTYHLNAKAFSDQLASIAKQRGVEYIQDEMLDLEQDEGGHISALKLEERGRYPVQFVVDCTGFRGRILQQALGEPFLDYSKHLLCDRAIPLPVPHRNADHIQPCTTATTLSSGWVFNVPLQSRMGTGYIYSSAHKSDDEALHELKQHLGDIVPDDASPPVIRMNIGRVRNTWVKNCVACGLSAGFVEPLEATAIYTIEQTARNLSFYFPEFGINEKAVAKFNHLMDEQYREVLDFIVMIYYTSNREEPFWKSAREDIQVPDTLLDNLELWKHYLPNANDVTGRYLFNYWDYYFILAGRNYFDREHYPGENMLRKKSWDMVLNRAEPAIADILRQLPSHTDYLKSVRKPRTGKKMLYSVNYKQ

SEQ ID NO: 82436 - protein, 117 aa, unidentified
  source 1..117: note = Unknown
  REGION 1..117: note = tr|T1WB77|T1WB77_9ZZZZ Tryptophan halogenase (Fragment) OS=uncultured organism OX=155900 PE=4 SV=1
EEQDRARDMAVFRYAVATRTAPLWVRARNAPPSPALAYKQAQFESRGRVVIYDEETFVEGAWIGAFLGHGVMPRRHDRLADRLPADQADAILARLRGVVHQAAQAMPPHADALKDRP

SEQ ID NO: 82437 - protein, 487 aa, unidentified
  source 1..487: note = Unknown
  REGION 1..487: note = tr|T1W633|T1W633_9ZZZZ Tryptophan halogenase; OS = uncultured organism OX=155900 PE=4 SV=1
MGGGTAGWMTAAALAAVAGRSVAEVHLVESEEIGIVGVGEATLPHIRAFNTRLGIGEAEFMRATGATFKLGIEFCDWARIGDSYIHPFGAFGHDVDGVGFHHYLSRAGQIATLPDYSLPVVAARHSKFAPPLEDPRSLLSTFGYAYQFDATRYAPFLRARAERQGVTRTEGRVVDVERSATGDVVAVVLDDGQRITGDLFIDCSGFRSLLLGQAMGEPFEDWSHWLPCDRAVAVPCADAGMLKPYTTATAMPAGWRWRIPLQHRVGNGYVYSSAHIDDGPAQDALLRSIESTPLADPRMLRFKAGRRARSWVGNVIGVGLAGGFLEPLESTSIYLIQLAITQLLELFPATPISPIDRDAFNRVVDLEYDRIRDFLILHYHATTRDDSPFWDHVRTMDVPDTLAEKMTLFRQRGRVMTYREGVFLEPSWIAVYLGQGVVPKGYDQRADRPSDAALVQALARLRTETRDAVMTMPDHAAYIAQSGGAAA

SEQ ID NO: 82438 - protein, 506 aa, unidentified
  source 1..506: note = Unknown
  REGION 1..506: note = tr|T1WAH5|T1WAH5_9ZZZZ Tryptophan halogenase; OS = uncultured organism OX=155900 PE=4 SV=1
MPVAAESKLRVVIVGGGTAGWMTAAALTRLLPDHCSVRLVESEAIGVVGVGEATLPHIRAFNERLGIDEAEFMARTRATFKLGIEFRDWNRIGDSYIHPFGTFGRGSGAVDFHHYWTRLLREGAALPSLDTVSYACALARSGKFDHPASDRTPLSGTFGYAYQFDALLFAPYLRELAEQGGARRTEGTVANVERDAESGDITAVVLESGERIAGDLFVDCSGFRSLLLGSALDEPFVDWSQWLPTDRAVAMPCRTRTAVTPYTSAIAMPAGWRWRIPLQHRTGNGYVYASAFVSDEDARGALETAVEGEPLAEPRMLRFKAGRRRRSWVGNCVAIGLASGFLEPLESTSIYLVQQAITTLIELFPERPVGASDRDEFNRIIDLEYDRIRDFLILHYHATTRDDSPFWDHVRTMTVPDSLSEKLELWRTRGRLVKYREGVFLDPSWVAVYLGQGIVPKGWDPRIDTVAPDVLLRGLETLRAEIDSDVARRPDHRSFIERYCAMAQAA

SEQ ID NO: 82439 - protein, 500 aa, unidentified
  source 1..500: note = Unknown
  REGION 1..500: note = tr|T1WAM0|T1WAM0_9ZZZZ Tryptophan halogenase; OS = uncultured organism OX=155900 PE=4 SV=1
MGEDAPDRIRQVVIVGGGTAGWMAAAALVKHFVATDLRITLVESSDIGTIGVGEATIPTIRRFYAKLGLTDQAVMEATSATVKLGIQFKDWRRPGESFIHPFGLYGQNMGEVAFHHLWLRRRQQGDDTPLERYSLGASLAEQGRMALPPRDASAPLAVYDWAIHLDASQFAQYLRRYAEASGVTRIDAKVADVERGPGGVAAIRLADGRRIEGELFIDCTGFRSMLLEALGVGFEDWREWLPCDAAVAVQTENAEGEPPAYTRAHAKPHGWQWRIPLRHRAGNGLVYASEAISEDAATAALLADLPGKPLVEPRRIAFRSGRRTEAWRGNVVALGLAAGFLEPLESTSIALIETGIERLKELFPTRAFAPALPAEFNDATAREMERVRDFIILHYKLNRRDDSDFWRRCAAMPVPETLARKLALWDARGEFLRYRWEMFHPSSWLAIYTGFDRMPAALNPALSGLDMDQVGLALERMQRGVAQTVARTPTHAQFLQAMHA

SEQ ID NO: 82440 - protein, 489 aa, unidentified
  source 1..489: note = Unknown
  REGION 1..489: note = tr|T1W6X2|T1W6X2_9ZZZZ Tryptophan halogenase; OS = uncultured organism OX=155900 PE=4 SV=1
MLRERLGHVLVAGGGMTGWCAAAALKRRAPFLDVTILSCAPSRHALADRIACTLPSLIGFQEDLGIGAADGIVRAGSGYRLGTLFTGWANGMPDYVHAYGRYGAAFGATAFHHHWVRAAQDGSAMPFDRHSPAAAMARAGRFAAPKPGTPFADHEFGLTIDVARHASMMRAFALHVGVREIPGEIGGVTLDADGAIATVDLTDGTALGADLFIDATGPEARLRGAFGDDRDDWSAWLPCDRVLIAETNDEPMVLTTVTAHEAGWRWASGVQSGFAYASTAISDGKAARVLRNATGATPDEPIRVRAGTRPQPWRGNCIAIGDAATEIEPLEWCNLHLALSAIDRLIAMLPGRVPVPVEVVEFNRQTLAEAERVRDFLAMHYHTARRDDPLWRTTAAAEAPVSLAHTLAQFAERGRLPFFEEETFARDSWAAVLIGQGFLPRRVDPLVSAVPVAATRAAMARQVAAIAAALPHVPTHAAYRADQKRHLTR

SEQ ID NO: 82441 - protein, 489 aa, unidentified
  source 1..489: note = Unknown
  REGION 1..489: note = tr|T1W9P7|T1W9P7_9ZZZZ Tryptophan halogenase; OS = uncultured organism OX=155900 PE=4 SV=1
MLRERLGHVLVAGGGMTGWCAAAALKRRAPFLDVTILSCAPSPHALADRIACTLPSLIGFQEDLGIGAADGIVRAGSGYRLGTLFTGWANGVPDYVHAYGRYGAAFGATAFHHHWVRAAQDGSAVPFDRHSPAAAMARSGRFAAPKPGTPFADHEFGLTIDIARHASMMRAFALHVGVREIPGEIGGVTLDADGAIATIDLTDGTALGADLFIDATGPEARLRGAFGDDRDDWSAWLPCDRVLIAETNDEPMVLTTITAHEAGWRWASGVQSGFAYASTAISDGKAARVLRNTTGTTPDEPIRVRAGTRPQPWRGNCIAIGDAATEIEPLEWCNLHLALSAIDRLIAMLPGRVPVPVEVVEFNRQTLAEAERVRDFLAMHYHTARRDDPLWRATAATEAPASLAHTLAQFAERGRLPFFEEETFARDSWAAVLIGQGFLPRRVDPLVSAVPVAATRAAMARQVAAIAAALPHVPTHAAYRADQKRHLTR

SEQ ID NO: 82442 - protein, 510 aa, unidentified
  source 1..510: note = Unknown
  REGION 1..510: note = tr|A0A3B1AWT5|A0A3B1AWT5_9ZZZZ Tryptophan halogenase; OS = hydrothermal vent metagenome OX=652676; GN = MNBD_ALPHA03-1292 PE=4 SV=1
MKKNNGLRKIVIVGGGSAGWISASCLAYSLQNTQCEITLVESPDIGIIGVGEATIPSFVDFIQYLGLSKADFIRETKATFKLGIKFYDWLEEGHEYWHQFGDVGVNIDHKPFYQHWLKSKFNGAEGNYTDYSPSVAMAQENKFFIPSQKQKSILSGSTYALHFDAGLVAHFLAKHAKSLGVHHISDNVVNVRLGTDGHITELDLKEREEPLEGDFFIDCSGQRGVLISQALRVPYVNWGKYLPVDRAIAVPTENQAPLKPYTESFALEHGWRWRIPLQHRAGNGYIYSSDYCDDEMARDVLLRNISGKPLAEPRLIKFQTGKRDKFWSKNCLSIGLSSGFLEPLESTSIYLAMKGILNFVQMLPSTECKSETAAEYNRLMDMEYECIRDFIVLHYCASKRTDSEFWRMWQKAQIPDTLKAKLNLFKSQGRLMRNDQDLFSHDSWYAVLAGMDVRPEAYDWTTDASNYDKACGIMSKVRMTLQERVQELPSHEEFVEKICARVPQSERALG

SEQ ID NO: 82443 - protein, 172 aa, unidentified
  source 1..172: note = Unknown
  REGION 1..172: note = tr|T0YGF1|T0YGF1_9ZZZZ Tryptophan halogenase (Fragment) OS=mine drainage metagenome OX=410659; GN = B2A_13912 PE=4 SV=1
MTETTPGHSDDRRLRHIVIVGGGTAGWMVAAALAQTTQGRCPITLVESEEIGSIGVGEATIPPIKRFNQMLGLDEYEFLAYTQGSYKLGIEFVDWTHKGQRYFHPFGQFGAEFDAVPLHHYWLRERARGDATPLQDYAMAWVAARNGRFERPLADRQRVQSTYDYAYHFDAA

SEQ ID NO: 82444 - protein, 512 aa, unidentified
  source 1..512: note = Unknown
  REGION 1..512: note = tr|T1D6D8|T1D6D8_9ZZZZ Tryptophan halogenase OS=mine drainage metagenome OX=410659 GN=B1A_02686 PE=4 SV=1
MACRAWSKGMSAQPIERTVIVGGGTAGWMTAALLAKALGGTARIELVESEEIGTIGVGEATIPQIRHINAFLGLDENEVMRAARATFKLGIQFNDWLRPGHSYIHAFSDIGLPQGGVPFQHYWLRERTQGGTHALWDYSLNAQAAAAGRFARMEHVGSSPLTGVRWAYHFDAGLYAAHLRRVAEHLGVTRREGRIVDVDLRGEDGFIAAVKLADGTRVAGELFIDCSGFRALLIEGALHAGYDDWRQWLPCDRALAVASARVPPMRPYTQASARPAGWQWRIPLQHRTGNGHVYCSAFISDDEAAATLLANLEGEALGAPRPFRFTAGMRKQVWVRNCVALGLAAGFMEPLESTTIHLVQSGVDRLLKLFPDARFEPAVRDEFNRQTRFEYERIRDFLILHYTASERRDTPFWRHCAAIARPESLQHKIDVFEASGQIFRAADELFTEVGWLQVLLGQGVEPQAYHRLADALQPAQFREFMGSLRALIQRAVDGMPGHADFVAEHCKAAVAA

SEQ ID NO: 82445 - protein, 549 aa, unidentified
  source 1..549: note = Unknown
  REGION 1..549: note = tr|A0A160TH59|A0A160TH59_9ZZZZ Tryptophan halogenase; OS = hydrothermal vent metagenome OX=652676; GN = MGWOODY_Smn1709 PE=4 SV=1
MAFSAAISGYRGWHRSRYWRSIASARSDEKCDSQETGFLTSSANKEHPLGPGRIRSIVILGGGTAGWMTATALARSFGRAVTITLLESEEIGTVGVGEATIPTIHWFNELIGLDEADFLRATKASFKLGIEFVDWKRPGHRYFHPFGEFGARLPGVAFHHRWLKARAAGVDLPLSSFSLAGQLAAENRFAKPVGDARSILSTLGYAYHFDASLYARHLRGIAEAAGVTRIEGRLQDVERDPSSGFVTALTTQRGERLEGDLFIDCSGFRALLIDQVMGGDFEDWSHWLPCDRAAAVPCARVAETTPYTRSTAREAGWQWRIPLQHRTGNGYVYASRFISDDEATATLLANLDGEALADPRVLRFTAGTRRRAWIGNVVAIGLSSGFLEPLESTSIHLIQSGIAKLLTLFPDRDCDPTLAERFNMLLNADMDTIKDFLILHYHATTDKPEPFWAERRAMPLPQSLVEREDQYRRSGRLMLRSDELFRDASWLAVLDGQGIEAGDYNPLADALDATTNVAQVRQIAAVIARAVPTLPRHDEALAQAMASTG

SEQ ID NO: 82446 - protein, 175 aa, unidentified
  source 1..175: note = Unknown
  REGION 1..175: note = tr|K7W8V8|K7W8V8_9ZZZZ Tryptophan halogenase (Fragment) OS=uncultured microorganism OX=358574 PE=4 SV=1
RFRRRRGDHPAIRNFNERLDLDEVEFMRESNATFKLGIQFENWRRMGDSYIHPFGSYGNPVNWIHFHHFWLQQRGEPEAGRFWDYNMHYMSAENGKFSIGRKKSRTPSPTPHYAFHFDATLYAQYLRGWSESRGVERTEGKVTDVSLDGETGDIRSITLESGEVIEGDLFIDCSG

SEQ ID NO: 82447 - protein, 516 aa, unidentified
  source 1..516: note = Unknown
  REGION 1..516: note = tr|T1WC10|T1WC10_9ZZZZ Tryptophan halogenase; OS = uncultured organism OX=155900 PE=4 SV=1
MTHAPIRPDPIRKVLVLGGGTAGWMTAAALSKVLNGQVEVVLIESEQISTVGVGEATIPPILTFNAMLGIDEREFMRATRATFKLGIEFRDWTRLGDRYIHPFGTFGLDIEAIKFHQVWRKVRDRVGSIEDFNLSAVAARQNRFALPDPDPAKVLSSLKYAFHFDAGLYARFLRGFAEARGATRIEGKVADVALDGEDGFIQSLTLEDGRTFEADLFIDCTGFRALLIGQTLGGRYLDWSHWLPNDRAVAVPCDTGGDGLTPYTRATADKAGWRWRIPLQHRTGNGYVYSSAHIGDDEALNSLTSGLDGPARADPNFLRFQAGRRERAWIKNCVAIGLSSGFLEPLESTSIHLIQAGITKLLALFPDKGFDPLEIDEYNRLTAQQVELVRDFIILHFKATERSDTPYWDYVRTMEIPDSLARKIDLFAGRGRLFQSDYDLFAEPSWIAVLLGQGVVPRQYDALVDTLPEAALVHRLKRMSALIGQTAQAMPDHQAFIARYCAADPAAAPIPALRPA

SEQ ID NO: 82448 - protein, 487 aa, unidentified
  source 1..487: note = Unknown
  REGION 1..487: note = tr|T1WAF4|T1WAF4_9ZZZZ Tryptophan halogenase; OS = uncultured organism OX=155900 PE=4 SV=1
MTAATLGLTTGTPSAARLADITLVESEEIGTVGVGEATVPHIRFFNQRLGIDEADFVRRTKATFKLGIEFCDWGRIGDSYIHPFGDFGHDIDGLPFHQHWLHATRGRPDETPALAACSLPIVAARAGRFTPPLDDPRSVGSTYSYAYQFDAGLYAAYLRDYAEARGVTRIEGRVEHVERGPSGIAALRLADGQRIEGDLFVDCSGFRALLIEGALKAGHQDWAHWLPCDAAWAVPTANTGPLVPYTRATARDAGWQWRIPLQHRTGNGLVFSTRFTDPERARAVLLDTLEGEVLAEPRMLRFRTGRRHRQWIDNCVAIGLSAGFLEPLESTSIHLIQLAIGKLIELFPNDAVLDPADAAEFNRAMALEYDRVRDFLVLHYCATERDDTPFWRHMRTMDLPPSLAVKIAAFRDRGIVEQYREGMFLPASWLAVYYGQRIMPERIHPLVAALPVADARARVAAVADACRRTAEGMPTHADYLARIGAAA

SEQ ID NO: 82449 - protein, 520 aa, unidentified
  source 1..520: note = Unknown
  REGION 1..520: note = tr|T1W4X1|T1W4X1_9ZZZZ Tryptophan halogenase; OS = uncultured organism OX=155900 PE=4 SV=1
MASEATIDSVVVVGGGTAGWLAACLIAARVGETAARPVTVTLVESPDVPTIGVGEGTWPTMRRTLERIGIDEATFLLACDAAFKQGSRFDGWRTGAPDDSYIHPFVPPAAGEPRAVVAGWQAHGGERAFADAVSAQPAVCALALAPRQRQMPDYAGALNYAYHLDAGKFAALLADHAVRRLGVRLVRDHVVEVVTASDGDIAAVRTRDHGAIAGDLFVDCTGHAALLIGQTLGVEVVDRSDVLPNDRALAVQVPVAADSPIAAQTIATAHAAGWIWDIGLPSRRGVGCVYASRYMDDADALATLTGYLGRTAAGIDPESLTVRRLAFRSGHRARFWVRNCLAVGLSAGFLEPLEASAIVLVELSLEALLADFPATRSAMDVRARRFDTLFRYRWDRIVDFLKLHYVLSERPEPYWRDHRAPDRMPPRLADLLAVWRDQPPSTFDLPQVDEVFPPASYQYVLYGMGWPAPPSPAMTDAGAIEALAQVRQRARTLAAALPTHRAYLDALRRDAGAARLKGSD

SEQ ID NO: 82450 - protein, 331 aa, unidentified
  source 1..331: note = Unknown
  REGION 1..331: note = tr|T1CH36|T1CH36_9ZZZZ Tryptophan halogenase (Fragment) OS=mine drainage metagenome OX=410659; GN = B1A_00066 PE=4 SV=1
LSTFLYAYHFDASLYAGFLRRYAEARGVRRVEGEVVAVQQNAESGFVEAVRLANGAVLDAELFIDCSGMRALLIEGALKCGYENWSHWLPCDRALAVPCESGELTPYTRSTAHASGWQWRIPLQHRSGNGHVYASNFISDAAAAEVLLGHLDGRPLGEPRLIRFTPGRRRAHWVKNVIAIGLSSGFLEPLESTAIHLIQAGISKLIAYFPDKDFDPLVIREYNRVAAAEIDRIRDFIILHYHLNKRTDGPMWQYCASMSIPETLREKIEHFRRYGRILPSELDIFGPTSWLAVHIGQMNWPRRNDPLLDYRDVRGAQYLEQLRRDDGGGGG

SEQ ID NO: 82451 - protein, 163 aa, unidentified
  source 1..163: note = Unknown
  REGION 1..163: note = tr|K7X7I0|K7X7I0_9ZZZZ Tryptophan halogenase (Fragment) OS=uncultured microorganism OX=358574 PE=4 SV=1
IPPMRVFHKLLRIDEQEFMRATAATFKLGIAFEDWGKIGDRYIHSFGQTGRETWLGGFHHFWLRGLEKGFDAEYGQYCLEWLAGRAGKFATSPKSDINFAYHLDATLYAKYLRKLSEQFGTRRIEGKISQVNRHPESGFIESLTLESGQTIEGDLFVDCSGNR

SEQ ID NO: 82452 - protein, 167 aa, unidentified
  source 1..167: note = Unknown
  REGION 1..167: note = tr|K7X7I8|K7X7I8_9ZZZZ Tryptophan halogenase (Fragment) OS=uncultured microorganism OX=358574 PE=4 SV=1
GVGEATVPTLVRYHQLLDVNEQEFLAAVQGTFKLGIAFENWRDVNEDYIHSFGDTGRDHWSAGFQHFWMKGREKGIASEFGDYCLELKAAQESKFAHLPRPGINYAFHIDATLYARFLRQFSEKFGATRVEGKIVRINTNSETGFIESLTLDSGRNVEGDLFIDCSG

SEQ ID NO: 82453 - protein, 461 aa, unidentified
  source 1..461: note = Unknown
  REGION 1..461: note = tr|T0ZDW0|T0ZDW0_9ZZZZ Tryptophan halogenase (Fragment) OS=mine drainage metagenome OX=410659; GN = B1A_14659 PE=4 SV=1
MRPIGVGEGSTPLLRGFFDLLGIEEAEWMPACHATYKCGISFEGWSTRPGFERYFHPFPSMVDIMTMTQFVHNVEARVRGADLCAHPDRFFLAARLVAERRAPKSRESFPFDVLHAYHFDATLLGQFLHKKALERGIRYKSCHVTHATVGTDGSIASVHTREGETITADLYVDCTGFSGLLLEKALGVPFISYADNLFNDAAVAIPSQIGESIPSQTASTALKHGWVWKIPLTNRFGNGYVYSTQFCTPDAAETELRQHLGLLDSDAEARHLKMRVGRVARPWHANCLAVGLAQGFVEPLEATSLMVVQYMAQTFTELLERGELTDDARESFNARVNRNFEGIRDYIVTHYKTNSRTDTDYWRANAANTTLSDNLRKIYSTWRAGKSIVPGIRTQEIGQGYPVMSWFAILSGMGIFPDAHRLRPPNAQEARYSMSEIDDLLSRCVGNYLDHREALAQPPPS

SEQ ID NO: 82454 - protein, 232 aa, unidentified
  source 1..232: note = Unknown
  REGION 1..232: note = tr|T1CUG3|T1CUG3_9ZZZZ Tryptophan halogenase (Fragment) OS=mine drainage metagenome OX=410659; GN = B1A_05399 PE=4 SV=1
MKAGGFSVTLIESADIRAIGVGEGTWPTMRASLERIGVAETALFRECDAAFKQGGKFVGWTTGGEGDSYYHPLMVPQGFSRVNLVPHWLRGGQSASFCDFVTPQGRLCDEGLAPKTITHGEYRAVANYSYHLDAGKFGSFLARHCIENLGVRHVLADVVSVNQDESGDITSLNTRQAGGLAGDLFIDCSGFSALLIGKTLGVGFKECGDILFCDAALAVQVPYGAPEEPMAS

SEQ ID NO: 82455 - protein, 390 aa, unidentified
  source 1..390: note = Unknown
  REGION 1..390: note = tr|T0ZX93|T0ZX93_9ZZZZ Tryptophan halogenase OS=mine drainage metagenome OX=410659 GN=B1B_10543 PE=4 SV=1
MNLPVFKHLGVLEQVRALGVCKRGADFETDNERGYNVYAFARALGNSPPYAFQVLRQDFDAMLFTHARSEGVNTHEGAEVLNVEQRGDRDSRVEVRLDDGRTCCVRTRYVLDASGRDSFLATRMKLKRKNTEHQSAAIFGHFRGAERRSGLDAGNISIYNFDYGWMWMIPLLGEVMSVGAVCGPDYLKQRNGRSHEFLFETLRQNPALWSRLEHAVLIDNEVRVTGNYSYDSSTIGGPGWILVGDAFAFLDPVFSSGVYLAMSGAEQAAVVVDAALREPAREMKMQQHLEKRLRRGMRRFAFFIYRFNSPAMQHIFRYPHNVWKVEQGIISMLAGDLFDSRPVWWRLQFFRLIYAWTVLRLPLRWNQERRYRKAQARTTFSGGTTPLDSC

SEQ ID NO: 82456 - protein, 123 aa, unidentified
  source 1..123: note = Unknown
  REGION 1..123: note = tr|T0ZLF8|T0ZLF8_9ZZZZ Tryptophan halogenase (Fragment) OS=mine drainage metagenome OX=410659; GN = B1B_11772 PE=4 SV=1
MVDIMTMTQFVHNVEARVRGVNLYAHPDRFFLAARLVAERRAPKSREAFPFDVLHAYHFDATLLGRFLHEKALQRGIHYKSCHVTHATVGADGSIASVSTREGETITADLYVDCTGFSGLLLE

SEQ ID NO: 82457 - protein, 300 aa, unidentified
  source 1..300: note = Unknown
  REGION 1..300: note = tr|T0XUP4|T0XUP4_9ZZZZ Tryptophan halogenase (Fragment) OS=mine drainage metagenome OX=410659; GN = B2A_15612 PE=4 SV=1
MKLADGTRVTGELFIDCSGFRALLIEGALHAGYDDWRQWLPCDRALAVASARVPPMRPYTQASARPAGWQWRIPLQHRTGNGHVYCSAFISDDEAAATLLANLEGEALGAPRPFRFTAGMRKQVWVRNCVALGLAAGFMEPLESTTIHLVQSGVDRLLKLFPDARFEPAVRDEFNRQTRFEYERIRDFLILHYTTSERCDTPFWRHCAAIARPESLQHKIDVFEASGQIFRAADELFTEVGWLQVMTGQGIAPQRYHVLADALQPAQFQEFMGSLRALIQRAVAGMPEHADFVARHCKAA

SEQ ID NO: 82458 - protein, 168 aa, unidentified
  source 1..168: note = Unknown
  REGION 1..168: note = tr|K7WFU9|K7WFU9_9ZZZZ Tryptophan halogenase (Fragment) OS=uncultured microorganism OX=358574 PE=4 SV=1
RRGRGDRPPMRNLHRIMDIDEQAFMRATQATFKLGIVFDNWGEIGDSYIHSFGEIGQRSWMAEFHEFWLEARDQGFGGSLDEYCLELMAAKAGKFAKNVQDTRLNFAFHLDATRYAGFLRQLSEAAGVKRVEGKISEVRKHSETGELKALLLERGELIEGDLFIDCSG

SEQ ID NO: 82459 - protein, 170 aa, unidentified
  source 1..170: note = Unknown
  REGION 1..170: note = tr|K7WTA4|K7WTA4_9ZZZZ Tryptophan halogenase (Fragment) OS=uncultured microorganism OX=358574 PE=4 SV=1
GVGEATVPPIVDFMRRLGLEESEWMPACGATYKSAIAFRDFHGGDEPKTWFPFESIEIFKGRPLNRYWLHKHFTDAAFADRFSFYDYCHFVPALCDAGRTVAAFPEAKYAYHFDAGRFGDFLKRFAVDEGVTHVVDTIESVERAPDGSIESLKRRSGEPLAADLFVDCSG

SEQ ID NO: 82460 - protein, 101 aa, unidentified
  source 1..101: note = Unknown
  REGION 1..101: note = tr|T0Z9C0|T0Z9C0_9ZZZZ Tryptophan halogenase (Fragment) OS=mine drainage metagenome OX=410659; GN = B1A_15064 PE=4 SV=1
PFWRHCAALPAPPGLARKLAIFQATGQIFREGEELFTEQSWLQVLLGQGILPKRYHPAADDLPQGQLQEFLDTIRNVIATAVERMPAHERFVAEHCAVERQ

SEQ ID NO: 82461 - protein, 214 aa, unidentified
  source 1..214: note = Unknown
  REGION 1..214: note = tr|T1CGJ9|T1CGJ9_9ZZZZ Tryptophan halogenase (Fragment) OS=mine drainage metagenome OX=410659; GN = B2A_01597 PE=4 SV=1
ESPTVATIGVGEGSTPLLRGFFDLLGIEEAEWMPACHATYKCGISFEGWSTRPGFERYFHPFPSMVDIMTMTQFVHNVEARVRGADLCAHPDRFFLAARLVAERRAPKSRESFPFDVLHAYHFDATLLGQFLHKKALERGIRYKSCHVTHATVGTDGSIASVHTREGETITADLYVDCTGFSALLLEKALGVPFVSYADNLFNDAAVAIPSPIG

SEQ ID NO: 82462 - protein, 349 aa, unidentified
  source 1..349: note = Unknown
  REGION 1..349: note = tr|T1CF30|T1CF30_9ZZZZ Tryptophan halogenase OS=mine drainage metagenome OX=410659 GN=B2A_01599 PE=4 SV=1
MSQSVKNIVIVGGGTAGWMAAAACAKVLGPSYAVHLVESEEIGTIAVGEATVPHLKQFNNLLEIDEVEFVKNVKGTFKLGIQFNDWGRLGDSYIHGFGQLGPDVGPLPFHQFWIKARHKGWAAPLGDYSINTAAAPRGKFMPSASDAPANSPLSDIRYAYHFDASLYARYLRGYAEARGVRRTEGKVRHVQLRAEDGYVESVTLENGTVIGGDLFIDCSGFRGLLIEQALHIGYIDYSQWLRCDRAVAVGCEKVGPPTPYTRVTARTAGWQWRIPLQHRTGNGHVYSSALISDDEAAATLLANLDGKPLGEPRLLRFTPGMRKKFWSKNVVALGLASGFWSRWSRPASS

SEQ ID NO: 82463 - protein, 182 aa, unidentified
  source 1..182: note = Unknown
  REGION 1..182: note = tr|T1B4H1|T1B4H1_9ZZZZ Tryptophan halogenase (Fragment) OS=mine drainage metagenome OX=410659; GN = B1A_09110 PE=4 SV=1
MTETTPGHSDDRRLRHIVIVGGGTAGWMVAAALAQTTQGRCPITLVESEEIGSIGVGEATIPPIKRFNQMLGLDEYEFLAYTQGSYKLGIEFVDWTHKGQRYFHPFGQFGAEFDAVPLHHYWLRERARGDATPLQDYAMAWVAARNGRFERPLADRQRVQSTYDYAYHFDAARYALYLRRFA

SEQ ID NO: 82464 - protein, 201 aa, unidentified
  source 1..201: note = Unknown
  REGION 1..201: note = tr|T1CZN4|T1CZN4_9ZZZZ Tryptophan halogenase (Fragment) OS=mine drainage metagenome OX=410659; GN = B1A_04306 PE=4 SV=1
STTSKARRWPNPVPAFSAGRRKQFWNRNCIAIGLAAGFMEPLESTSIHLIQSAITRLLALFPDRDFDPITAQEFNRITHVEYERIRDFLILHYHATRRDDAPLWRYTRSMPIPETLQYKIDHFRRHGRIVAESLELFQNPNWLAVLTGQEIWPERYDPLVDLRSDVDAPRLLASLRRVIGEAVQAMPTHRQYIERHCRARS

SEQ ID NO: 82465 - protein, 119 aa, unidentified
  source 1..119: note = Unknown
  REGION 1..119: note = tr|T0YAP7|T0YAP7_9ZZZZ Tryptophan halogenase (Fragment) OS=mine drainage metagenome OX=410659; GN = B1A_20952 PE=4 SV=1
AAAEALGTCLTTPEHGRGALRRFERQVRHGPERFAWFIYRMTRPAMQSLFMEPHNPLRMREALLSLLSGDIFEDTPLWRSLRAFQAIYYLTSLTMPRRSFAALRRRALNIRCEPASGAP

SEQ ID NO: 82466 - protein, 325 aa, unidentified
  source 1..325: note = Unknown
  REGION 1..325: note = tr|T1BTQ3|T1BTQ3_9ZZZZ Tryptophan halogenase (Fragment) OS=mine drainage metagenome OX=410659; GN = B2A_05188 PE=4 SV=1
LYAKYLRAYAEQRGVLRSEGKVVDVSLRADDGFIRSVTLAGGAVLEGDLFIDCSGFRGLLIEGALQTGYEDWQHWLPCDRAVAVPCTHGCDPTPYTRATAHAAGWQWRIPLQHRMGNGHVYCSRFIGDDAAAQVLLDHLEGTPLAEPRFLRFTAGRRRQFWNRNCIAIGLAAGFMEPLESTSIHLIQSAITRLLALFPDRDFDPITAQEFNRITHAEYERIRDFLILHYHATRRDDAPLWRYTRSMPIPETLQYKIDHFRRHGRLVAESLELFQNPNWLAVLTGQEVWPERYDPLVDLRSDVDAPRQLGSLRRVIAEAVQAMPTH

SEQ ID NO: 82467 - protein, 33 aa, unidentified
  source 1..33: note = Unknown
  REGION 1..33: note = tr|T0ZVH1|T0ZVH1_9ZZZZ Tryptophan halogenase (Fragment) OS=mine drainage metagenome OX=410659; GN = B1A_12774 PE=4 SV=1
MRIEGDLFIDCSGFRALLIEGALKSGFEDWREW

SEQ ID NO: 82468 - protein, 170 aa, unidentified
  source 1..170: note = Unknown
  REGION 1..170: note = tr|K7WDL8|K7WDL8_9ZZZZ Tryptophan halogenase (Fragment) OS=uncultured microorganism OX=358574 PE=4 SV=1
RFRCRRGDRPPMRNFHRIMDIDEQAFMRATQATFKLGIVFDNWGEIGDSYIHSFGEIGQRSWMAEFHEFWLEARDQGFGGSLDEYCLELMVAKAGKFAKNVQDTRLNFAFHLDATRYAKFLRQLSEAAGVKRVEGKISEVSKHSETGELKALLLESGELIEGDLFVDCSG

SEQ ID NO: 82469 - protein, 129 aa, unidentified
  source 1..129: note = Unknown
  REGION 1..129: note = tr|K7X7J2|K7X7J2_9ZZZZ Tryptophan halogenase (Fragment) OS=uncultured microorganism OX=358574 PE=4 SV=1
FGVGEATIPIMVKFLHAYLERDVHELYRKVQPTWKFGVKFEWGQPGDYYFNYAFHPGPVLDSVYYGGDFNEYSLGSMLISNERAPILTGEGGQLTSLIDRIPFAYHLDNGRFVAYLREEAVRDGVERLE

SEQ ID NO: 82470 - protein, 199 aa, unidentified
  source 1..199: note = Unknown
  REGION 1..199: note = tr|T1BAW8|T1BAW8_9ZZZZ Tryptophan halogenase (Fragment) OS=mine drainage metagenome OX=410659; GN = B2A_01542 PE=4 SV=1
NLVPHWLRGGHSASFCDFVTPQGRLCDEGLAPKTITHGEYRGAANYAYHLDAGKFGPFLAKHCIENLGVRHVLADLESVNQGESGDITSVSTRQAGELAGDLFIDCSGFSALLIGKALGVGFKECGDVLLCDTALAVQVPYATPDAPMPSQTIATAQDAGWIWDICLPTRRGVGYVYSSRHTSEEGRAGDSAALHRLAA

SEQ ID NO: 82471 - protein, 175 aa, unidentified
  source 1..175: note = Unknown
  REGION 1..175: note = tr|K7WT93|K7WT93_9ZZZZ Tryptophan halogenase (Fragment) OS=uncultured microorganism OX=358574 PE=4 SV=1
GVGEATVPAIREFNHRLGVDEPEFMRQTNASIKSGIQFENWGEPGDSYIHTFGYYGQPINDVPFQHFWLKMRELGDDTSFNDYCMPHVASELGRFAFPTNDPASVLSRYFYAFHFDATLYAQYLRGWAEERGVDRTEGKVVDFTLDGESGFIESITLESGEIIEGDLFIDCSGNR

SEQ ID NO: 82472 - protein, 149 aa, unidentified
  source 1..149: note = Unknown
  REGION 1..149: note = tr|D9PGL7|D9PGL7_9ZZZZ Tryptophan halogenase (Fragment) OS=sediment metagenome OX=749907 GN=LDC_0664; PE = 4 SV=1
AFLTDVDLWNRGQEGGAAFGERLAATIHIASLVDEVGQGIVSRSYPADTSRRALLAGRRWAAVGDSAITWDPLSSQGIVSGVLMGARVASAIVESLGSGSSDALLTWEDDYRLLLDEHTGLRAHYATAEQRWPESPFWRRRSVSDARLA

SEQ ID NO: 82473 - protein, 45 aa, unidentified
  source 1..45: note = Unknown
  REGION 1..45: note = tr|T1BML3|T1BML3_9ZZZZ Tryptophan halogenase (Fragment) OS=mine drainage metagenome OX=410659; GN = B1B_05332 PE=4 SV=1
MSVPAGLAHKMRLFADSGRSFRESEELFAEPSWVEVMIGQNILPR

SEQ ID NO: 82474 - protein, 96 aa, unidentified
  source 1..96: note = Unknown
  REGION 1..96: note = tr|T0Z3M6|T0Z3M6_9ZZZZ Tryptophan halogenase (Fragment) OS=mine drainage metagenome OX=410659; GN = B2A_11301 PE=4 SV=1
ERLATARLATEVEATGSYSYRCTRAHGERHLVIGDAYSFVDPVFSSGVLFATVGGIAAAEALDVCLREPPGGARRCGASSTRCASGRAASPGSSTA

SEQ ID NO: 82475 - protein, 57 aa, unidentified
  source 1..57: note = Unknown
  REGION 1..57: note = tr|T1BY73|T1BY73_9ZZZZ Tryptophan halogenase (Fragment) OS=mine drainage metagenome OX=410659; GN = B1A_10669 PE=4 SV=1
MPTSQSVKNIVIVGGGTAGWMAAAACAKVLGPSYAVHLVESEEIGTIAVGEATVPHL

SEQ ID NO: 82476 - protein, 164 aa, unidentified
  source 1..164: note = Unknown
  REGION 1..164: note = tr|K7WFU3|K7WFU3_9ZZZZ Tryptophan halogenase (Fragment) OS=uncultured microorganism OX=358574 PE=4 SV=1
VPPMRNFHRIMDIDEQAFMRATQATFKLGIVFDNWGEIGDSYIHSFGEIGQRSWMAEFHEFWLEARDQGFGGSLDEYCLELMAAKAGKFAKNVQDTRLNFAFHLDATRYAGFLRQLSEAAGVKRVEGKISEVRKHSETGELKALLLERGELIEGDLFVDCSGNR

SEQ ID NO: 82477 - protein, 309 aa, unidentified
  source 1..309: note = Unknown
  REGION 1..309: note = tr|A0A1B6NYV2|A0A1B6NYV2_9ZZZZ Tryptophan halogenase (Fragment) OS=marine sediment metagenome OX=412755; GN = MGSAQ_000345 PE=4 SV=1
MTTPHRIVIAGGGTAGWMAANLLAHRWANQAVTITLIESEDIGTIGVGEGSTPTLKRFFQTLDIPEYDWMEECQATYKVNIKFTGWNGNNSHSYSHPFISQLDVFSERAFHVNALTRRLGLDVETRPDKFLMAGYLAKKNLAPLPSHNFPFDIEYGYHFDSLKLGRFLRERAKSKGVYHVVGNIESVHTSPSGDISHLVCQDGQKLDGDLFIDCTGFSGLLLQKTLGVPFRDFSDNLFNDSAVVLPTPACANLPVETESVAMSNGWRWQIPLRNRTGNGYVYSQQYQEKDAAECELRRALGMENTTLKQ

SEQ ID NO: 82478 - protein, 434 aa, unidentified
  source 1..434: note = Unknown
  REGION 1..434: note = tr|T0ZJE3|T0ZJE3_9ZZZZ Tryptophan halogenase OS=mine drainage metagenome OX=410659 GN=B1A_15065 PE=4 SV=1
MAATGGSFKLGIEFVGWTRPDHRYFHPFGRFAPDFDSVSLHQYWLRERLRGDRAPLEDYAIAWAAARIGRFDRPLPDQQLVLSRLDYAYHFDAALYARHLQAYARQRGVKRTEGKIVDVALRGEDGFIAAVVLESGGRVEGDLFVDCSGFRGLLIEGALNSRLDDWRHWLPCDRALAVGCAVGAEFPPYTRSTARPAGWQWRIPLQHRIGNGHVYCSEYMRDDEAASILLAGLDGEALGEPRLIKFTAGARRESWSRNCVAIGLAAGFLEPLESTAIHLVQSAITRLLALFPDRDFNPLLQREFNRLTYTEYERVRDFLILHYHAQQREEPLWRYTRTMAIPQALQYKIDHFRYCGRIVAEPFELFQNSSWLAILVGQEVWPERYDPLVDLHTGVDAPRYLTGIRDVLERTARALPTHREYIERNCGAAASRAK

SEQ ID NO: 82479 - protein, 124 aa, unidentified
  source 1..124: note = Unknown
  REGION 1..124: note = tr|T1BI08|T1BI08_9ZZZZ Tryptophan halogenase (Fragment) OS=mine drainage metagenome OX=410659; GN = B1A_07416 PE=4 SV=1
QGFLEPLEASAIVLVELSAKLVAERMPACREVMDIVARHFNEVTAYRWGRIIDFLKLHYVLTQRTDTAFWRDNVDPATVPDRLKDMLALWKYQSPWFFDELDRLEEVFPAASYQYVLYGMGFRT

SEQ ID NO: 82480 - protein, 224 aa, unidentified
  source 1..224: note = Unknown
  REGION 1..224: note = tr|T1BJ82|T1BJ82_9ZZZZ Tryptophan halogenase OS=mine drainage metagenome OX=410659 GN=B1B_05331 PE=4 SV=1
MTLENGTVIGGDLFIDCSGFRGLLIEQALHIGYIDYSQWLRCDRAVAVGCEKVGPPTPYTRVTARTAGWQWRIPLQHRTGNGHVYSSALISDDEATATLLANLDGKPLGEPRLLRFTPGMRKKFWSKNVVALGLASGFLEPLESTSIFLIQSGIARLVSLLPWNDFSEVVIDEYNAQLTFEMERIRDFLILHYHATQRDDAPLWRECAYVGARGSGAQDAPVRR

SEQ ID NO: 82481 - protein, 366 aa, unidentified
  source 1..366: note = Unknown
  REGION 1..366: note = tr|T1C7I8|T1C7I8_9ZZZZ Tryptophan halogenase (Fragment) OS=mine drainage metagenome OX=410659; GN = B2A_03279 PE=4 SV=1
SGFEDWREWLPCDRAVATTAASAAAVRPFTQATARPAGWQWRIPQQHRSGDGHVYCSEFMSDDEATAILLAGLEGPALSEPRIIRISTGVRRRLWVRNCVAIGLAAGFIEPLESTAIHLAQSGINRLLALFPDAGFDPAIAEEYNRKMREEYEQVRDFVVLHYRATERRDTPFWRHCAALPAPPGLARKLAIFQATGQIFREGEELFTEQSWLQVLLGQGILPKRYHPAADDLPQGQLQEFLDTIRNVIATAVERMPRPRALHRRALRHRAALERAFTWSARRSRRSASRCTRGGSAVRVRSFPVRADPRQVARRVDPGMQVDQRIIAFRPDFLADEYRQPGGVLEQLERLGHDPSAVAEMIDLVL

SEQ ID NO: 82482 - protein, 161 aa, unidentified
  source 1..161: note = Unknown
  REGION 1..161: note = tr|T1B201|T1B201_9ZZZZ Tryptophan halogenase (Fragment) OS=mine drainage metagenome OX=410659; GN = B1A_07918 PE=4 SV=1
MERVGSSPLTGVRYAYHFDAGLYAQHLRGVAESLGVVRHEGKVAHVEQRPEDGFIDALVLESGARIAAELFIDCSGFRALLIEGALRAGYDDWRRWLPCDRALAVASARVTPLRPYTQANARTAGWQWRIPLQARSGNGHVYCSEFISDDEAASVLLANLE

SEQ ID NO: 82483 - protein, 97 aa, unidentified
  source 1..97: note = Unknown
  REGION 1..97: note = tr|T1CQK1|T1CQK1_9ZZZZ Tryptophan halogenase OS=mine drainage metagenome OX=410659 GN=B1A_06122 PE=4 SV=1
MSVPAGLAHKMRLFADSGRSFRESEELFAEPSWVEVMIGQNILPRAYHPLVEQMPDDQLKQFMQGVAQVIESCVGMMPPHQTFIDRRCAAPALHPGS

SEQ ID NO: 82484 - protein, 209 aa, unidentified
  source 1..209: note = Unknown
  REGION 1..209: note = tr|T0Z9Q3|T0Z9Q3_9ZZZZ Tryptophan halogenase OS=mine drainage metagenome OX=410659 GN=B2A_15611 PE=4 SV=1
MACRAWSKGMSAQPIERTVIVGGGTAGWMTAALLAKALGGTARIELVESEEIGTIGVGEATIPQIRHINAFLGLDENEVMRAARATFKLGIQFNDWLRPGHSYIHAFSDIGLPQGGVPFQHYWLRERTQGGTHALWDYSLNAQAAAAGRFARMEHVGSSPLTGVRWAYHFDAGLYAAHLRRVAEHLGVTRREGRIVDVDLRGETASSRR

SEQ ID NO: 82485 - protein, 96 aa, unidentified
  source 1..96: note = Unknown
  REGION 1..96: note = tr|T1AXX6|T1AXX6_9ZZZZ Tryptophan halogenase (Fragment) OS=mine drainage metagenome OX=410659; GN = B2A_01600 PE=4 SV=1
MVIDEYNAQLTFEMERIRDFLILHYHATQRDDAPLWRECARMSVPAGLAHKMRLFADSGRSFRESEELFAEPSWVEVMIGQNILPRAYHPLVEQMP

SEQ ID NO: 82486 - protein, 175 aa, unidentified
  source 1..175: note = Unknown
  REGION 1..175: note = tr|K7WFV7|K7WFV7_9ZZZZ Tryptophan halogenase (Fragment) OS=uncultured microorganism OX=358574 PE=4 SV=1
GVGEATVPHIGNFNRLLGIDEDDFLRHTQGTFKLGIEFVDWGRLGDRYLHPFGVYGAPMDAIPFHHYWLKLNGLERTKPMAAYSLACVAAAQNRFMRPVNLPKSPLGQIVYAFHLDAGRYAKYLRQYAEARGVRRIEGKVVDVGLRPDDGYVDAVTLENGSTLSADLFVDCSGNR

SEQ ID NO: 82487 - protein, 146 aa, unidentified
  source 1..146: note = Unknown
  REGION 1..146: note = tr|T1ASW8|T1ASW8_9ZZZZ Tryptophan halogenase (Fragment) OS=mine drainage metagenome OX=410659; GN = B1A_15435 PE=4 SV=1
GWMTATALRRLLYPELTIEVVESDEIGIIGVGEATIPPFRRHNELLGINEREFVCATQATFKLGIEFRDWTRPGDSYIHGFGPLGLDLDGQPFHQYWTRAMQLGVAKDLGVYSFNVQAAREGRFIAHPGRRTEEHAARGHCLRVSL

SEQ ID NO: 82488 - protein, 69 aa, unidentified
  source 1..69: note = Unknown
  REGION 1..69: note = tr|T1A4B0|T1A4B0_9ZZZZ Tryptophan halogenase (Fragment) OS=mine drainage metagenome OX=410659; GN = B1B_10906 PE=4 SV=1
MRTIGVGEGTWPTLRGSLERIGVAETALFRECDAAFKQGGRFVGWTTGAEGDAYYHPLMLPQGFSRVNL

SEQ ID NO: 82489 - protein, 92 aa, unidentified
  source 1..92: note = Unknown
  REGION 1..92: note = tr|T1A9D5|T1A9D5_9ZZZZ Tryptophan halogenase OS=mine drainage metagenome OX=410659 GN=B1A_12387 PE=4 SV=1
  VARIANT 25: note = Xaa can be any naturally occurring amino acid
MSIPDGLAHKVRLFADSGRFFRECXEMFGDLSWVQVLIGQNILPRTYHPLVEQMPDDQLRQFVQGVAQVIESCTGMMPPHQTFIDRRCAAPA

SEQ ID NO: 82490 - protein, 170 aa, unidentified
  source 1..170: note = Unknown
  REGION 1..170: note = tr|K7W8W1|K7W8W1_9ZZZZ Tryptophan halogenase (Fragment) OS=uncultured microorganism OX=358574 PE=4 SV=1
RFRRRRGDRPPMRNFHRIMDIDEQAFMRATQATFKLGIVFDNWGEIGDSYIHSFGEIGQRSWMAEFHEFWLEARDQGFGGSLDEYCLELMAAKAGKFAKNVQDTRLNFAFHLDATRYAKFLRQLSEAAGVKRVEGKISEVRKHPETGELKALLLESGELIEGDLFVDCSG

SEQ ID NO: 82491 - protein, 83 aa, unidentified
  source 1..83: note = Unknown
  REGION 1..83: note = tr|T0ZWT2|T0ZWT2_9ZZZZ Tryptophan halogenase (Fragment) OS=mine drainage metagenome OX=410659; GN = B1B_17631 PE=4 SV=1
MPLHHYWLRERARGDTTPLQDYAMAWVAARNGKFERPLADRQRVQSTYDYAYHFDAALYAKYLRAYAEQRGVLRSEGKVVDVS

SEQ ID NO: 82492 - protein, 514 aa, unidentified
  source 1..514: note = Unknown
  REGION 1..514: note = tr|A0A160TKM8|A0A160TKM8_9ZZZZ Tryptophan halogenase, putative OS=hydrothermal vent metagenome; OX = 652676 GN=MGWOODY_Smn3856 PE=4 SV=1
MVSPVRNIVIVGGGTAGWLTAGVIAARHQGRMAGGFTVTLVESPNVKIIGVGEGTWPTLRTTLQKMGVSETDFFRECDAAFKQGAKFAKWTTGAEDDAYYHPLMLPHGFSELNMVPHWLHDEQGRSFCDAVSPQGAICDAGLAPKMITTPEYDAVANYAYHLDAGKFAPFLQKHCTTKLGVRHVLADVTRVNQAEDGDIVSVSTEQAGDIAGDLFVDCTGFASLLLGKALGVPFRDCKDVLFCDAALAVQVPFDTPEDALASHTISTAQSAGWIWDIGLPTRRGIGYVYSTSHTDDESAERELRAYIGPAADKLSIRKIPIRGGHRETFWKRNCVAVGLAAGFLEPLEASAIVLIELSAKLIAEQMPANRDVMDIVARRFNETTSYRWGRIIDFLKLHYVLTKRRDSAFWIDNVDPATIPERLQNLLHLWKYQPPWFFEEFDRLDEVFPAASYQYVLYGMGYRTEIDALDTATTERLAARLREENARITGRMTSQLPRNRDLLDKIRQFGFQAI

SEQ ID NO: 82493 - protein, 495 aa, unidentified
  source 1..495: note = Halobacteriovorax sp.
  REGION 1..495: note = tr|A0A2D5YN23|A0A2D5YN23_9PROT Tryptophan halogenase; OS = Halobacteriovorax sp. OX=2020862 GN=CME69_05530 PE=4; SV = 1
MNKTVKNVVIVGGGTAGWISAAVIKRLIGAGVDVTLVESEEIGTVGVGEATIPPIITLNNVLGIEEKEFLRETNATMKLAIKFENWRVQGESYFHTFGAPGKSYAFCHFHHYLKRAQELGLADSIWDYDLNYLACKAGKFAHIKSPDPIIEMPYAYHFDASLYARFLRKKCESMGVTRREGIITDVQQDADSGFITGVTLKDGTHIEGDLFIDCSGFKGLLTQQTLNTGYEDWSHWLPCDRAVAMPSERHEHTRPYTRSIAHSAGWQWRIPLQHRNGNGLVYSSNYYSDEQALDILSSNLDTKPLAEPNFIRFKTGRRRKQWNKNVVAVGLSSGFLEPLESTSIHLIQSAVVRLIHLFPHDGFKQHQIDEYNKQSQLEFEQIRDFIILHYHVNERTDSHFWKDLREMDVPDNLTHKIELFRASGNLFREQNDLFLESSWLQVLIGQGVIQKDYHPLANALSEQKLQELLQNIKRIKNEPIGKIATHDDFLKQFCS

SEQ ID NO: 82494 - protein, 502 aa, unidentified
  source 1..502: note = Alphaproteobacteria bacterium
  REGION 1..502: note = tr|A0A257HNP6|A0A257HNP6_9PROT Tryptophan halogenase; OS = Alphaproteobacteria bacterium PA1 OX=2015569; GN = CFE27_08610 PE=4 SV=1
MEPQAVEKIVIVGGGTAGWMTASALSKVLGPRVNIRLIESEEIGTVGVGEATIPQINIFNSILGIDENDFVAKTNGTFKLGIEFVNWHRQGERYMHAFGGIGRNLGFVPFHQYWMRQNLAGKETSLWDYSAATKAAYANKFDRLERLGASPLPGPTWAFQFDAGLYARYLRGFSEYHGVKRTEGKVRSVELDSLSGFIQSVTLESGEVVSGDLFIDCSGFRGLLIEGALQTGYEDWSNFLPCDRALAVPCESVKPLTSYTRATARHAGWQWRIPLQHRIGNGHVYCSAFTSDEEAERVLMSNLDGKPLADPRPLKFFTGRRKKLWNKNCIAVGLASGFMEPLESTSIHLIQSAVSRLINLFPTKACDTVLSDEYNQQAIEEYALIRDFLILHYHANARTDSPFWLHCQNMAIPDSLSHKIELFRKTGRIERRANDLFAEPSWLQVLLGQGIRPESYHALARDLSDEDLDGFLVNVSTIITKAVEHMPSHEDFIARNCRAPAA

SEQ ID NO: 82495 - protein, 523 aa, Porphyrobacter sp.
  REGION 1..523: note = tr|A0A0N1B1H5|A0A0N1B1H5_9SPHN Tryptophan halogenase; OS = Porphyrobacter sp. AAP60 OX=1523423 GN=IP79_09845 PE=4; SV = 1
MTEANGIGNASRLERVVIVGGGTAGWMAAAALSRYFNDGRRTITLIESDAIGTVGVGEATIPAIRSFNAMLDIPEAEFLRETRGTCKLGIEFVNWGQQGDRYFHPFGSFGQDLHGIPFHQLFLRERARSGGAGEICDYSMSAAAARAGHFARPAAGAQSAVNQIAYAYHFDAGLYAAYLRRLAERQGVVRIEGRITIVSRDSESGDVSNVTLDNGTQVEGDLFIDCSGFRGLLIEEALETGYEDWSHWLPMDRAIAVPTVSPGPPSPFTRSTAHDAGWQWRIPLQHRTGNGHVFSSAFMNEDKAREILLANLEGAPLAEPRALRFLTGMRRKAWNHNVVAIGLSSGFIEPLESTSIHLIQNGIARLFALFPDNPISPVERDEYNRGMRGIFEDVRDFIILHYKATQREDSEFWRYVRHMSVPETLSRKMAMWQRHGRVLRDEAELFSTPSWIAVMLGQNIWPDSYDPIADTLDEAKVAAAMAQMRAGYSDVAAQLPPHESFLRQSGSWNLQPAAGLAPQALSA

SEQ ID NO: 82496 - protein, 508 aa, Sphingomonas yabuuchiae
  REGION 1..508: note = tr|A0A147ISG3|A0A147ISG3_9SPHN Tryptophan halogenase; OS = Sphingomonas yabuuchiae OX=172044 GN=NS355_09125 PE=4; SV = 1
MAGDPMADRPVRVVVVGGGTAGWMTAAGLVGLLSKACTVHLVESEEIGIVGVGEATLPHLRLYLERLGIDEAEFMAATDATFKLGIEFRDFGRIGDRYIHPFGTYGRPLGGVGFHHYWLRRRAEGADVPPIGAYSAGVVAAETCRFERPGTDPDDPTTSFGYAYQFDATRFAPFLRAWAEKRGARRTEGRVVSIERNGGDGTVGAVTLSDGARIEGDLFIDCSGFRSLLLGQELAEAWEDWSHWLPCDRAVAVPSVRPDAPTEPFTRASATKAGWRWRIPLRHRVGNGHVYASAFCGDDQATEALLAGLDGAPLADPRFLRFRAGRRRRSFVGNVVAIGLASGFLEPLESTSIYLVQAAITALVEHFPDARVEAVDRDGFNAAIDAEYDRIRDFLILHYHATTRADSPFWNHVRTMTVPDSLAEKMALWRATAQVAHYRHGLFLEPSWIAVYLGQGIVPHGWDPRADRPDAAGLDRALTGLSRAIADRVGQMPPHDRALGLSGAGAAA

SEQ ID NO: 82497 - protein, 501 aa, Sphingomonas yabuuchiae
  REGION 1..501: note = tr|A0A147ISV9|A0A147ISV9_9SPHN Tryptophan halogenase; OS = Sphingomonas yabuuchiae OX=172044 GN=NS355_09140 PE=4; SV = 1
MTHPPIDHVVIVGGGTAGWMMAAAAGRYLDNGTRRITLIESDAIGTVGVGEATIPSILNFNALLGIDEAEFLRATQGSFKLGIEFVGWHRPDSRYVHPFGHYGRDIQGLNFHQLWLKMREQAGVGPIGDYSASTVAMERAAFGMPQSDPRSPLSGLAYAYHFDAGLYAAFLRRQAETDGVTRVEGRIVAVDRAPNGDVAAVRLDDGQRIAGDLFVDCSGFRSLLLGETLGVGFEDWSHWLPCDRAIAVPTERTEPLLPYTRATAHQAGWQWRIPLQHRTGNGVVYASRFMDDDDAERLLLSRLDAEPTAAPRRLSFTAGCRTRLWERNVVALGLAGGFLEPLESTSIHLIQQGISKLFALFPDKRMVSVERDEYNRQMGDNYRSIRDFIILHYHATARDDSPFWDHVRTMPLPDTLARKIALFREKGRIFRYEDELFATPSWVAVLLGQGVMPEGYDPVIDALDEERVLTALRQMRQATATAVATLPPHSVALAQLIGRSP

SEQ ID NO: 82498 - protein, 530 aa, Streptoalloteichus hindustanus
  REGION 1..530: note = tr|A0A1M4Y7N5|A0A1M4Y7N5_STRHI Tryptophan halogenase; OS = Streptoalloteichus hindustanus OX=2017; GN = SAMN05444320_102269 PE=4 SV=1
MDHRIRKVVVLGGGTAGWMTAAYLGKALHGTVSVTVLEAPTIPKIGVGEATVPNLQKLLFDFLGLPEEEWMPECNASFKMAVKFVNWRTPGEGEPTARWVDGRPDHFYHSFGTLPSHDGIPLSHYWVHDRLRGRTDDPFDYACLRETPAMDAKRAPRWFDGNRAMPYAWHFDAHLVADFLRRFATARQGVEHVQDELVDVEFDERGFITALRTRQGRRLDGDLFVDCSGFRGLLINQAMGEPFVDMSDHLLCDSAVAAAVPQDSAREGVEPYTSAIAMKSGWTWRIPMLGRFGTGYVYSSRFAEPDEAVRDFCALWGLDPETARLNRIRFRVGRNRRAWVRNCVGIGLSSCFLEPLESTGIYFITAAIHRLVTHFPDRRFDQALIDRFNHEIETMFDDTRDFIQAHFYFSPRVDTPFWKANKELRLAEGIQEKVAMYRAGMVVNPPASDDESTVYGSVDLDFRKVWTNGNYYCVLAGLGVLPDRPLPLLLHRPRSLDSVESRFSTVRDRQRELVATLPSNYDYLRRLHAK

SEQ ID NO: 82499 - protein, 508 aa, Sphingomonas yabuuchiae
  REGION 1..508: note = tr|A0A147IUD5|A0A147IUD5_9SPHN Tryptophan halogenase; OS = Sphingomonas yabuuchiae OX=172044 GN=NS355_07350 PE=4; SV = 1
MDAAPSADHIAQRIVIVGGGTAGWMAAAALARFAPASTRITLIESDAIGTVGVGEATIPGIRLFNQMLGLDEAEFLRSTNGSFKLGIRFEGWSGEGSSYLHAFGSIGRGLGLVPFHHYWLRSGGAANPASLWGHSPSAQAAMAGRFAPDPGRPDLPSGLAWAYHFDASLYATLLRRHAETAGVVRVEGCIASVARDAGGRIDHVVLDGGEVHAGDLFIDCTGFRALLIGETLAEPFDDWSELLPCDRALAVAGERAAPLPPYTRAIAHGAGWRWRIPLQHRTGNGLVYDNRHLSDDEATDRLLSALNGEAMCEPRQLRFTTGRRGRAWVGNCVALGLAAGFLEPLESTSIHLIQSGIARLLDYWPGQTPQPIEVDAYNRETAAEWLAIRDFLILHYHANARPEPFWAERRAVPLPDSLAARIALFRANGRFRREDEELFAEPAWVQVMIGQGIVPAGHHALADTLSADELDDFLSLTRRHAAQVAARLPTHDAFLAAHCAAPAPKVFA

SEQ ID NO: 82500 - protein, 507 aa, Shewanella sp.
  REGION 1..507: note = tr|A0A1Z4AHE5|A0A1Z4AHE5_9GAMM Tryptophan 7-halogenase OS=Shewanella sp. FDAARGOS_354 OX=1930557; GN = CEQ32_21595 PE=4 SV=1
MTIRKIAIIGGGTSGWLAANHLGRALKGRSGLSIAVIESPDIPIIGVGEGTVPSIRKSLQSFGISESEFIRTCDVTFKQSIKFVNWLDQPRHGKHNFYHHLFDIINLHQGDAVSAWLAEQSGHFADFISPQHLACEAAKAPKLITTPEYAGVLGYAYHLNAAKFAKLLAKNAIEKFNVEHILTTVHDVCLGVDGAIESLQTERGNLSFDFYIDCSGFESILLAKALKVPFISKAQQLFIDTALVAQIPTQPADVIPPYTKATAHQAGWIWDIALTQRRGTGFVYSSAHMNQTEAEQKFDRYLGGKLADIPHRKIPMTVGYRQQFWVKNCVALGLAQGFLEPIEATSILLTDFSARFLAERFPANKDEVDYLSMRFNRTVNHAWERVVEFAKLHYCLSDRTDSAFWLDNQREETIPEPLKERLKMWKSFSPIAEDFPSKFEVFNLDNYLYVLYGMKYPTQPHDRGLVAKANLNAYMSNMSNMKRQMFEGLPEHRELIDKICTYGLQAI

SEQ ID NO: 82501 - protein, 491 aa, Amycolatopsis keratiniphila
  REGION 1..491: note = tr|A0A1W2LXX0|A0A1W2LXX0_9PSEU Tryptophan halogenase; OS = Amycolatopsis keratiniphila subsp. keratiniphila; OX = 227715 GN=AVR91_0211015 PE=4 SV=1
MSVEDFDVVVAGGGPGGSTLATLVAMQGHRVLLLEKEVFPRYQIGESLLPATVHGVCRMLGVSDELANAGFPLKRGGTFRWGARPEPWTFHFGISSKMAGSTSHAYQVERAKFDQILLNNAKSKGVVVREGCAVNDVVEEGERVTGVRYTDPGGEEREVSARFVVDASGNKSRLYSHVGGTRNYSEFFRSLALFGYFEGGKRLPEPVSGNILSVAFDSGWFWYIPLSDTLTSVGAVVRREDADKIQGDREAALKALIAECPMISEYLSNATRVTTGKYGELRVRKDYSYQQTTFWRPGMILIGDAACFVDPVFSSGVHLATYSALLAARSINSVLAGELDEKTVLNEFEARYRREYGVFYEFLVSFYQMNVNEESYFWQAKKVTNNQHTEIESFVELIGGVSSGETALTAANRIAEHSAEFAAAVDEMAGGGGDNMVPMFKSQVVKQAMQEAGQVQMKALLGEDAEPEVPLFPGGLVTSPDGMKWLPHHPV

SEQ ID NO: 82502 - protein, 503 aa, unidentified
  source 1..503: note = Alphaproteobacteria bacterium
  REGION 1..503: note = tr|A0A257HKP8|A0A257HKP8_9PROT Tryptophan halogenase; OS = Alphaproteobacteria bacterium PA1 OX=2015569; GN = CFE27_12800 PE=4 SV=1
MQGQSQKLERLVIVGGGSAGWMAASAIANAAGRGCAITLIESDEIGTVGVGEATIPPIKVFNRSLGLDEKDFVVRTQGTFKLGIEFVNWGRQGHRYFHPFGTYGADFDMVPLHQYYLRARQTGRDPGSLDEFTMAWQVAKRGRFAPPTQDPRLIQSTFDYAYHFDAGLYAQFLRSYSEARGVVRMEGKIADVGLGGEDGRITHVTLEDGRKVEGDFFIDCSGFRGLLIEGALKAGYEDWSHWLPCDRAMAVPCEHGGEFTPYTRSTAREAGWQWRIPLQHRIGNGYVYSSGFISDEEVERTLLANLDGKALADPRPLRFTTGKRKKIWHKNCVAIGLAAGFMEPLESTSLHLIQTGITRFLALFPDKTVDPVLETEFNRLSTYEWERIRDFLILHYCATERDDTELWRYCASMSLPDTLTYKMAHFRKYGRMVSDGPELFLNPSWLAVYLGQFVEPTGYDPLVDTRTHVEADRHLASLKMLMAQTAETFPTHRDFINQTCRAG

SEQ ID NO: 82503 - protein, 503 aa, Porphyrobacter sp.
  REGION 1..503: note = tr|A0A0N1AWF6|A0A0N1AWF6_9SPHN Tryptophan halogenase; OS = Porphyrobacter sp. AAP60 OX=1523423 GN=IP79_12630 PE=4; SV = 1
MAIQRIIIVGGGTAGWMAAAALSRIKAGRPVEIILIESEAIGTVGVGEATIPPFVGFNELLGISESEMLAEVGGTFKLGIQFENWGNLGESYIHPFGAYGYTMGGISFHHVWHRMNQGGDKRPIQVFNLETMAAYFGKFARTQDYSRDDLPPVNYAYHLDAGRYAAFLRRFAETRGVVRHEGKVADVALDGETGFVTGVTLDDGRQFDGDLFIDCSGFRGLLIEQALETGYDDWSRYLPCNRAVALPCLREDGSPPPPFTRATAHSAGWQWQVPLQHRNGNGHVYCSSYMEDQAALDILLGNIAGKPQAEPNFLRFVTGRRKKFWNKNVVALGLAAGFMEPLESTSIHLINTGIDKLISLLSLDGVTQVQEDTFNRLTGREYARIRDFLILHYNATQRSDSEFWNYVRTMEVPDTLREKIEIFKANGQIFREEDELFTETSWAAVMMGQGISMDGHNAMADALDPAKTAEEVNEMERSIRYLVQHMPGHGDYLARYCPAPIAA

SEQ ID NO: 82504 - protein, 510 aa, Porphyrobacter dokdonensis
  REGION 1..510: note = tr|A0A1A7BD02|A0A1A7BD02_9SPHN Tryptophan halogenase; OS = Porphyrobacter dokdonensis DSW-74 OX=1300349; GN = I603_2365 PE=4 SV=1
MTIEASSPPAPLKRIVIVGGGSAGWMTAAALAEAVGRDCSITLIESEAIGTVGVGEATIPPIRHFNRRLGIDEATFVRETQGSYKLGIEFVDWGRKGHRYFHPFGQYGAEFDSVPFYHHWMRESLAGRVDGPIDDFAMCWAMAKAGKFAHPSTNRRLIQSTFDYAYHFDAGLYAAFLRRFAEARGVVRKEGRVADVALRGQDGFIESVTLEGGERIDGQFFIDCSGFRGLLIEEALAAGYDNWQHWLPCDRAVAAPCESGEFTPYTRSTAKEAGWQWRIPLQHRTGNGYVHCSEFLSEDEASTELLSTLDGKPLADPRTLRFVTGKRREFWKKNCVAIGLSAGFMEPLESTSLHLIQYGILRLIALLPDSAMSPLLAREYNAQTSREYELIRDFLILHYKASTRDDSALWRYCAAMPIPDSLQYKIDHFRAHGTLVSDPGELFANPSWIAVYLGQGIVPRRAPALAAMRSGVPVAERLAQIRQAMDEAVAAMPTHREFIARHCAAPIPAA

SEQ ID NO: 82505 - protein, 505 aa, Sphingomonas yabuuchiae
  REGION 1..505: note = tr|A0A147IRD6|A0A147IRD6_9SPHN Tryptophan halogenase; OS = Sphingomonas yabuuchiae OX=172044 GN=NS355_10740 PE=4; SV = 1
MDKAITRIVIVGGGTAGWLAAARIAAATAGSVTVTLIESPDVPTLGVGEGTWPTIRRTLERIGITETELLLGCDGSFKQGTRFDGWATGASDDRYYHPFVPPIDADPADLPRDIPYALATCPQPLVCAEDLAPRQRGMPDYAGALNYAYHLDATKLAALLTRHATTRLGVRHVRDHVTGVERGEHGGITAVHVRGSEIVAGDLFLDCTGHAALLIGKTLGVETVDASSVLFNDRALAVQLPVPPNSPIASQTVATAHSAGWIWDIGLPMRRGIGCVYASAFLSDDEAEGVLAEYCRRISVDSPAPRRLTFRSAYRSRPWAANCLAIGQSAGFMEPLEASAIVMIELSLDALLDDFPAVSSLMPIQARRFNALATYRWERIVDFLKLHYILSHRDEPYWRAHRDPASQPDRLAEMLALWRYRSPSAFDLPMQDELFPAASYRYILRGMGFPAPLPSPVPRPLRPDLSSQLRQIDQRGRALAASLPTNRAYLDALRAEQAPISERRA

SEQ ID NO: 82506 - protein, 516 aa, Sphingomonas yabuuchiae
  REGION 1..516: note = tr|A0A147IQJ1|A0A147IQJ1_9SPHN Tryptophan halogenase; OS = Sphingomonas yabuuchiae OX=172044 GN=NS355_11440 PE=4; SV = 1
MVPQPVREDVSVVEGQARSILIVGGGTAGWLTAAYLARFLGPATRITVLEDPAIGAIGVGEGAFPTMRSTLRFLGIDEAQFIRAAGATFKQGIRFDDWRYAPDAGKRHRYVHPFEPPFRAEGVDLVAHWLAQDPATRAPFAEAVTIQHRVAAAGRGPKQAGEGAFDGPLSYAYHFDAHRLVALLADHAMGLGVRHLEGRMIGAQVGADGLIAHVATDRQGTLNADLYVDCTGQRAELISGALGEPLASVRDQLFTNRALACRLPYDAEHGHVLPTMTIATAHRAGWTWDIGLAEGRGIGTVYSDAHMNDEAAVATLAAYLGQDPDRLELRLLSFEPGYRQRPWIGNCVAIGLAGGFLEPLESTGIVLIEAAVAMLAELFLHRGPIAAPAARFNALMTARYRTIVDFLKLHYCLSSRAEPFWRDNGAAATITDRLRDLLEQWRYRPPGRFDFTLDVESFAHFNYQYILYGMGFADGETRPTGASGEAERLFRKLQMFGDRAVADLPSHGELVAAMLD

SEQ ID NO: 82507 - protein, 511 aa, Sphingomonas sp.
  REGION 1..511: note = tr|A0A514WG37|A0A514WG37_9SPHN Tryptophan halogenase; OS = Sphingomonas sp. IC081 OX=304378 GN=DM450_05085 PE=4; SV = 1
MKGGMDEGALRSLVIVGGGMAGWTAASMIARKFRPGPLRITVIESEDDGRADLPANLLDGSATPLMRKFNAALGIEENRFLAQSSGTFRLGTEFRDWREAGNVHFHGYGDYGEAIDGIAPHHFWLRLRAGGDTAPIDDWSLAYAAASRGRFAVPAGDGARFRHGYHFDAAQHVRFLRAYAERCGVERIDGGVVDAALEGAEGHIAAVTLADGRVVDGEFFIDCTGFEGLLIEQVLQTGYEDWSHWLPCDSAVLAPGKRSGALPPHAVSLAREAGWLGQAALQHRDDWGYFYSSRFSDDDRAREELLAAMTGEPLAPPRLLRFTSGHRRKFWNRNCLALGQAAGFMEPLAATALHLLQSMVLRFVEFFPDVDFAPAIAAEFNRLTLGEYERIRDFLTLHYFPSRRPEPLWHYCRNMDLPDTLVHRLEVWKAAARVTTEAQECFQEADWVAILLGNGIVPRRVDPIAARIDPGKVAMGMKARRDAVVRTAHAMPTHAHYVERNCTPETSVART

SEQ ID NO: 82508 - protein, 504 aa, Porphyrobacter sp.
  REGION 1..504: note = tr|A0A0N1AXF1|A0A0N1AXF1_9SPHN Tryptophan halogenase; OS = Porphyrobacter sp. AAP60 OX=1523423 GN=IP79_14385 PE=4; SV = 1
MAGPAPLKTIVIVGGGSAGWMTAAALADAVGRDCKITLIESEAIGTVGVGEATIPPIRNFNHRLGIDEATFVRATQGSFKLGIEFIDWGRRGHSYFHPFGQYGAEFDSVPFYHHWMHESIEGRTNGPIDDFSMCWAMAKAGKFTHPSPDRRMIQSTFDYAYHFDAGLYAAFLRRFAETRGVTRIEGRVVDVALRGEDGFIAGVTLENGEAVEGEFFIDCSGFRGLLIEEALGAGYDNWQHWLPCDRAVAVPCEKGEFTPYTRSTAKAAGWQWRIPLQHRTGNGYVHCSEHISEDEATAQLLSTLDGAPLADPRTLRFVTGKRREFWRRNCVAIGLSAGFMEPLESTSLHLIQYGILRLIALLPDSAMSPLLSREYNAQTASEYERIRDFLILHYKASERQDSELWRHTAAMPIPDSLQYKIDHFRNHGMLVSDERELFANPSWIAVYLGQGIIPQRAPAITAMRSHVPVAQRFAAIRSAMDEAVAAMPSHADFIARHCPAPPAT

SEQ ID NO: 82509 - protein, 537 aa, Sphingomonas yabuuchiae
  REGION 1..537: note = tr|A0A147IWP4|A0A147IWP4_9SPHN Tryptophan halogenase; OS = Sphingomonas yabuuchiae OX=172044 GN=NS355_05190 PE=4; SV = 1
MTPHSDHLIRRVVIVGGGTAGWMAAAAFARLLNNGYTQVTLVESEEIGTVGVGEATIPPIITFNQMLGLDENDFLAKTGGTFKLGIEFVDWGDKGERYIHPFGRHAQDLQGVHFHQLYLRERSRRALPDIAEWSMSAVAAKAGKFGRAKPDARSPIRELFYAFHFDASLYARYLRGYAERGGVTRVEGRIDAVKLRSEDGYVEGVTLADGRRIEGDLFIDCSGFRGLLIEEALGTGYESYARWLPCDRAVAAPCALPNPTEPDPFTRATAREAGWQWRIPLQHRMGNGLVYCSDYLDAETAEAQLLGSLEGELLGDPRHLRFTAGRRRQSWNRNVVALGLSSGFLEPLESTSIHLVQAAIQRLIALFPDTRFDPAERDEFNRQMHDLYEDVRDFIILHYKATRRDDTPFWNRVRTMDVPDSLARKMALWSGKGRLFREGYDLFSNPSWVAVCLGQGLVPESWEPAADALDEDLVAQALQQMHAGYADTAARMPSHGDFLRMTAPSPLAPAMTAARGGQDGFDFTRTSGTVQAKGPLL

SEQ ID NO: 82510 - protein, 503 aa, unidentified
  source 1..503: note = Alphaproteobacteria bacterium
  REGION 1..503: note = tr|A0A257HLL2|A0A257HLL2_9PROT Tryptophan halogenase; OS = Alphaproteobacteria bacterium PA1 OX=2015569; GN = CFE27_12935 PE=4 SV=1
METNGLLPKSIVIVGGGTAGWMTAAALARFVGHKVKITLIESSDIGTVGVGEATIPPIRNFNAILGLDEAEFVRETKGTYKLGIEFCDWVKPGHRYFHPFGVYGPSLNQPNFFHQWLRARAGGQLPELSEFSLCSLAARAGRFAPQGRDPASIQATLTSAFHFDAGLYAAYLRKFAEARNVRRLDQKVQSVRQSPETGNVEAVLLESGEAIEGDFFVDCTGFRGLLIEQTLKTGYEDWRAYLPADRALAVPTAKVGPAAPFTRSTARSAGWQWRIPLQHRTGNGYVYSSQFVSDEAAHETLMGNLDAPALADAKPLRFVTGRRKKLWNKNVVAIGLASGFLEPLESTSIHLIQTGITKLLDFFPSRQNHAADAATYNRLGQEEYESIRDFLVLHYMANQRVGEPLWDYCRQMALPDSLQERLALFQHGGRVPPRAFDLFTETSWVAVFMGQGIEPQGYNPLVEVHEGAAGRQFLADAHRALAEVSRQLPEHEDFLRQAGMMPT

SEQ ID NO: 82511 - protein, 526 aa, Sphingomonas sp.
  REGION 1..526: note = tr|A0A514WP12|A0A514WP12_9SPHN Tryptophan halogenase; OS = Sphingomonas sp. IC081 OX=304378 GN=DM450_21160 PE=4; SV = 1
MDAKVKRILVVGGGTAGWLTAGYLAKMLGADLPGGISITLVESPDIGIIGVGEGTFPTIRRTLERIGVREKDLLRRCEATFKQGVKFVDWLHPAGHGGADNYLHGFQEADDRKGGPEYLPYWLLGEAGDMPWDEASTPQKRAVDALRAPKLANHPEYAGVLNYAFHFDAGALALLLRDQGIANGVLHIADTVQEVLCTEDGAIAGVRTQAHGVLEADLFIDCSGFRAELIGKALGQKWKSCTDVLFCDSAIAAQVPYDTPTTPIQSCTLSTARDAGWIWDIGLQTRRGTGYVFSSAHCDPETAERTLRSYLGTHGETASTRRLQFNAGYREVNWYKNCVAVGLSSGFFEPLEATGIVFAEIAAGAIANLFPWAGDYETSARQFNRGMLERYERARDFLKLHYSLTQRRDTDFWRDNVRAETVPDSLNELLDRWRHRPPNEKDFNPNVDIFPATSWQCILYGMGWKTDLSAKAGIMRLRPEAREAFEQVRRQSEYAVTNLPGNRELTRQMLAPQPGSTIQAFAGIRA

SEQ ID NO: 82512 - protein, 481 aa, unidentified
  source 1..481: note = Unknown
  REGION 1..481: note = tr|T1WBA0|T1WBA0_9ZZZZ Tryptophan halogenase; OS = uncultured organism OX=155900 PE=4 SV=1
MNPGFRIAIIGGGSAGWMTAAALARALPRDTRLVVVDDPQAPDSGCLAPFDSTLPSLPAFSRSLGLDEDRLMKATDATFKLGSRFSGWTRREASYIHPFSEFGAVIDGVAFHHLWMKLRQAGQVEPFEDFALAAIAARAGRFARPDHDPRSVTSTMAYGLHLDVGAWTAGLRVRAGQDGVARIEGVPASVEQSPDGKTVVAVRLEDGAKVEADLFIDCTGTRALVIEALSSDREDWSRWLPCDRVEWSRGGHGAASLLTEATALRTGWRQTVPLQSGVASVTFSSSRHTPDTPSPGGRSFVSGRRPPWVGNVIALGLSATVLEPLEGTALHQVQSGIAKLLGLFPRRGAGDSLAQEYNRLMQAESERIRDLLIAHYRLNRRRGQPLWDAAAAMDPPAELASKIRLFGSRGRVPLFDEETFEEASWIATFMGHHLQPERYHPLADRFSQAELRARLDRMRAVMRTAVEAMPPVSAFQSSVPS

SEQ ID NO: 82513 - protein, 240 aa, unidentified
  source 1..240: note = Unknown
  REGION 1..240: note = tr|T1W8M3|T1W8M3_9ZZZZ Tryptophan halogenase (Fragment) OS=uncultured organism OX=155900 PE=4 SV=1
MTGTLGSVVIVGGGTAGWMAAVAFGRLLGPAKTRVTLVESDDIATIGVGEATIPPIRTFHAMLGIDEDAFLRATGGSYKLGIRFEGWTRPGESYVHPFGQIGTDIAGVPFAAQWLRARQAGAADALGAYSLEARAAEAGRFSRPIANGDSPLSRIGYAYHFDAGRYAAFLRAQAEAHGVVRREGRVDRVERGPAGIAAVHLADGSRIEGDLFLDCTGFRALLIEGALQAGWTDWSQWLPC

SEQ ID NO: 82514 - protein, 505 aa, unidentified
  source 1..505: note = Unknown
  REGION 1..505: note = tr|T1W807|T1W807_9ZZZZ Tryptophan halogenase; OS = uncultured organism OX=155900 PE=4 SV=1
MTIGAPVRRIVIVGGGTAGWMAAAALARLIPTGASITLIESDAIGTVGVGEATIPPIRGFNAMLGIDEAEFLAATAGSFKLGIEFVDWGALGERYLHPFGGFGFDIEGVRFHQYWRRRRAAGIVEDIEAYSLCAVAARAGRFMPPSPDPASVLSQMAHAYHFDAGLYARFLRGRAERDGVVRVEGDVVNVALDGETGHVRHVTLAGDRVIEGDLFLDCSGFRGLLIEQTLGAGYEDWTHWLPCDRAVAMPTANAGAAITPYTRSNARAAGWQWCIPLQHRTGNGYVYSSAHCSDDEAAATLHAGGDGTPLAEPRLLRFTAGRRRKQWIGNVVALGLASGFTEPLESTSIHMVQTGISKLLALFPDQGFSPVEIDTYNRLAATQFDQVRDFLILHYHATRRDDSPFWRETRARAIPDSLSEKLALWRRRGRLFRWEDDLFAEASWVAVLLGQGIVPDGWDRLADAVDAREVDARFDRLRAMFADAASRMPRHEEYIARICPTRVRA

SEQ ID NO: 82515 - protein, 502 aa, unidentified
  source 1..502: note = Unknown
  REGION 1..502: note = tr|T1WBD1|T1WBD1_9ZZZZ Tryptophan halogenase; OS = uncultured organism OX=155900 PE=4 SV=1
MDVRYERIVVLGGGTAGWMAALAFATGLSRSSVTLVESEEVGIVGVGEATFPSIRAFHDIVKVDEADFLRATNGTYKLGIRFCDWRERGTDYFHTFGSFGPVDGPNTLWGQYRRLRRNPLPGGQDAPGVLGEQCLPTVMAMHGRFCMPAPKQGAHFNYAYHFDATLYSAYLRELAVKRGVQRVEGKVVDVARRPDGAVASLRLADGREIAGDLFIDCSGFVSLLLGRTLEEPFVDFSHWLPVDRAWACPAEPKDENPTPYTRATALEAGWSWRIPLRNRTGFGHVFSSRYIDENRAREQLLAQMDGTPLAEPRLLRFTTGHRQRFWVNNVVALGLSSGFLEPLESTSIYLVQSGLGRLMGLLQEGKPVGADAVRSYNTGLVRQFERIRDFIILHYCLTQRRDSAFWRDMGSMALPETLAFKLHAWRQAGVLHQYDEEGFDESSWLAIHAGMDDWPERCDPRHAEMPPDEAGRWLEGRRRQLVQVAESLPTHQEFLAHVLGKA

SEQ ID NO: 82516 - protein, 496 aa, unidentified
  source 1..496: note = Unknown
  REGION 1..496: note = tr|T1W536|T1W536_9ZZZZ Tryptophan halogenase; OS = uncultured organism OX=155900 PE=4 SV=1
MSGEAAARRIVIAGGGTAGWMAAAAIARTMGRTVDLTLVESDAIGTVGVGESTIPPLATFNRLLGINEADFMRATQATFKLGIMFDGWKTAGESYFHSFGLTGKDHWSAGFQHFWLYGRHMGHDQPYDDYCLELLAAAEGRFAHLPDERMNYAYQLDSALYGQFLRRMAEADGARRVEGRIARVELDGESGDIAALVLESGDRIAGDLFIDCTGFRALLIEQALHAGFDDWTHYLPCDAAIAVQTESAGPPPPFTRAMAHDAGWQWRIPLQHRTGNGIVYCSRYLDHDAALERLLGNLTGPVLTQPNKLRFVTGARRKQWHRNCIAIGLSGGFMEPLESTSIHLIQRAILRLIRMMPAGPVSPRDIAEFNDQQYQDMLQIRDFLILHYKVTERRDSPFWRQCAAMEIPDTLAQKIELFRETGRVFRRNEELFAENSWVQVMMGQGIMPQSWHPIATKLRDEELAKLLDGLRDATRRTVAGLPEHGAYVARYCGQSG

SEQ ID NO: 82517 - protein, 500 aa, unidentified
  source 1..500: note = Unknown
  REGION 1..500: note = tr|T1W6E7|T1W6E7_9ZZZZ Tryptophan halogenase; OS = uncultured organism OX=155900 PE=4 SV=1
MGARMQVVIVGGGTAGWMTAAALAMSFAGRLADVTLIESEEIGTVGVGEATVPHIKFFNKRLGIDESDFIRRTNTTFKLGIEFRDWSRLGDSYIHPFGDFGHDIDGLPFHQHWLHATRDDARDMPGLEACSLPIVAARDNRFAPPLDDPRSIGSTYSYAYQFDAALYAAYLRDYAEARGVVRIEGRVDAVEPHEDGIAAVRLADGRRIAGDLFVDCSGFRALLIDGALKVGHQDWSHWLPCDAAWAVPTANTGPLTPYTRATARDAGWQWRIPLQHRTGNGHVFSTRFTDPETARTLLLDNLEGEALAEPRMLRFRTGRRDRQWVGNCVAIGLSAGFLEPLESTSIHLIQLAIGKLIELFPAGGVFDPVDEAEYNRAMALEYDRVRDFLVLHYCATERDDTPFWRYMRTMALPSSLTEKIAEFRERGIVAQYREGMFLPASWLAVYHGQRIVPGRVNPLIADTPVAASQARVAAVAAACQRAVASMPTHEDYIARIRQAA

SEQ ID NO: 82518 - protein, 502 aa, unidentified
  source 1..502: note = Unknown
  REGION 1..502: note = tr|A0A160TLY6|A0A160TLY6_9ZZZZ Tryptophan halogenase; OS = hydrothermal vent metagenome OX=652676; GN = MGWOODY_Smn1555 PE=4 SV=1
MTDGIPHPRRIVIAGGGTAGWMAAAAIARTLGRTADLTLVESDAIGTIGVGESTIPPLVVYNRLLGINEAEFMRATQATFKLGILFDDWKQVGDRYFHSFGATGKDHWSAGFQHFWLYGRTRGHDQSYDDYCLELIAALQGKFAHLPDDGMNYAYQLDSTLYAKFLRTMAEGDGTKRIEGKIARVDLDGESGNIAALVLESGMRIEGDLFLDCTGFRAVLIEQALHAGFDDWTHYLPCDSAIALQTENVRPPVPYTRAMAHDAGWQWRIPLQHRSGNGLVYCSRYLSRDDALERLLGNVEGEVLTEPNFLRFTTGSRRRQWYRNCIAIGLSGGFMEPLESTSIHLIQRAVLRLIRMMPMGEISARDVAEFNDQQDEDTRQIRDFLILHYKATERRDSPFWRQCAAMPIPDTLAQKIELFRETGRVFRKNEELFAENSWVQVMMGQGITPRTYHPIAEKLRDDEVDKLLGTIRDNVSRTVASLPEHGAYVARYCGAATPTTRG

SEQ ID NO: 82519 - protein, 149 aa, unidentified
  source 1..149: note = Unknown
  REGION 1..149: note = tr|A0A1B6NSP7|A0A1B6NSP7_9ZZZZ Tryptophan halogenase; OS = marine sediment metagenome OX=412755 GN=MGSAQ_002748; PE = 4 SV=1
MQSRRGVGHVYSSRHQSKDDAYARLDTYVRQTSTLNGIDGINVKDITIQSGHRQRFWQNNCVAVGLAAGFLEPLEASALVLVELSASMIAEQLPANRAVMDIVAKRFNDTFSYRWQRIIDFLKLHYMLSKRKDSAFWRDNRDSHTIPIH

SEQ ID NO: 82520 - protein, 167 aa, unidentified
  source 1..167: note = Unknown
  REGION 1..167: note = tr|K7WDL2|K7WDL2_9ZZZZ Tryptophan halogenase (Fragment) OS=uncultured microorganism OX=358574 PE=4 SV=1
FDFGVGEATVPPMRNFHRIMDIDEQAFMRATQATFKLGIVFDNWGEIGDSYIHSFGEIGQRSWMAEFHEFWLEAREQGFGGSLDEYCLELMAAKAGKFAKNVKDTRLNFAFHLDATRYAGFLRQLSEAAGVKRVEGKISEVKKHSETGELKALLLESGKLIEGDLFV

SEQ ID NO: 82521 - protein, 531 aa, unidentified
  source 1..531: note = Unknown
  REGION 1..531: note = tr|A0A3B0SNI7|A0A3B0SNI7_9ZZZZ Tryptophan halogenase, putative OS=hydrothermal vent metagenome; OX = 652676 GN=MNBD_ALPHA05-120 PE=4 SV=1
MTIRPNPYGRSSTIVKPIKSIVVVGGGSAGWITAGVIAARHKSHGNDGVKVTLIESPNIPTVGVGEGTWPTMRSTLIKLGISETEFIRECDASFKQGAKFARWMDGTEDDYYYHPLMLPQGFPSVDLAPYWHKFTANDPNPISFSQGVCFQEAACDAGLAPKLITTPEFGSVANYAYHLDTAKFAPLLQRHCTQKLGVTHILDNVVDVVSSECGDVSHLVTKSSGNLEGDLFIDCTGFASVLLGKHFSTPFVDRSDVLFIDNALAVQVPYEREDSPIASHTIATAQSAGWVWDIALPTRRGVGYVYSSRHTSEDEAHQELRAYVGPAIDKLSVRKIPIRSGHRATFWKRNCVGVGLSAGFVEPLEASALVLIELSAEMISQQLPACREVMDITAKRFNDVFSYRWDRIIDFLKLHYSLSKRTDSQFWIDNRDPATIPESLQNQVELWRYQSPGDHDFTSNNEVFPAASYQYVLYGMGFKTDFRYRAHMLADEEKAKEQFAQNAAMKQKVLKSLPTNRELINKIHQHGLQKV

SEQ ID NO: 82522 - protein, 104 aa, unidentified
  source 1..104: note = Unknown
  REGION 1..104: note = tr|D8VN64|D8VN64_9ZZZZ Tryptophan halogenase (Fragment) OS=uncultured organism OX=155900 PE=4 SV=1
MTNINPIKKIVIVGGGTSGWIAASMLSYHLKAELCEIELVESSDLGTIGIGESTIPPVVRLIQNLGIDEQQFIQSTQACFKLGIKFIDWRQKSGIDNYNGPKVA

SEQ ID NO: 82523 - protein, 510 aa, unidentified
  source 1..510: note = Unknown
  REGION 1..510: note = tr|T1WA39|T1WA39_9ZZZZ Tryptophan halogenase; OS = uncultured organism OX=155900 PE=4 SV=1
MSDRDAVEKRGADNPVRSILIVGGGTAGWMAAAALTRVMRSGPVKVMVVESDEIGTVGVGEATIPPIANFNGLLGIDEADFMRRTQATFKLGIEFVDWDRIGHRYMHPFGAFGVDMEGVKFHQHWLRARQGGDASSLWDYSLCSVAAAAGRFTRAAREDRSIVSAMTHAYHFDAGLYAAYLRAYAETRGVTRREGRITEVVLRSDDGFVDAVKTADGERLEADLFIDCSGFRGLIIEQALKAGYDDWTHWLPCDRALATPSQSSAPPTPYTRSTATAAGWRWRIPLQHRVGNGYVYSSAHTSDEAARTDLLAGLDGPALAEPRSLRFTTGRRRSQWVKNCVSLGLSSGFLEPLESTSIHLIQSGVSRLLAMFPDRTFDPRLVAEYNRLSQIQFEQVRDFIILHYKASRRDDTSFWRQVRDMPVPETLSRRMELFRSSGRFFRFEDELFSEASWIAVMLGQGVWPEVHDPLADALDPRLLTSRLAGLRQLMRETADQMPTHQTYLRAYCQA

SEQ ID NO: 82524 - protein, 518 aa, unidentified
  source 1..518: note = Unknown
  REGION 1..518: note = tr|T1WCK2|T1WCK2_9ZZZZ Tryptophan halogenase; OS = uncultured organism OX=155900 PE=4 SV=1
MNASFRDERARNPRALRKICVVGGGTAGWIAAALMAEHFKGLYEIELVESDDIGTIGVGESTVPPFLQLLAKLGVNEQDFIRETQASFKLGIRFENWLRKGEAYFHPFGAIGVPVDISEFYQLWLKAKAHGYPGELQDFAPAAAMADQQKFTLPFKALNTPVGGAAYAVHVDARRVARFLRTFAEARGVKRTEGIVEDVIQRNDGFIEQLVLKSGKTVEADFFIDCSGFRALLIEKTLKVGYQDWSQWLLCDRAIAVQTENVGPPPPYTLAQAQDHGWRWRIPLQHRTGNGYVFASKYLSDDEATATLMSQVEGEPVVKPMVVPFKTGMRDRIWDKNVLSLGLASGFIEPLESTAIHLVYRGMEFFFRYLPDRDCDPSLVAEYNRRMATDYEEIRDFVILHYCTTQRDDTPFWRECRDMVLPESLQAKLDLFRVNGSLREGLDELFRSVSWQSVLEGMGVRPAAYHPLVDRIPFDGMLQNLDRAVHTLGQAVAGVPSHQDFIRQHCAALPPERVTAPA

SEQ ID NO: 82525 - protein, 501 aa, unidentified
  source 1..501: note = Unknown
  REGION 1..501: note = tr|T1WDE3|T1WDE3_9ZZZZ Tryptophan halogenase; OS = uncultured organism OX=155900 PE=4 SV=1
MTDQRLRKVVIVGGGTAGWMTAAALGRFLKDGHTQVTLVESEEIGTVGVGESTIPQIKIFNRMLGLDEFEFVRRTKATFKLGIDFVDWKTIGHQYHHPFGPYGVDMEGVSFHAYWLRLKAMGEAADLGDYSLQCTASAQGKFMRANGQRNSPLGAIDHAYHIDAGLYAQFLRAYAEARGVRRQEGRIVEVHQRAADGFIEAVTLQNGERVEGDLFIDCSGFRGLLIEQTLKTGFEDWSHWLLNDRAVAVPCALGGSTHPVTRATARPAGWQWRIPLQHRLGNGYAYSSAHISEDEATAYLLANIDGAPLRDPFTLRFQAGRRKKSWNKNVVAIGLSAGFMEPLESQSIHLIQVGVSRLLAMFPDKRFETPDIDRYNRVMRFEYETIRDFLILHFHATRRNDTPYWDYLRTMPIPDYLADKMAVFQSYGRVFRENEELFTDTSWFAVMIGQGIEPRGHDPMADVMSDNDLRARMDNIRGVIAKSAEVMPDHMTFIAENCAAA

SEQ ID NO: 82526 - protein, 505 aa, Sphingomonas sp.
  REGION 1..505: note = tr|A0A0Q4IZW2|A0A0Q4IZW2_9SPHN Tryptophan halogenase; OS = Sphingomonas sp. Leaf25 OX=1735692 GN=ASE78_03150 PE=4; SV = 1
MSGRIRRVVVVGGGTAGWLAACRIAAAADPSAQQPLSVTLIESPDIATIGVGEGTWPTMRGTLARIGIDEATFLRATDASFKQGSRFDGWRTGAADDRYYHPFTAPADLPAADLLRDWRRGRFADHVCAQPDVCADDLAPRQPAMPPYAGALNYAYHLDATKFAALLRETAVGRLNVTHIRDHVTGVEPAANGDIAAVVARDTGRITGDLFLDCTGQAALLIGGHCRIGTIDRTATLFNDRAIAVQVPVAPDSPVASQTNATAHDAGWIWDIGLPARRGIGCVYASDFLDDDAAAATLTAYLARTAPHVDPAGLSFRQLRFRSAHRERFWVGNCLAIGLSAGFLEPLEASAIVLIELSLDALLDGFPADRAAMDLHARRFDALFRYRWDRIVDFLKLHYVPSRRDSPYWRAHRDPASIPPSLCDLLALWRTQPPSPADFTQAGEIFPAASYQYVLYGMGVTPPSIGPLRPRPDTASVLHQVRQRARTLTASLPTNRAYLNGIAHV

SEQ ID NO: 82527 - protein, 501 aa, unidentified
  source 1..501: note = Glycocaulis sp.
  REGION 1..501: note = tr|A0A550KMB6|A0A550KMB6_9RHOB Tryptophan 7-halogenase OS=Glycocaulis sp. ZYF765 OX=2518983; GN = FKB34_04005 PE=4 SV=1
MSDARIRKIVIVGGGTAGWMTAACLSRLLGEDYADITLVESDAIGIVGVGEATIPQIRIFNELLGLDEDDFMRRTQGSFKLGIQFIDWGRRGHTYFHPFGPFGVDMLGVSFHAYWLRMMHAGRADPITDFSLQSVAAERGRFMRPIKAGQSPLSNIAYAFHFDAALYAKFLREFSEVRGVTRREGKVVQVHQRGEDGFIEAVELESGERIEGELFIDCSGFRGLLIEQTLKAGYEDWTHWLPCDRAMAVPCEHGTGEFTPYTRSTAREAGWQWRIPLQHRVGNGYVYSSQHISDDEAAATLLANLDGEALADPRPLRFVTGRRRSAWVKNCVALGLASGFLEPLESTSIHLIQSGIARLMAMFPDRSFDPATIARYNRVVKREFEQVRDFIVLHYNVTERDDTAFWDHVRTMDVPDSLQEKYDIFAHTGRVFRENEELFNDTSWFAVMIGQGMKPAAYDPMADVISLDETEKRLAHIRETISNSADYMPTHTNFIGQNCAA

SEQ ID NO: 82528 - protein, 505 aa, Sphingomonas sp.
  REGION 1..505: note = tr|A0A0Q4JCM3|A0A0Q4JCM3_9SPHN Tryptophan halogenase; OS = Sphingomonas sp. Leaf25 OX=1735692 GN=ASE78_14550 PE=4; SV = 1
MTIGQQAIATVAIVGGGSAGWMTAAALARFLPPGVEVTLIESDAIGTVGVGEATIPQLRLFNQNIGIDEDDFVARTGGSFKLGIEFAGWNGEGSRYLHAFGTIGRALGLVPFHHYWLAAGGAGDPASLWRHSACAAAAQAGRFGRDPGSAQAPSGLAWAYHFDAARYATYLRDLAERGGVTRVEGRVVDVALSGGDTIAAVTLADGRRIAADFFIDCSGFAALLIGRMPGSAWDDWSSLLPCDRALAVPCAATAPITPYTRATARAAGWQWRIPLQGRTGNGLVYASDYLSDDAALATLLGSLDGTASGDPRPLRFTTGRRRLPWIGNCVALGLAAGFLEPLESTSIHLVQSGIARLLALWPSAPPRAADIAAFNRQSEREWIAVRDFLIAHYVLNGRDEPFWRDRRATPLPDSLAERIELFRGSGRILRDEHELFAEVAWLQLLIGQGVVPEGHHPLVRSLPAARLPEFLSLSAAHVEAIVARMATHDEFLRAHCPAAQTKVAA

SEQ ID NO: 82529 - protein, 500 aa, unidentified
  source 1..500: note = Glycocaulis sp.
  REGION 1..500: note = tr|A0A550KMB8|A0A550KMB8_9RHOB Tryptophan 7-halogenase OS=Glycocaulis sp. ZYF765 OX=2518983; GN = FKB34_03995 PE=4 SV=1
MSAPAILIAGGGMAGWTTALALARPFRGTGARIAVIDTPGPDVSLGPLAPAIATLPSAQDAHWALGLPEHRVVRAGRGAYRLGEFWRGWDGREAAAFLPFGEVGADIGGVRFHQQVARLQALGETASLADHALSSLAAAAGRFAIPPHDAADIRATLDHGLHLDAEALTGALLRPVALAMGVTRIEGGIGEVELCTDGLIAALRLDDGRRETADLFIDATGPDARLIGALEAAWEDEAAWEDWAALSPFDRAAAVIRPDTAEPAPFTRDAAHPWGWRRTMPLNGARGEIVMFASRHMKDERASQMMGGAEPAAVTSGRRLSPWTGNCVAVGAAAAIPDPLASAELALVHAAALRLARLVPWPGGWRAEAEEFNRLWRHETESARDFALLRHLLNRRPEKVWAAAREASAPEPMDRRLALFAARGRIIRTEHGLYDDALWARAFIALGARPRHHDPLADGLDAGMLKARSARIRELAARAAASMPRHGDFLARVNAQDGPR

SEQ ID NO: 82530 - protein, 508 aa, Pseudoalteromonas arctica
  REGION 1..508: note = tr|A0A290S010|A0A290S010_9GAMM Uncharacterized protein OS=Pseudoalteromonas arctica A 37-1-2 OX=1117313; GN = PARC_a0212 PE=4 SV=1
MNKAIKTVAVVGGGTAGWLSAAIIASYHQGQNGDGLKVMLVESSDIPTIGVGEGTWPTMKNTLQQIGLREVDVFKACNATFKQGGKFVNWTHGNNDFYYHPFTVPLGYGRIDLAPYLDNVEDFAQRTNFQHDICEASLAPRGIAQGEYQGNCNYAYHLDAGAFAEMLKQHCKSKLGVEHIIGTVDQVKLDDDGAINELTLKDQTRTINADLFIDCTGFSSLLLGQALNVPFKKMDHVLFNDSALAMQVPYDENDNSLASHTIATAQNAGWIWDIGLTHRRGVGHVYSSKFLSDDEAEQNLRDYLGDAANGLTARKISFESGYREKFWHKNCVAIGMSAGFVEPLEATAIMLVEISARFVAEHMPADTQVMPIVAKRFNEQMDYRWQRIIDFLKLHYMLTKRPEPYWQAHVQPNTIPQTLQEDLLLWGSRGPLIQDFHGALELFPAASYQYVLYGMGFKPDFTKQAYLYSQHVQAKQIIERNSQLTQQMLQTLPPHRAFIEQWLAANPV

SEQ ID NO: 82531 - protein, 510 aa, Pelomonas puraquae
  REGION 1..510: note = tr|A0A254N521|A0A254N521_9BURK Tryptophan halogenase; OS = Pelomonas puraquae OX=431059 GN=CDO81_16490 PE=4 SV=1
MTNKRRILIVGGGTAGWLTAAYLAKALKLSERSQLEVTLLESPDISTVGVGEGTFPTIRNTLQYLGIDEARFIRATAATLKQGIRFVDWAHAPEAGRRHAFFHPFEAPYFAEDLNLVPYWLLQDEAVRAPFAEAMTLQARVAAAHRAPKRAGEAGYAAPLNYAYHFDAHKLARLLADRARELGVRHEAGTVSAVQLDGQAAIAHIDTDRQQRFEADLFIDCSGFRAELIGRALGSPFKSARGQLFADRALACKVPLGDEAVMESCTIATAHEAGWLWEIGLNGARGVGCVYSSSHISDDRAAELLQAYCGARAEDLGLRSIPFAPGYREQQWVKNCVAIGLSAGFLEPLEATGLVLIEAAVGMVAEMLPHSGPMHAPARRFNELMTARFDNIINFLKLHYALSRRPEPFWRDNIAPATLPERLAGLLEEWRLRPPGRFDFVLDTETFAFFNYQYILYGMGYPTDLSAGRDDFPRVDEAAKVFAKIQRYAERAVADLPSHRALIQQINAAR

SEQ ID NO: 82532 - protein, 503 aa, Caulobacter sp.
  REGION 1..503: note = tr|A0A3Q9IJ43|A0A3Q9IJ43_9CAUL Tryptophan 7-halogenase OS=Caulobacter sp. FWC26 OX=69665; GN = CSW63_18140 PE=4 SV=1
MTQDHRLRRIVIVGGGTAGWMTAAALGRFLKDGYTKVTLVESEAIGTVGVGESTIPQINIFNRMLGLDENDFVRKTKATFKLGIDFVDWQRIGHSYHHPFGPYGVDMEGVSFHAYWLKLRAMGLDDDLGAYSLQTVGARQSKFMRPNGQANSPLGQIAYAFQFDAGLYARFLREYAEVRGVTRQEGKIASVQQDGQSGHVTSVTLESGQIIEGDLFIDCSGFRGLLIEQTLKTGYEDWSQWLLNDRAVAMPCTLGGSMAPVTRATARPHGWQWRIPLQHRLGNGYAYSSQHVSDDEALADLLSQLDGEPLADPNLIRFTPGRRKKSWNGNVVAIGLSAGFMEPLESQSIHLIQVGISRLLAHFPDRHFRQAEIDRYNRTMAFEYEKIRDFIILHFKATARSDTPYWDYLREMPIPDYLADKIDLFKGSGRVFRENEELFNDTSWFAVFIGQGIYPESYDPMADNMDEGLFKARMAEIKSVIAKSAEVMPGHMDFIRENCAAEG

SEQ ID NO: 82533 - protein, 505 aa, Xanthomonas axonopodis
  REGION 1..505: note = tr|A0A2S6YGK7|A0A2S6YGK7_9XANT Tryptophan halogenase; OS = Xanthomonas axonopodis pv. begoniae OX=473403; GN = XabCFBP2524_00840 PE=4 SV=1
MTQAQIRKVVIAGGGTAGWIAACALSHQFRNLLDITLVESEQIGTVGVGESTVPPIRTFHRFLQIDEQEFLRAVAGTFKLSISFEHWRRQGERYIHPFGITGQSTLVCAFHHLWLESQRRGMPGSFGDYCLETVASRVDRFALHGEPAVNYAYHLDAALYAKFLRARSEACGVTRIEGRIQQVTVQPHSGDVASLVLEDGQVIEGDLFIDCSGFRGLLIEQALHTGYEDWSHWLPCDRAVAVQTQALGPPVPYTRAIAHEAGWRWHIPLQHRVGNGLVFSSKHLSDDEAHAKLLRDVAAPAVKDPWMVPFRAGRRLKAWNKNVVSLGLASGFIEPLESTSIHLTISAVVRLLALFPAEGIAPSQVQLFNDVSRAEMEHVRDFVTLHYHATQRDEPLWQQCRQMELPESLALRLRAWRERAHAWQGADELFRIDSWTHVLMGQGIAPEQHHPLTRAFSDHDLRRLLDGIAQPIQHAVRQMPSQQDFIERYCKAGEQVWGMRSPVPA

SEQ ID NO: 82534 - protein, 507 aa, Caulobacter sp.
  REGION 1..507: note = tr|A0A3S9VFH7|A0A3S9VFH7_9CAUL Tryptophan 7-halogenase OS=Caulobacter sp. FWC26 OX=69665; GN = CSW63_12155 PE=4 SV=1
MQPLKKILIAGGGSAGWMTAALCSRLFHGLYEIVLVESEEIGTVGVGEATIPAIKKFNELLGLDEDDFLRKTQGSFKLGIQFRNWWRQGESYLHGFGVIGQDLGWLRCHQYWLRMRELGRAGDFDNLSINNAMALSNKFMRARPDMAESPIGHIAHAFHFDAGLYAKHLSTFAQARGVKRREGKIVDVSLRAEDGFVQSVTMDDGEVIAADLFVDCSGFRGLIIEQALKTGYEDWTHWLPCDRAVAVPCDRSEQFTPYTRSTAHSAGWQWRIPLQHRTGNGHVYSSQYIDDDEAERVLLSNLDGAQRADPLRIRFKTGKRKKIWNKNCVAIGLASGFLEPLESTSLHLIQSAVIRMVRLLPDAGFDQATIDEFNRQTDFEYERIRDFIILHYKATERDDSPFWRYCRDMEIPATLQRKMDLFRANGRVFREDDELFTEESWIQVFLGQGVIPRAYDPLVHVQSDDEIARFLGNIETVIGKCLNVMPSHAEFVAHACQAPPLAPVPTS

SEQ ID NO: 82535 - protein, 508 aa, Sphingomonas sp.
  REGION 1..508: note = tr|A0A0Q4IJW3|A0A0Q4IJW3_9SPHN Tryptophan halogenase; OS = Sphingomonas sp. Leaf25 OX=1735692 GN=ASE78_06690 PE=4; SV = 1
MGAERRIAIVGGGTAGWLTAAYLARALGSSVRITLLESPGIGIIGVGEGTFPTIRETLRFLGIDEAQFVTAAGATFKQGVRFDGWRRGGPVPHRYYHPFEPPFPADRLVAHWLRADPATRPPFAQAVTIQHPVAAANRAPKQPGDEDFDGPLAYAYHFDAVRLAGVLADRARASGVAHVEGRIAQVVQNDDGTIERIDTDAGPLHADLFVDCTGFRAELIGQLPGAAFRSVADQLFTDRALTCKLPCADPDAPIESTTIATAHEAGWIWDIGLSGARGIGCVYASRYIDDDRAADLLRAYLGPAADGVTPRRLTFDAGWRPRQWVGNCVAVGLSAGFLEPLESTGVVLIEAAAAMIAELLPHAGPVDAPAGRFNAVMAARFAGIVDFLKLHYCLSDRTEPFWRDNADPASWSPRLTDLLDQWRHRPPSRFDFPVDTETFAFFNYQYILYGMGFATVPPPGGAAQHAEAQRLFARIRSYGDHAVRDLPPHRVLVDGLRGLPAIPARTGS

SEQ ID NO: 82536 - protein, 496 aa, unidentified
  source 1..496: note = Gammaproteobacteria bacterium
  REGION 1..496: note = tr|W2UCX1|W2UCX1_9GAMM Flavin-dependent tryptophan halogenase RebH OS=Gammaproteobacteria bacterium MOLA455; OX = 1411685 GN=rebH_1 PE=4 SV=1
MTIKNVTKVVVVGGGTAGWMAAASLSKLIGPNIQVCVVESDEIGTVGVGEATIPTMMTLHQLLKIDEQEFMAAVQGTFKLGINFENWNKLGDSYMHAFGRTGQDCWAGGFQHFWSRGKQLGLSEDYGRYSASNVAAKAGKFAALPDQSLSYAFHMNATLYATFLRKMAEQHGCERIEGKITQVDTDNDNGFIRSVTLESGRTIEGDLFVDCSGFRGLLIDETLHTEYEDWSNWLPCDSAVAVQTESVGEPIPYTRAMARDAGWQWRIPLQSRVGNGMVFCSKFLSDDDAIETLLSNVEGEPLTKPRIIKFRTGQRKQHWNKNCIALGLASGFVEPLESTSIHLIQRGIIRLLQMFPHEGVRQPDVVEFNRQMSAEFVFVRDFIVMHYHLTERDDTPFWRHCQSMPIPEGLRHRLDLFKQTGRVFQEAGDVFAENNWVQVMLGQGLVPEQYHPIVDSMSDLELGRFLKGLSANVDHLVNQLPSHQSFISKYCPAESA

SEQ ID NO: 82537 - protein, 508 aa, unidentified
  source 1..508: note = Massilia namucuonensis
  REGION 1..508: note = tr|A0A1I7LHG5|A0A1I7LHG5_9BURK Tryptophan halogenase; OS = Massilia namucuonensis OX=1035707; GN = SAMN05216552_102933 PE=4 SV=1
MTDSAIRKIVIVGGGTAGWMTAAPLALKLGKSREIVLVESPEIGTVGVGEATLPTIRYFNLALGLDGADFVRKTQATFKLGIEFKDWGHVGNRFFHGFGDFGPPIEHRSPYQYWLRLSREFKDMPSYEEWSMATAMARKHRFAPPHGDQPAASNAYSYAFHFDAGLYAAYLRDYAMRRGVARIEGMITGVEQHPDSGFITAVKLRDGRRVEGDLFIDCSGFRGLLIEGVYQAGYDDWSAMLPCNSALAVPCEKAGEPAPYTLSTARSAGWTWRIPLQHRTGNGHVYCDGFTTDEAASRVLLAGLDGRALDEPRKLRFTTGRRRKSWIKNCVAIGLSSGFLEPLESTSINIIENAVGWLLDYFPDRYCRPELADEFNRLVAQRFEFVRDFIILHYKVTRRDDSEFWRYCADMPIPDTLRHQIELFRETGRVVIHDPEGFSVASHVSILAGLGVVPKADDPLIDLMDQRKLHAHFHKVRESIARTVDAMPGHGQYLAHLTGAPPAEGLAA

SEQ ID NO: 82538 - protein, 498 aa, unidentified
  source 1..498: note = Massilia namucuonensis
  REGION 1..498: note = tr|A0A1I7M6Y6|A0A1I7M6Y6_9BURK Tryptophan halogenase (Fragment) OS=Massilia namucuonensis OX=1035707; GN = SAMN05216552_10719 PE=4 SV=1
ALRRAMKPPFKRIVVVGGGAAGWMTATALATALAGGATIELVESEEIGIVGVGEATFPSIRNFHRLLGIDEAEFLRATNGTYKLGIQFCDWRARGESYFHTFGDFGELSGSRAVWGQHHRLGEAGLGSLGEQCLPSVMASQGRFALPGENDRYDYAYHFDAALYAAFLRKLGERRGVRRTEGRIVEVARRADGGVDRLTLDDGRVVAGDLYIDCSGFASLLLGRTLGEPFVDFSHWLPVDRAWACPTERIGTELTPYTRATALEAGWAWRIPLQNRTGNGHVFASRHIDEDRVRAQLLQQLDGPALAEPRLLRFQTGHRKRAWVHNVVALGLAGGFLEPLESTSIFLVQWGLGRLIDLLLSGAPFTEQVVADYNGEVGRQFERVRDFIILHYCLSARRDSALWRAMATMELPDTLAFKLHAWRQAGALHQYDLEGFDATSWLAIHAGMGHWPERADPTLGDVERAEALRGLQWRRECIASAVAAMPKHDACLRGMLGR

SEQ ID NO: 82539 - protein, 533 aa, Xanthomonas axonopodis
  REGION 1..533: note = tr|A0A2S6Y2K6|A0A2S6Y2K6_9XANT Tryptophan halogenase; OS = Xanthomonas axonopodis pv. begoniae OX=473403; GN = XabCFBP2524_14985 PE=4 SV=1
MGMWPVERGQLAPFAYSSAVLAQECIGMIPAPLRNIVIVGGGTAGWMAAAAFARVLGPTFKVQLIESEQLGTVGVGEATVPHIKAFNNLLGIDEAEFVRQTQGSFKLGIEFVDWQRPGSTYMHGFGTQIGHPLGLLPFHQYWIKQHARGKAQPLGAYTLNTVAAARGKFMTSAGDVPTNSPLANIAYAYHFDATQYAHFLRRYSQQRGVARIEGLVEHVQLHPESGYVQSLQLASGQTVHGDLFIDCSGFGGLLIEQALHTGYHDVTHWLPCDRALAVPCEKVGPPTPYTRSTARAAGWQWRIPLQHRTGNGYVYCSAHISDDEAAATLLANLDGKPLADPRPLRFTTGRRKQCWNRNVVALGLASGFLEPLESTSIHLIQSGISKLLELFPREGISPVLVQRYNDRLAFEFDRIRDFLLLHYHATERDDSAFWRHCRQMPITPELQATLDLFRDSGRFYRNAEEMFAEISWVQVLVGQGILPQGYHPLVEQVPDRDAEGFLASVAQTISHCVDVMPSHQQFIDRYCKAAALP

SEQ ID NO: 82540 - protein, 505 aa, Pseudoxanthomonas sp.
  REGION 1..505: note = tr|A0A4Q8LDH9|A0A4Q8LDH9_9GAMM Tryptophan 7-halogenase OS=Pseudoxanthomonas sp. NML171200 OX=2480816; GN = EA660_07105 PE=4 SV=1
MSASSIRNIVIVGGGTAGWMAAAAFARVLGPTYNVTLVESEQIGTVGVGEATVPHIKAFNNLLGLDEAAFVRQTQGTFKLGIEFVDWHHVGDRYIHGFGSEIGHPLGLLPFHQYWIKARHAGWAKPLGHYTLNTVAAPLGRFMTSASDVPPGSPLANIAYAYHFDAALYARFLRSYAEQRGVRRIEGIVETVHRHPENGDVLSVTLQDDTRVAGDLFVDCSGFRGLLIEQALHTGYEDFTHWLPCDRALAVPCEKVGPPVPYTRSTARPAGWQWRIPLQHRTGNGYVYSSAHLSEDEATANLLANLDGKPLGEPRPLRFTTGRRRKCWNKNVVALGLASGFMEPLESTSIHLIQSGISKLLELFPREGLSPVLRQRYNDRLAFEFDRIRDFLVLHYKATARSDSGFWRQCRDMDIPDTLQATLDLFADSGRFYRNGEEMFAEISWVQVMVGQGILPASYHPLVDQVPEVDLKGFLASIEQTLAHCAQAMPPHEAFIARACAAPAS

SEQ ID NO: 82541 - protein, 538 aa, Pseudomonas chlororaphis
  REGION 1..538: note = tr|A0A3G7JG95|A0A3G7JG95_9PSED Thioredoxin reductase; OS = Pseudomonas chlororaphis subsp. aurantiaca OX=86192; GN = C4K22_3311 PE=4 SV=1
MNKPIKNIVIVGGGTAGWMAASYLVRALQQQANITLIESAAIPRIGVGEATIPSLQKVFFDFLGIPEREWMPQVNGAFKAAIKFVNWRKSPDHSRDDHFYHLFGNVPNCDGVPLTHYWLRKREQGFRQPMEYACYPQPGALDGKLAPCLSDGTRQMSHAWHFDAHLVADFLKRWAVERGVNRVVDEVVEVRLNDRGYISSLFTKEGRTLEADLFIDCSGMRGLLINQALKEPFIDMSDYLLCDSAVASAVPNDDAREGVEPYTSAIAMNSGWTWKIPMLGRFGSGYVFSSKFTSRDQATADFLNLWGLSDNQPLNQIKFRVGRNKRAWVNNCVSIGLSSCFLEPLESTGIYFIYAALYQLVKHFPDTSFDPRLSDAFNAEIVHMFDDCRDFVQAHYFTASREDTPFWLANRHELRLSDAIKEKVQRYKAGLPLTTTSFDDSTYYETFDYEFKNFWLNGNYYCIFAGLGMLPDRSLPLLQHRPESIEKAEAMFASIQREAERLRTSLPTNYNYLRSLRDGDAGLSRSQPGPTLAAREIL

SEQ ID NO: 82542 - protein, 504 aa, Caulobacter sp.
  REGION 1..504: note = tr|A0A3Q9IL52|A0A3Q9IL52_9CAUL Tryptophan 7-halogenase OS=Caulobacter sp. FWC26 OX=69665; GN = CSW63_18135 PE=4 SV=1
MTPSPIRSVLIVGGGTAGWMTAAALAKALPKTTAVTLVESEQIGTVGVGEATIPPINTFNQILGLDEAAFMRATKASFKLAIEFVDWMGPGHRYLHPFGNFGLDIEALKFHQVWLRAHHAGWAPPIDAFNLSAQAAHLSRYAPPSKDPGQVLSSLRYAFHFDAGLYARFLRDYAEPRGVTRVEGKIASVEQHGETGFVTGVTLEDGRVLEADLFVDCSGFRGLLIEQTLKAGYDDWSHWLPNDRAVAMPCVTGGDGLTPYTRATADAAGWRWRIPLQHRTGNGYVYCSRDISDEDAVARLRATLDGEPMAEPNFLRFQAGRRKAAWVKNVVAIGLSSGFLEPLESTSIHLIQAGITKLLALFPDRGFDPVEIAEYNRLTALQVELIRDFIILHFKANARSEPYWVRAREMDIPESLQRKIDLFAASGRLFPTDLDLFAEPSWIAVLLGQGITPRRHDPLVDAFDEAFLKSQLSRLAGLIRQTAEALPTHEQFIARYCASPEFKA

SEQ ID NO: 82543 - protein, 496 aa, unidentified
  source 1..496: note = Massilia namucuonensis
  REGION 1..496: note = tr|A0A1I7M701|A0A1I7M701_9BURK Tryptophan halogenase; OS = Massilia namucuonensis OX=1035707 GN=SAMN05216552_10712; PE = 4 SV=1
MPIAYKRIVVVGGGTAGWMAAIGLATALPGSTVELVESEAIGIVGVGEATFPMLREFHNRHRIDEADFLRATNGTFKLGIEFRDWRTKGQRFFHTFGNFDDLTGPACLWGQYRRVNDPALGPLSEQCLPSVMASQGRFAPPPAEQPNLYSYAYHFDANLYAGFLRGIALKRGARRTEGRIVEVKRRADGGVDQLKLEDGRVVAGDLFIDCSGFVSLLLGRALEEPYVDFSRWLPVDRAWAVPSEPSGPGLTPHTVATALEAGWTWRIPLSNRIGNGHVFASRYIDEERARTQLLEQLDGPALAEPRLLRFTTGHRERFWVHNVVGLGLSSGFLEPLESTSILLIQRGLEKMIELLRPGARPAAAAVANYNKGMTRVFERIRDFIILHYCLTERRDSQLWRDMASMELPETLDFKLHAWRQTGSLNMNGEEGFEATSWLAIHAGMGNWPVRADPLLAEVPFEVALQALRQRRDHYAAVVAAMPTHDAFLRRIMRSNN

SEQ ID NO: 82544 - protein, 501 aa, Sphingomonas sp.
  REGION 1..501: note = tr|A0A0Q4J9V7|A0A0Q4J9V7_9SPHN Tryptophan halogenase; OS = Sphingomonas sp. Leaf25 OX=1735692 GN=ASE78_14605 PE=4; SV = 1
MNDQAIRSIVIVGGGTAGWMAASTFARLLGPDYCEIHLVESDAIGTVGVGEATIPQMATFNRMLGIDENEFLRETKGTFKLGIEFVDWTRIGHRYFHPFGSYGVNMNGISFHAYWLRLHALGEVPAIEPWSLQAMASADAKFMRAIDAGNSPLSDIPYAFHFDAGLYARYLRRYAEARGVVRHEGKIERVELRPENGFIDAVVLDDDRRIEGDLFIDCSGFRGLLIDQTLGAGFVDWSHWLPCDRAVAVPCAGGERLDPFTRSTARAAGWQWRIPLQHRIGNGHVFSSAHMSDDEATAILLANLDGEPLADPRFVPFRTGHRDRVWIKNCVAIGLSSGFLEPLESTSIWLIQSGLSRLMAMFPDRRCDPAEVARYNRILATEYAEIRDFLILHYHATERDDSAFWNHCRTMDIPERLAEKMRVFQSRGRTFRENEELFNDTSWFAVMQGQGLRTNGHDPIADTLTLDETRERLRHIREAIAASAAYMPTHREFIRANCQAG

SEQ ID NO: 82545 - protein, 538 aa, Burkholderia ambifaria
  REGION 1..538: note = tr|B1Z1A6|B1Z1A6_BURA4 Tryptophan halogenase; OS = Burkholderia ambifaria (strain MC40-6) OX=398577; GN = BamMC406_5264 PE=4 SV=1
MSNPIKNIVIVGGGTAGWMTASYLVRALQQQANITLIESAAIPRIGVGEATIPSLQKVFFDFLGIPEREWMPQVNGAFKAAIKFVNWRKAPDSSRDDHFYHLFGNVPNCDGVPLTHYWLRKREQGFQQPMEYACYPQPGALDGKLAPCLADGTRQMSHAWHFDAHLVADFLKRWAVERGVKRVVDEVVDVHLDERGYISSLSTKEGRTLEADLFIDCSGMRGLLINQALKEPFIDMSDHLLCDSAVASAVPNDDTRDGIEPYTSAIAMNSGWTWKIPMLGRFGSGYVFSSKFTSRDQATADFLKLWGLSDNQPLNQIKFRVGRNRRAWVNNCVSIGLSSCFLEPLESTGIYFIYAALYQLVKHFPDTSFDPRLSDAFNAEIVYMFDDCRDFVQAHYFTTSRDDTPFWLANRHDLRLSDAIKEKVQRYKAGLPLTTTSFDDSMYYETFDYEFKNFWLNGNYYCIFAGLGLLPDRSLPLLQHRPESIEKAEAMFASIRREAERLRTSLPTNYDYLRSLRDGDAGLSRSQRGSTLATQEIL

SEQ ID NO: 82546 - protein, 505 aa, unidentified
  source 1..505: note = Glycocaulis sp.
  REGION 1..505: note = tr|A0A550KMC7|A0A550KMC7_9RHOB Tryptophan 7-halogenase OS=Glycocaulis sp. ZYF765 OX=2518983; GN = FKB34_04000 PE=4 SV=1
MRDPDAITKVVIVGGGTAGWMAAAALSRMSGSGLMEVTLVESDAIGIVGVGEATIPPIRHFNEIIGIDERDFIRATQGAFKLGIEFRGWTRPGHRYIHPFGPYGADIGAVKFHQHWLRMRAVGRAADIEDYNLCAVASRQGRFGPVAPQARSPLAQLHWAYHFDASLYAKYLRAFSEAHGVVRREGRITRVHQRAEDGFIEAVELESGERVEGELFIDCSGFRGLLIEQTLKAGYEDWTGWLPCDRAMAVPCAHGAEGLTPYTRSTAREAGWQWRIPLQHRVGNGYVYSSAHISDDEATATLLASLEGEAQADPRPLRFTTGQRKSAWVKNCVALGLASGFLEPLESTSIHMIQTGITRLLHLFPDRGFDARGIAEYNRLTARHAAQIRDFIILHYHANQRAGEPLWDACRTMAVPDSLQRRLDLFRLKGRISRDEDELFAEPSWLAVYLGQEVVPEGWDPIADAAPADDIAAALEQVRNAVLAGTASMPLHSDFIARHCRAHAA

SEQ ID NO: 82547 - protein, 500 aa, Amycolatopsis japonica
  REGION 1..500: note = tr|A0A075UT37|A0A075UT37_9PSEU Tryptophan halogenase; OS = Amycolatopsis japonica OX=208439 GN=AJAP_16200 PE=4 SV=1
MSAETAGFDVVVVGGGPCGSAVSTLVAMQGHRVLLLEKEKFPRYQIGESLLPATVHGVCRLLGVSEELDKAGFMLKRGGTFRWGRNPEPWTFSFGISSKFVSEASTAYQVERMRFDQILLDNARRRGVEVREESSVADVIEDADGRVCGVRYTDADGVTHEVSARFVVDSSGNGSRIHKKVGGQRRYSEFFRNLALFGYFEGGKRLPAPNEGNILAAAFDSGWFWYIPLTDTLTSVGAVLHPDALERAQGDKEQALLDLIAECPLIADYLADARRVTSGPYGEVRVRKDYSYIQEKFWRPGLILAGDAACFIDPVFSSGVHLATYSALLAARTINTVLAGTAGETESCEEFEARYRAEYARFHDFLVAFYDMHEDESSYFWRAKKVTGNAASDVESFVELVGGGSSGEGALIDAKAYLGKRAPAFQELSDAVERPVLVAGEDRDLLKTELARSVSREGTRIQVQASLGANADERTPVRDGGLVPSADGMHWIRPVQQQAS

SEQ ID NO: 82548 - protein, 497 aa, Altererythrobacter sp.
  REGION 1..497: note = tr|A0A420EE99|A0A420EE99_9SPHN Tryptophan 7-halogenase OS=Altererythrobacter sp. HN-Y73 OX=2320269; GN = D6851_14360 PE=4 SV=1
MHYVIAGGGAAGWITAAVLSRYLSAPSTRITLIESEDIGIIGVGEATVPVIGELNRLLDIHEPDFVAATNGTFKLGIEFVDWGETGRRHFHGFGDYGEPIAALSPHHHWLRLHRQDNTIPPLDDWSMPWAAASQDRFAPHEAMQGEAAEFRHAYHFDATLYAAYLRKIAEKHGVKRVEGRILHAARHSETGFVTHLDLADGQRITGDIFIDCTGFASLLLERAMNVGFRDWSHWLPCDRAATISSARAGRLTPFTRSTARTAGWQWRIPLQNRTGNGHVYASSFLSDDEATARLFDGLEGEALGEPRMLRFTPGRRERFWEGNVIAIGLAAGFLEPLESTALQLIQTGAARIIELLPGRQPEPALADEYNRRTTLEYERIRDFIIAHYCRSCRSEPFWRHVAAMDLPDTLQHKLALWGASGHIALYDMESHREPSWVSVLIGQGVLPRAYDPRADMIPPDRLTNLMKQRRAYLAQAARKMPCHDYFIDKTCAADQRL

SEQ ID NO: 82549 - protein, 503 aa, Novosphingobium sp.
  REGION 1..503: note = tr|A0A2D5HC67|A0A2D5HC67_9SPHN Tryptophan halogenase; OS = Novosphingobium sp. OX=1874826 GN=CMH85_09670 PE=4 SV=1
MTETSFRIVILGGGTAGWMSAAALARFVPPGYSITLIESDAIGTVGVGEATIPPIRLFNEALGIDEADFLRETSASYKLGIEFAGWLRDGHSYMHAFGAVGRQHGLLPFRHYWARASAVGNARPLGHYSANEIAARTGRMATGVSGPGFPEVPWAYHFDAGLYAAFLRRHAEAMGVVRHEGKVARVVRGDNGDIAAVETDDGRSFEGDFFIDCTGFRGLLIEEALETGYEDWSHWLPCDRAVAAPCSAAGPFTPYTRSIARKAGWQWRIPLQHRIGNGLVYCSEYLSDDEATATLTDNLEAPATADPRILQFVTGRRCKTWNRNVLAVGLSGGFMEPLESTSIHLIQSTITRFLTVLPSGPANDAVRDGFNRRCAEEFERIRDFLILHYKTNQRVGEPFWDHFRTMPVPDSLEARIAEYREGCHIQPGADELFTEVAWFQVLAGQGVVPKRWNPIANRLSPDELGGFLGAVEKACIETVRPMPLHMDFLAARCAARAEPETVR

SEQ ID NO: 82550 - protein, 493 aa, Sphingomonas sp.
  REGION 1..493: note = tr|A0A0Q4J1L7|A0A0Q4J1L7_9SPHN Tryptophan halogenase; OS = Sphingomonas sp. Leaf25 OX=1735692 GN=ASE78_03165 PE=4; SV = 1
MSVTRVVIAGGGTAGWMAAAAIARTMGRMVEVTLVESEAIGTVGVGESTIPPLVTYNRLLGINEAEFMAATAATFKLGILFDGWKTADSRYFHSFGTTGRDHWAAGFQHYWLNGLTRGHAQPYDDYCTELVAALQGRFAHLPGDATNYAYQLDSGRYAQFLRAMAERDGTRRIEGRIAQVELDGETGDIAALQLDGDRRFPGDLFLDCTGFRALLIEGALHAGYDDWTHWLPCDAAIALQTDSVAPPVPYTRAMAHDAGWQWRIPLQHRVGNGIVYCSRYLDRDAALDRLVNNVEGKVRTDPNFLRFTTGARRRQWHRNCVAIGLSGGFMEPLESTSIHLIQRAVLRLLRLFPQARVSPADVAEFNDQQLQDMEQIRDFLILHYKATDRRDSPFWRQCSAMDVPNSLAQKIDLFRQTGRVFRRNEELFGENSWVQVMMGQGIVPERHHPIAARLTDDELDRLLSMVRRQVADTVATMPPHGDYLARYCPADRP

SEQ ID NO: 82551 - protein, 496 aa, Sphingomonas sp.
  REGION 1..496: note = tr|A0A0Q4J7M0|A0A0Q4J7M0_9SPHN Tryptophan halogenase; OS = Sphingomonas sp. Leaf25 OX=1735692 GN=ASE78_14615 PE=4; SV = 1
MQAPLIRRIVIVGGGTAGWMTAAALSAKLGSGVAITLIESEAIGTVGVGEATVPHIRHFNAALGIDEADFLSRTNATFKLGIEFRDWGRIGDSYIHPFGAYGAPIDGVDFHQHWVRLHKAGRAAPFEAFSLPIRAARADRFAHPDPDPHSLLSTYSYAYQFDAGLYGRYLRAFAEARGVMRQEGRVVDVALRDDGFVESVRLDDGRTVGGDLFVDCSGFRGLLIEQALHAGYDEWTRWLPCDRAIAMPCATTGPISPYTRATALSAGWAWRIPLQHRVGNGHVYSSGFIDDDAALTALLAGLDGPPIAEPNRLRFTTGRRRRQWIGNTVAIGLSAGFLEPLESTSIHLIQLAIGRLLDLLPQGDWDPRDAAEFDRLMAREYDRVRDFLILHYHATERDDSPFWNHCRTMDVPDSLATQLALFRERGVVAPYADGMFLEPSWLAVYLGQRVVPHRVDPRVLTTGEGEAAALLAAMASRYGAAADGLPGHAAALGLAA

SEQ ID NO: 82552 - protein, 533 aa, Bdellovibrio bacteriovorus
  REGION 1..533: note = tr|Q6MN71|Q6MN71_BDEBA Tryptophan halogenase; OS = Bdellovibrio bacteriovorus (strain ATCC 15356 / DSM 50701 / NCIB 9529 / HD100) OX=264462 GN=prnA PE=4 SV=1
MSTLSEHIDNAFDLSYLNFPKCPPTDIKTIGILGGGTAGYLAALALKKYHPEVEVTVIESSKIPVIGVGESTTTEIVPFLHRGLEIDPAEFFREVEPTLKFGIRFDWGCPGDYKFNFSFFAGHQYESYYYENDIKNSNWPSVLMNENKIPVIRNKNGTLTSFLASIPFSYHIDNKNLIRFLNKEVKSRGIDILDAEVHEVKLDERGYVASLESKEGHSLSYDLYIDCSGFRSKILGQALKTEFTPFTDTLVTDRALTFDMPNKDVVDCYTSVITMNNGWCWKIPMRTEDHYGYVFSSKFCDEETALAEARARFGHFEKYKMVEFRSGRHTQAWVKNVFSLGNSYGFIEPLESTAIQTAVHSINVLCRLMPKTLDDQISITGINNEIAVTWDTFRWFVGMHYKFNKKLDTPFWKHCREKTNIGHAQTIVNLFNQRPPLSAGNFGSNSQFTATEALVFNSYSYDTLIFGQKEVYKPLAAPEMSKEEYFGKLKSYQELTSRSLSLFELFKGDHLFEDEILEQLFNDTDTWIMEADV

SEQ ID NO: 82553 - protein, 510 aa, Caulobacter sp.
  REGION 1..510: note = tr|A0A3Q9IIQ4|A0A3Q9IIQ4_9CAUL Tryptophan 7-halogenase OS=Caulobacter sp. FWC26 OX=69665; GN = CSW63_18275 PE=4 SV=1
MQDHRIRKLVIVGGGTAGWMAAAALRRHFHGGPLEITLVESEAIGTVGVGEATIPTIRGFYQQLGLSDIEVMRATQATCKLGIRFNGWLREGASFIHPFGHFGQDLRGVPFHHYWRKLAQAGEPTDIADYSLGASLAAAGKFMAPPRNPTSTLSIFDWALHFDAGLFAQLMRRVAEDNGVRRIEGKITKVNLRPDDGFVASLDLENGETVEGDLFIDCSGFRGLLIEEALQTGYESWSDLLFCDRAWAVQSEGLDNPPPYTDVTAHSAGWRWRIPLQHRYGNGYVFSSRHIRDEDALAELKAAVPDPLLHEPRLIRFNPGRRKQVWNKNVIALGLASGFLEPLESTSIALIETGIEKIKALFPDRDCAPELADEFNDWSRREMERVRDFIILHYWANKRGDAAFWRDCNAVTLPDTLQRKIDLFLGRGHFVRYRWEMFAPPSWMAIYAGFEMLPQAVDPSLDGVDPKALSAPLSEMRKAVREVVASAPPHQAFLDQYCRPAPVSAPSAAE

SEQ ID NO: 82554 - protein, 390 aa, Myxococcus xanthus
  REGION 1..390: note = tr|A0A4Y6CNQ4|A0A4Y6CNQ4_MYXXA Tryptophan halogenase; OS = Myxococcus xanthus OX=34 GN=BHS05_05150 PE=4 SV=1
MSEASYDVAIIGGGPAGAAMAVALRDLAPFLSVVMLERTDYDTHRSGETLSPDLRIPLSRLGVWSSFLRDGHLASRGTSSCWSRAEPRVQDTQMSPWGSAWHLDRARFDERLSLEAARQGVRVLRLTTLLDVESIAKEGYRLHLSQRKTGALTLRARFVVDATGWKATFAMTQGAQRRIRDRCFTVHGAFQLRPGESFPTDALVESCPEGWWHSARLPSDCVAVTLVGDGDSLHGLRWATPEPWAALLGQAPVTQARLAACDFAGEPLVAAPVLVGELDQMHGERWLAVGDAACTHDPLSAQGIFSALDSALLAAEALEQYLRGEVDALCAYEQTLHLRFNEHLHRRSSTYREEQRWPDAPFWKNRHTAFPALTPAAEQRSAPAPTGLAP

SEQ ID NO: 82555 - protein, 500 aa, Pelomonas puraquae
  REGION 1..500: note = tr|A0A254NEI0|A0A254NEI0_9BURK Tryptophan halogenase; OS = Pelomonas puraquae OX=431059 GN=CDO81_13790 PE=4 SV=1
MSPHLGPPRRIVILGGGSAGWMSAAALATGLRGAEVTLVESEVIGTIGVGEATFPSIRNFNQLLGIDEAAFLAATGGSYKLGIQFCDWRRPGEHYFHTFGDFGPLSGPMALWGQYRRLDARCDGGLGDFCLPTVMARHGRFRLPDAGDGLGARYTYAYHFDATRYGHFLRQLAETRGARRVEGRVVDIARRPDGGVRALRLADGRDIDGDLFIDCSGFASVLMGQTLAQPFVDYSHWLPVDRAWAVPAERAPGPLLPYTRSTAMEAGWCWRIPLQDRTGHGHVFSSRHIDEDRARAQLLAQLDAPPLSEPRLLRFQTGHRERFWQHNVVAIGLAGGFVEPLESTAIFLVHNALGRLIPLLTQPDPQGGAPAHFNAQQTRQYQRIRDFIILHYCLSERRDSAFWQHMTGMPLPETLAYKLHAWRETGLLHNYDDEAFDETSWLAIHAGMQHWPQRRNPWLDDVPAPAAAHLLAERHAAIAQLAASMPPHAEFLRERIGARA

SEQ ID NO: 82556 - protein, 420 aa, Shewanella sediminis
  REGION 1..420: note = tr|A8FQ05|A8FQ05_SHESH Tryptophan halogenase; OS = Shewanella sediminis (strain HAW-EB3) OX=425104; GN = Ssed_0315 PE=4 SV=1
MPASSSTPETLTDIDVAIIGAGPSGCIAASLLHQQGKRVIVIEKLHFPRFSIGESLLPCCMQWLEEANMLDAVNQAGFQFKNGAAFRYKEQYTDFDFSDKFTPGPGATFQVERADFDKLLADTAAEQGVDIRYGETVTTVDLIGKPRLTVTDANGEAYLIEAEYLLDASGFGRVLPKLLELEKPSTLANRSAIFTHIQDNIGKKEVDDRPFDRNKILISVHPQNRDIWYWLIPLSPDRCSLGVVGEPHLMGNSDLDLEVILMDMVNQEPGLKTLLADAEILRECAELKGYSANVSTLATDKFALLGNAGEFLDPVFSSGVTIAMQSASMATKCVVRQLNGEKIDWQSEYAKPLMRGVDTFRTYVEAWYDGRFQDVIFYDAPDNKIKQMVCSILAGYAWDEANPLVAESEKRLNLIVELCR

SEQ ID NO: 82557 - protein, 496 aa, Pseudoalteromonas arctica
  REGION 1..496: note = tr|A0A290S718|A0A290S718_9GAMM FADH2 O2-dependent halogenase I OS=Pseudoalteromonas arctica A 37-1-2; OX = 1117313 GN=prnA PE=4 SV=1
MKPIKHVVIAGGGTAGWITAALLNKVLGKVINITLIESSAIGTVGVGEATIPPIIQLNNALGINEQDFINATNASIKLGIEFENWKTPGHSYMHAFGSLGKNFPFCDFYNFWLKGQITGCEDDLWDFSLNYQAAKQHKFAPLNTIPNTQLPGLSYAYHFDATLYAEYLKKLAISRGVKHIDAKISHVEQCDTGNVKSLALDNDSQISGDLFIDCTGLRALLIEQTLNTGFIDWSHYLPCDSAVAVQTKSTHELKPYTRSIAHSAGWQWQIPLQNRIGNGLVYCSRYLSDDDAKQLLLKSLPAEPITEPRIIKFKTGRRLKQWHKNVVSVGLSSGFLEPLESTSIHLIQTAVTRLIKLFPHNGISDALVTEFNKQSVIELEHIRDFIILHYKLTERQDSPFWRQCMQMDIPNSLTHKLNLFKHTGKVIREDDELFAEVAWQQVMIGQGLIPDDYNSIVDSLSDDQLSDLFSTLKTLISSTVTQLPTHQNFLASIKKV

SEQ ID NO: 82558 - protein, 525 aa, unidentified
  source 1..525: note = Gammaproteobacteria bacterium
  REGION 1..525: note = tr|W2UEQ0|W2UEQ0_9GAMM Flavin-dependent tryptophan halogenase RebH OS=Gammaproteobacteria bacterium MOLA455; OX = 1411685 GN=rebH_2 PE=4 SV=1
MNHKINRVVIVGGGTAGWLSAGVIAAEHCIGSKNGCREGSFQLTLVESPDIATIGVGEGTWPSMRNTLQKMGISETEFFRECSASFKQGTLFRGWRTGEDDIYTHPFTAPQSYTEVNLAPHWQTAREQINFAQAVSPQSALFADKLAPKKISTPEYAFNVNYGYHLDAAKFAEFLRKHCVEKLGVTHVKANVIGINSAENGDIASIATDSHGNVEGELFIDCSGSRALLLGEHFGIPVCSKSDILFNNNALAAQIPYTNENDPIESCTLSTAQSAGWIWEIGLPTRRGIGHVYSSDHNTEERASEELLNYIASTVSQQAAAAATLRKVQFSPGHRAKFWHKNCVAIGMSAGFIEPLEASALVLVELSAAMIAEQLPANRGVMDLVAKRFNDKFLYRWDRIIEFLKLHYVLSQRRDTEYWRDNCEASSIPERLTDLLTLWRHQSPWHRDNNNVDDMFPSASFQYVLYGMDFETMPSQTQRRSEQAEGLRAGHLFQENMARTKQLQASLPSNRDLINKIYTFGFQKI

SEQ ID NO: 82559 - protein, 513 aa, Pelomonas puraquae
  REGION 1..513: note = tr|A0A254N597|A0A254N597_9BURK Tryptophan halogenase; OS = Pelomonas puraquae OX=431059 GN=CDO81_18290 PE=4 SV=1
MNTSKPFNRVVIAGGGTAGWMMAALMSKLLGKQLDIKLVESEEIGTVGVGEATIPALLSFHNLLGINEAEFMAATNATFKLGINFEGWKNIGQDYFHSFGSTGNDHWSAGFQHFWLKGQRDGLARTYTDYNPETVAAFANRFAHVPRSGLNYAYHLDAGRYAKYLRAMSEAHGVQRIEGKIGAVLMDGPQGRDGPITALQMQDGSRIDGDLFIDCTGFRSMLLGEALGVGYEDWSYWLPCDRAVAVQTASVRDAWPYTRSIAHPFGWQWRIPLQHRVGNGLVYSSKEMSDADAPEVLKKNVEGELITQPRVIKFLPGQRDKVWHRNCIAVGLASGFVEPLESTSIHLIQRAAIRLMQTFPSGGIQQADVDEFNAQSKRELEHIRDFIVLHYHVNERTDSALWKHVREMDILPSLHHRIERFRESARVFRPSDELFAENSWVQVMMGQGITPERYHPVADLMGRDELTRFLGDIHLKVSRTVAALPGHQAYVEQLCAPYRQASVSQLAAMPARA

SEQ ID NO: 82560 - protein, 502 aa, Nostoc sp.
  REGION 1..502: note = tr|A0A2I8A3Z3|A0A2I8A3Z3_9NOSO Uncharacterized protein OS=Nostoc sp. CENA543 OX=1869241 GN=CLI64_06600; PE = 4 SV=1
MRVEKIIQNVVVFGGGSAGFLSALALKVKMPFLNVVVVHSTNIPIIGVGEATTAWIPWFLHQYLGLNREQFYEETQPVWKLGIKFIWGDPSQSHFNYPFVTHLADKLAVLQKSTAYYCVDSTTDSSIYSLLMEQCKSPCFRRQDGEFVIDERFGYHIENSSFVAYLERRALELGIKIIDQPVVDITVAENGDIHQLRLQDGKSVTGDLFIDCSGFRSTLLGEILQEPFCSFATSLFCDSAVTGTWMRDDSIYPFTTAETMQAGWCWQIDLQDRVNRGYVYSSAFISDDAALQEMKQKNPLMSDDFSQIRFKSGRHQRFWVQNVVAVGNASGFVEPLESTGLHMIGETIKCVCDVLIDSDQRPTPALINLANRAIAQKWDDIRDFLSIHFKFNHYVESEFWQHCQQHTDIGEAAAIVDFFQNNGPSPIGQILLRPNSVFGYNGYLNLLMGQRVATEYQNKHDTLDLDYWRQVKNYFIKNCDNALSIHEAIQVVKERKCQWLSS

SEQ ID NO: 82561 - protein, 503 aa, unidentified
  source 1..503: note = Massilia namucuonensis
  REGION 1..503: note = tr|A0A1I7FJJ4|A0A1I7FJJ4_9BURK Tryptophan halogenase; OS = Massilia namucuonensis OX=1035707; GN = SAMN05216552_100283 PE=4 SV=1
MQNQLIKNVVIVGGGTSGWMTAAALSTVLRGRYDIRVVESDEIGIVGVGEATIPMIQRFNKVVGIDENEFVRATQGTFKLGIEFVNWGKLGERYMHGFGRLGQDLWTVGFDQYWHKMNALGKAAGLENYSITRMASKANKFMPPNAEMQNSPLGDIAYAYHFDASLYARYLRKLSEERGVTRIEGKITHATQREGDGHVDAIVLESGVRIEGDLFIDCSGFRGLLIEQTLQTGFEDWSHWLPCDRAFAVPCESAPVLTPYTRATAHRAGWQWRIPLQHRTGNGHVFSSAHVSEDEAAATLLANLDGKPLADPRLLKFKAGMRKLSWNRNVVAIGLASGFMEPLESTSIHLVQDAIQRLIDFFPDRGFSQTDIDEYNRQNRFHYERIRDFIILHYKLNQRDDSQFWKDCAAMPIPDTLRAKMDLYRTHGRIVRVDNELFTEVGWLQVLEGQNMPTDGYHPLVDIQTEADIAEYMDSVREVIGKCVNVMPDHAAYIARFCAAPKM

SEQ ID NO: 82562 - protein, 521 aa, Xanthomonas axonopodis
  REGION 1..521: note = tr|A0A2S6Y3V8|A0A2S6Y3V8_9XANT Tryptophan halogenase; OS = Xanthomonas axonopodis pv. begoniae OX=473403; GN = XabCFBP2524_13860 PE=4 SV=1
MPDTTPSDPQQRPVRRVVIAGGGTAGWMAAAALSKLLGRHLQITLVESDEIGTVGVGEATIPSLVTFHRLLEIDEAVFMAATQATIKLGIAFEHWRDVDQHYIHSFGHAGTDHWSAGFQHFWLKGRQRGVARDFGDYCLELRAAQEGRFAHLPNGGMNYAYHLDAGLYARFLRRFSEGFGVQRIEGRIGQVETDPESGFLTALTLHNGARVEGDLFLDCTGFAGLLIGKTLGVGSDDWSRWLFADSALAVQTESVGPPVTYTRSRADQAGWMWRIPLQHRVGNGIVYSSRYMDQDGARAVLERNLTGRALTEPRPLRFTPNQRHRVWEKNCVALGLASGFLEPLESTNIHLIQRGIIRLLQTFPQVINAVDIAEYNRQAAQEITHIRDFVILHYHVTDRRDTPFWRDCAAMDIPDSLRHRVELFRQSGRVFHQANELFAENSWVQVMLGQGIVPQQHHPVADLMGDAELGRFLETIRTRVEAALVRLPAHADFLQRYCPAPPLPEPAARVPAPQVMATPAG

SEQ ID NO: 82563 - protein, 504 aa, Sphingomonas sp.
  REGION 1..504: note = tr|A0A0Q4IHR8|A0A0Q4IHR8_9SPHN Tryptophan halogenase; OS = Sphingomonas sp. Leaf25 OX=1735692 GN=ASE78_05180 PE=4; SV = 1
MSEAAAPIESVVIVGGGTAGWMAAAAASRYLNDGRRSITLVESDAIGTVGVGEATIPPILQFNGLLGIDEKEFVAKTGATFKLGIEFVNWGGVGERYLHPFGTIGRDFEGVAFHQHWLKHRRAGGMADFERFSMSAQAAAAHRFAAPVSDPRSPASQLAYAYHFDAGLYAKFLRERAEGQGVRRVEGRIASVERDGESGHVTALVLDDGRRVAGQFFIDCSGFRSLLLGETLGVGYRDWSHWLPCDRAIAVPSQRTDPLLPYTRATAREAGWQWRIPLQHRTGNGHVYSSGFTTDDRAQEILLANLDGAPTADPRRLSFKAGVREKLWEKNVVALGLSGGFLEPLESTSIHLIQTGISKLFWLFPDTAHAEVERREYNRLMSEQFDYIRDFIILHYKATTRADTPFWQYVRDMPIPDTLAHKIELFREKGRILRYDHDLFEVPSWVSVMFGQGIWPTGHDAVADSLDEALVAGTMERMVAAYADLAQRMPPHADHVARTAPMRG

SEQ ID NO: 82564 - protein, 511 aa, Pelomonas puraquae
  REGION 1..511: note = tr|A0A254N9S6|A0A254N9S6_9BURK Tryptophan halogenase; OS = Pelomonas puraquae OX=431059 GN=CDO81_13785 PE=4 SV=1
MQNSAKPLRKIVIVGGGAAGWMSAAALSAVLKPPYEIRLVESEEIGILGVGEATIPLISMFNGLARLDEAAFMKATQATFKLGIEFVNWGRQGERYFHGFGRVGKEPLWPVDFTQYWLRMRALGRAQPIEAYVMSAAAAQAGRFMLPRREMQNSPLADLAYAYHFDAGLYARHLRALSEQRGVRRTEGKVVRVLLDDQAGPTQGHVRAVQLESGEQVAGDLFLDCTGFAGLLIDKALGVGFEDWRHWLPCDRAWAVPSESTKPLLPYTRATAHRAGWQWRIPLQHRVGNGHVYSSQHMSDDEAASVLLRHLDAPPLADPRLIRFRTGMRHDAWARNVVAIGMSAGFVEPLESTALHLIQMGIAGLIEAFPHEGFDPTEIAEYNRRSRERYESVRDFIVLHYHLNQRQDGGFWDACAHMAVPDKLRWRMDLYAASGRLVYVDTDLFREPSWFEVMEGQNLRPRRWLPLTELQGVEETAAYLKGVSDTIANCVGVMPGHEEFVRHYCAAGAGR

SEQ ID NO: 82565 - protein, 494 aa, unidentified
  source 1..494: note = Massilia namucuonensis
  REGION 1..494: note = tr|A0A1I7KUM9|A0A1I7KUM9_9BURK Tryptophan halogenase; OS = Massilia namucuonensis OX=1035707; GN = SAMN05216552_1019115 PE=4 SV=1
MNSAYKRIVVVGGGTAGWMTAVGLATALPACKVELVESEEIGIVGVGEATFPMIRAFHKSTGIDEAEFLRATNGTFKLGIEFRDWRAKGQRFFHTFGNFDDLTGPACLWGQYRRVNAPTLGPLSEQCLPSVMASQGRFAPPPKEQANLYSYAYHFDANLYAGFLRGIALKRGARRTEGRIVEVKRRADGGVDQLKLEDGRVVAGDLFIDCSGFVSLLLGRALEEPFVDFSRWLPVDRAWAVPSEPSGPELTPHTVATALEAGWTWRIPLSNRIGNGHVFASRYIDEERARTQLLEQLDGPALAEPRLLRFTTGHRERFWVHNVVGLGLSSGFLEPLESTSILLIQRGLEKMIELLRPGARPAAAAVANYNRGMTRVFERIRDFLILHYCLTERRDSQLWRDMASMELPETLDFKLHAWRQTGSLNMNGEEGFEATSWLAIHAGMGNWPVRADPVLAEVPAAEALQALHQRRDHYAAVVATMPTHEAFLRRMLGR

SEQ ID NO: 82566 - protein, 496 aa, unidentified
  source 1..496: note = Massilia namucuonensis
  REGION 1..496: note = tr|A0A1I7LHH3|A0A1I7LHH3_9BURK Tryptophan halogenase; OS = Massilia namucuonensis OX=1035707; GN = SAMN05216552_102931 PE=4 SV=1
MNTAYKRIVVVGGGTAGWMTAAALATALPGGSVELVESEEIGIVGVGEASFPSIRAFHKLLGVDEAEFLRATNGTYKLGIEFRDWRAQGERYFHTFGDFGDLTGPHALWGQHRRVNDAGLGALHEQCLPSVMAGQGRFQAPSEHGKLFDYAYHFDATLYAPFLRKLALRRGARRTEGRIVDVTRRADGGVDQLKLADGRVVEGDLYIDCSGFASLLLGRALGEPFVDFSHWLPADRAWACPAERVGTELAPYTRATALEAGWAWRIPLRNRTGHGHVFASRYIDEDCAREQLLRQLDGPALGEPRLLRFATGHRRRVWVRNVVSLGLSSGFLEPLESTSIFLVQSGLGRMIDLLLPGVAPGESQVAAYNAGMVRQFARVRDFIILHYCLTARRDGKLWRAMMTMELPETLAFKIHAWRQSGTLYQYDEEGFDATSWLAIHAGMGHWPERADPSLRDLAPDAALRALQRRRDSLAAVVAAMPTHDAYLRDMTQQGTR

SEQ ID NO: 82567 - protein, 501 aa, unidentified
  source 1..501: note = Massilia namucuonensis
  REGION 1..501: note = tr|A0A1I7J9S0|A0A1I7J9S0_9BURK Tryptophan halogenase; OS = Massilia namucuonensis OX=1035707; GN = SAMN05216552_1010185 PE=4 SV=1
MSDTRIRKVVIVGGGTAGWMTAAPLVLRLGASCEIVLVESPEIGTVGVGEATLPSIRYTNLALGLDEADFLSKTQATFKLGIEFRDWGQVGNRFFHGFGGFGPPIENRPAYMYWLHLSRSFKDMPSYEQWSMVTAMAQSNCFAPPHDALPSITDSYSYAYHFDAGLYAAYLRDYAMLRGVARIEGMIDGVEQHPETGFITALKLRDGRRVEGDLFVDCSGFRGLLIEGVFKAGYQDWSAMLPCNSAQAVPCAKAAQLTPYTTSTAKSSGWTWRIPLQHRTGNGHVYCDGFTTDEEAGRVLLEGLDGEAQGEPRQLRFTTGRRRKSWIKNCVAIGLSSGFLEPLESTSINIIEQAVGWLLQYFPHRDCRPELADEFNRLVAERFEYVRDFIVLHYKVTQRSDSAFWRYCADMPIPDTLRHQIELFRETGRIVVYDPHGFSVDSHVSLLMGLGVVPKVDDPIIDTLRFDQLVRHFASRREIITQTVKAMPEHAHYISRHCRAP

SEQ ID NO: 82568 - protein, 506 aa, Sphingomonas sp.
  REGION 1..506: note = tr|A0A0Q4IED9|A0A0Q4IED9_9SPHN Tryptophan halogenase; OS = Sphingomonas sp. Leaf25 OX=1735692 GN=ASE78_05150 PE=4; SV = 1
MSPAADHDAPHLRRIAIVGGGTAGWMAAAALSRVLKGSVAIALVESDAIGTVGVGEATIPPIRAFNALLGIDEDAFLRATGGTFKLGIEFAGWGDVGERYFHPFGVYGVDVGAVPFEALWHRLRAEPGARPLSAYSICAAAAATGRFQRPRTDPGNTPLHQIGHAFHFDAARYAAYLRRLAQAAGVVRHEGRIATVERGGDRIDAVLLDDGRRIEADFFIDCSGFASLLLGGAMGSAFLDWSHWLPNDRAVAVPSTAIPAPPPYTRATAHGAGWQWRIPLQHRTGNGVVFASAHLDENAATDLLLANLDGTPLGDPRVLRFKAGRRAESWVGNCVALGLSAGFLEPLESTSIHLIQAGIARLLEMLPARDPDPAMVRRYNRLMGEEFDRIRDFIILHFHATRRDDTPYWRHLRTMAIPDSLAGRIAEYRATGRVYRDGDELFTRTSWLAVLEGQGVRATGVDPLAMTLSLDEARARLDRIAQVTQAAADRMPTHADFIAAHCQAAS

SEQ ID NO: 82569 - protein, 533 aa, Streptomyces sp.
  REGION 1..533: note = tr|A0A1L7GAQ6|A0A1L7GAQ6_9ACTN Tryptophan halogenase; OS = Streptomyces sp. TN58 OX=234612 GN=BSL84_04140 PE=4 SV=1
MTSTDTRLQKVVILGGGTAGWMTAAYLGKALQGTVDITVLEAPTIPRIGVGEATVPNLQRSFFDYLGIAEDEWMRECNASFKMAVRFVNWRTGGQGESTARELPGGGPDHFYHPFGLLPDYDQTPLSHYWFKRKYEGRTTEPFDYACFREPPVMDAMKAPRWLDGRPATRYAWHFDAQLVADFLRRFATEKQGVNHVQDEMVRVEQDSRGYVTTLHTKGGLALDADLFVDCSGFRGLLINQAVQEPFIDMSDHLLCDSAVATAVPHDDEANGVEPYTSAIAMSSGWAWKIPMLGRFGTGYVYSSKFTDQDTATREFADMWGLDVEETKFNHIRFRVGRNRRAWVKNVVSIGLSSCFLEPLESTGIYFITAAIYQLAKHFPDKTFNEGLIDSFNHEIEVMFDDTRDFIQAHFFYAPRNDTPFWQANKKLVLPDNIKQKISAYKAGLPINSPITDESTYYGNFEAEFRNFWTNGSYYCIFAGLGLEPDAPLPTLAHRPESVAGAEPLFDTVKRQQQNLLETLPSAYDYLRHLHGA

SEQ ID NO: 82570 - protein, 495 aa, unidentified
  source 1..495: note = Massilia namucuonensis
  REGION 1..495: note = tr|A0A1I7M7K3|A0A1I7M7K3_9BURK Tryptophan halogenase; OS = Massilia namucuonensis OX=1035707 GN=SAMN05216552_10816; PE = 4 SV=1
MKPPFKRIVVVGGGAAGWMTATALATALKGGTVELVESEEIGIVGVGEATFPSIRNFHRLLGIDEAEFLRATNGTYKLGIQFCDWRARGESYFHTFGDFGALSGSHAVWGQHHRLGEAGLGALGEQCLPSVMASQGRFALPGENDRYDYAYHFDAALYAAFLRELGERRGVRRTEGRIVDVARRADGGVDRLTLADGRVVAGDLYIDCSGFASLLLGRTLGEPFVDFSHWLPVDRAWACPTERIGTELTPYTRATALEAGWAWRIPLQNRTGNGHVFASRHIDEDRVRAQLLQQLDGPALAEPRLLRFQTGHRKRAWVHNVVALGLSGGFLEPLESTSIFLVQWGLGRLIDLLLSGAPFTEQVVADYNGEMGRRFARVRDFIILHYCLSARRDSALWRAMATMELPETLAFKLHAWRQAGALHQYDLEGFDATSWLAIHTGMGHWPERADPSLGDVERAVALRGLQWRRECIATAVAAMPKHEAYLRGMLGGRER

SEQ ID NO: 82571 - protein, 506 aa, Sphingomonas sp.
  REGION 1..506: note = tr|A0A0Q4IZW9|A0A0Q4IZW9_9SPHN Tryptophan halogenase; OS = Sphingomonas sp. Leaf25 OX=1735692 GN=ASE78_03230 PE=4; SV = 1
MEQAADTAIRSIAIVGGGTAGWMTAAALAHAIPRGCTITLIESDAIGTVGVGEATIPPIRVFNQTLGIDEAEFLRETKGSFKLGIEFVDWARTGQRYFHPFGTFGKPFDLLAVHQHWLAARAGGSRVPLDELSMAWGAARHGRFAPPVGDPRSVASTFDYAYHFDAGLYAAFLRRYAEARRVERIEGAVVDVALGGDNGHIASVTLADGRQVAADLFVDCSGFRGLLIEQALGTGYEDWTHWLPCDRAVAVPCATGGEGMTPYTRSTARAAGWQWRIPLQHRTGNGYVYCSRHLSDDEAAATLLANLDGPALGDPRFLRFTTGRRTKFWNRNVVAVGLASGFMEPLESTSIHLIQAAIAKLLAFFPTRDFDPAVVDEYNRVAITECERIRDFLILHYKLTQRADAPLWRDCAAMAIPDTLAMKIDHFHSTGRLIARDMDLFGPASWLAVHIGQGNDPRGGDPLLAYATGAQTSSGFVDRLAGAIDAMARSMPGHAAYLQRIGASQP

SEQ ID NO: 82572 - protein, 415 aa, Burkholderia ambifaria
  REGION 1..415: note = tr|B1Z2X6|B1Z2X6_BURA4 Tryptophan halogenase; OS = Burkholderia ambifaria (strain MC40-6) OX=398577; GN = BamMC406_4091 PE=4 SV=1
MSEMKSNSVDVAIIGAGPSGAVAAALLRRASRSVVVLERQHFPRFSIGESLLPQSMQYLEEAGMLQAVVEAGFQFKNGAYFVYRDRMSSFDFREKFSDGWGTAYQVERAAFDDLLIRCAAEQGADVRFGHTVQAFHPGDMQRLEVVDEAGCQYSVHASFVLDASGFARVLPRLLDLEAPTGMPTRAAIFSHVEDGLPAGSTDRDKICIAVHPERRDVWFWMIPLTNGRSSVGCVADAGFLDVPQAQQESLLRELLQSEPTLSRLVGSKPFVMPVRRIAGYASNVEHLHGRGYALLGNAGEFLDPIFSSGVTIAMRSAQLAVAVLERQLRGETVDWTRDYDIALRKGIDTFRAFVERWYSGALQDIVFHEDKASDVKRMVCSILAGYAWDESNPFVREPARGLDVLAEFCRAGGLG

SEQ ID NO: 82573 - protein, 502 aa, unidentified
  source 1..502: note = Rhodoferax ferrireducens
  REGION 1..502: note = tr|Q21ZE8|Q21ZE8_RHOFT Tryptophan halogenase; OS = Rhodoferax ferrireducens (strain ATCC BAA-621 / DSM 15236 / T118) OX=338969 GN=Rfer_1114 PE=4 SV=1
MSANMLRSIVIVGGGTAGWMTAAALSNVLGDHYHIRLIESDEIATIGVGEATIPLIKDFNLALGIDENEFMRQTQGTYKLGIEFVNWGKIGDSYIHGFGKIGQDLGPIACYQYWLKMHQAGEASDLGNYSINTLAPRKSKYLRSEPEMAGSPLGDINNAFHFDAGLYAKFLRGYSQARGVVRTEGRIVQTMLRESDGFIESVVLASGEKISGDFFIDCSGTRALLIGDALKCEYEDWSHWLPCDRAIAVPCESVQPLVPYTRSTAHSAGWQWRIPLQHRIGNGHVYSSRFMSQDEATSILLNKLDGKQLAEPRYIPFVPGRRKQTWRNNCVAVGLSSGFFEPIESTNIHLIQSAIARVIRLFPNMGFQQADIDEYNAQTQFEYERIRDFIILHYKATQRDDSPFWNHCRNMEIPATLQHRISLFSSNGRVYREGQELFGDVSWVQVMHGQGIRPQGYNPLVDLRPKDEIRAYLGNIEAVIKKCVDVMPTHAEFIAKNCAAAG

SEQ ID NO: 82574 - protein, 497 aa, Pelomonas sp.
  REGION 1..497: note = tr|A0A0Q7BCF8|A0A0Q7BCF8_9BURK Uncharacterized protein OS=Pelomonas sp. Root405 OX=1736529 GN=ASC81_17960; PE = 4 SV=1
MSQTFNRIVVVGGGSAGWMTAAALVTGLKGRVAVEVVESEDIGIVGVGEATFPSIRDYNQLLGIDEAEFLRATNGSYKLGIRFGDWLEVGQDYFHTFGHFGNLFGSQTLWAQHRRMGLTEPLGQQCVPTVMAMKGRFVLPSEQAQFKYAYHFDAVRYAAFLRELAVKRDARHTQGRIADVSRRADGGVAALHLDDGRRVEGDLFIDCSGFNALLLGKTLNEPFVDFGHWLPVDGAWACPCERTGEELAPYTQATALEGGWAWRIPLQNRTGHGHVFASRFIDPDRAREQLLARLDGKPLAEPRLLRFSTGHRERFWVHNVVAIGLSSGFLEPLESTSIYLIQDGISRLMAALTAVTAGRPLNESDLALFNDGAARRFARIRDFIILHYCLTRRRDSALWRHVSSMELPETLAFKLELWRRYGVLHQYDDEGFDATSWLAVHAGMDHWPERHDPVYGEIPRERALAALDQRRQAIEASVERMPPHHFTLLKMLAERRV

SEQ ID NO: 82575 - protein, 432 aa, unidentified
  source 1..432: note = Massilia namucuonensis
  REGION 1..432: note = tr|A0A1I7LW14|A0A1I7LW14_9BURK Tryptophan halogenase (Fragment) OS=Massilia namucuonensis OX=1035707; GN = SAMN05216552_10401 PE=4 SV=1
MSDKAIRTIVIVGGGTAGWMTAAPLALKLPKTCEVVLVESAEIGTVGVGEATLPTIRHFNIALGIDEADFVRKTQASFKLGIEFKDWGHVGNRFFHGFGDFGPAIENRPAYMYWLRLSRVFKDMPSYEQWSMATMMARSNRFMPPQDELPSITDAYSSAYHFDAGLYAAYLRDYATRRGVKRIEGMIEHVEQHPETGFITALKLRDGRRVEGDLFVDCSGFRGLLIEGVYQAGYEDWSAMLPCNSALAVPCAKVDPLTPYTTSTAKAAGWTWRIPLQHRTGNGHVYCDGYTSDDEAARVLLEGLDGEAQGEPRQLRFTTGRRRKSWVKNCVAIGLSGGFLEPLESTSINFIENAVGWLLQYFPNRECRPELADEFNRLVAQRYEYVRDFIIMHYKLTDRTDTEFWRYCANMPIPDTLRHQIETFRETGRVVV

SEQ ID NO: 82576 - protein, 496 aa, Pelomonas sp.
  REGION 1..496: note = tr|A0A0Q7B699|A0A0Q7B699_9BURK Tryptophan halogenase; OS = Pelomonas sp. Root405 OX=1736529 GN=ASC81_26170 PE=4; SV = 1
MTALMLATTAYGPRLKVTVVESPQVATVGVGEGSTPWLRRFFEVLGIEEAEWMPACNATYKSGITFEGWSTRPGFERYFHPFVSMLDNLTMHPFVDNVHARLQGADVDAHPDRFFLTTRLARQAKGPRAHDNFPFDVWYGYHFDATLLGQFLARKAAERGVIHMQRHVAQVLLKENGDVDALRLNEGETLHADFFVDCTGFASLLTGKALGTAFVGFGDNLFNDAAVALPTPLNGPLESQTVSTALRHGWAWKIPLTHRQGNGYVYSSAHCSADAAETELRRHLGLLDADIPARHLKMRVGRMEKVWNRNCVAIGLSQGFIEPLEATALLYVQVTASMLVEVLEKRDLGPGAQAQFNEAMRQRFENTRDYIVAHYKTNSRTDTDYWRANAENMHLSESLQAVLMAWMSRKPLAAGLKAGRFGQGYPVVSWYALLAGMGIFPDAQDLTPPTAEQARHDLAVVDDFIARSAGNFPDHRELLANIPPGNSGKALQIYAW

SEQ ID NO: 82577 - protein, 509 aa, Pelomonas sp.
  REGION 1..509: note = tr|A0A0Q7AUN4|A0A0Q7AUN4_9BURK Tryptophan halogenase; OS = Pelomonas sp. Root405 OX=1736529 GN=ASC81_17975 PE=4; SV = 1
MRNRPLQRIVIVGGGSAGWITAAPLARMLCRPDQPDQHCEVVLVESADIGTVGVGEATLPTIRFYNQMLGIDEADFVRRTRATFKLGIEFQDWGRMGNRFFHGFGGFGPAIHNRPLWAYWLRLQALGDKLPSYEEWSTATVMARQMRFTPPTSGEPAASNAFDYAFHFDASLYGAYLRDYALRHGAERVEGTITRVETRPDDGFVAALHLDDGRRLEGDLFIDCSGFRALLIGGAMNSPYEDWSHWLPCDRALAVPSERVEPITPYTRSTARTAGWQWRIPLQHRTGNGLVYCSGYLNEDEAQRMLLDNLDAKPLDEPRPQRFVTGRRKQGWVKNVVAIGLSSGFLEPLESTSLHLIMDGVSRLTAMLPDLSFQPALADEFNRQMAYRYESVRDFIILHYKLGERRDSEFWRYCADMPIPDELAHQIELFRKTGRVAVIEPEGFAEPSWASILMGLGVYPERYDPYIDLVDPQLIRRQLHSVHGAISRTVAAMPAHADFLGRISTPPRR

SEQ ID NO: 82578 - protein, 489 aa, Sphingomonas sp.
  REGION 1..489: note = tr|A0A0Q4ILH9|A0A0Q4ILH9_9SPHN Tryptophan halogenase; OS = Sphingomonas sp. Leaf25 OX=1735692 GN=ASE78_05170 PE=4; SV = 1
MIVGGGTAGWMVAAALARHLGGAVRVRLIESAEIGIVGVGEATLPHIRQFVTRLGIDEGEFMAATDATYKLGIAFEDFGALGDRYVHPFGTFGRDLAGVGFHHFWLRTAADGHNTPIGAYSLGIAAAEACRFAVPRDDDLSLAASYGYAYQFDATKFGPFLRAFAEPLGVERTEAKVVSVDRDSASGDVTTLHLDSGEAVHGDLFIDCSGFRSLLLGQTMGEAWEDWSHWLPCDRAVAVPCASPPGEIEPYTRATAMAAGWRWRIPLTSRVGNGYVFSSAHLDEDAATAALLGAIEGPPLADPRVLRFRAGRRARSWVGNVVAVGLASGFLEPLESTSIYLVQMAIARLIELFPVDGGDDADRAEFNRLVDMEYDRIRDFLILHYHATRRTDSSFWNHVRTMDVPDTLAAKLDLWRATGRVERYGEGLFFEPSWIAVYLGQGVIPKGYDPRADIPPDAALARALQGLQGEIAASVAAMPGHARALGRRP

SEQ ID NO: 82579 - protein, 504 aa, Pelomonas sp.
  REGION 1..504: note = tr|A0A0Q7BA35|A0A0Q7BA35_9BURK Tryptophan halogenase; OS = Pelomonas sp. Root405 OX=1736529 GN=ASC81_16565 PE=4; SV = 1
MHQIDRIVIVGGGTAGWMTATALATVLRGRYQIRVVESDEIGTVGVGEATIPMIQRFNRLLGIDENEFLRETCGSFKLGIEFVNWGRLGDRYMHGFGRLGQDLWTVPFDQYWQRMHTLGRAQPLEQYCIARMAALANKFMPPRTDLGNSPLAEIAYAYHFDASLYARYLRRLSEQRGVQRIEGKITHATRRGEGAQAGHIDAVMLESGERVEGDLFIDCSGFRGLLIEQTLGTGFEDWTHWLPCDRALAVPCESVAPLTPYTRSTAHRAGWQWRIPLQHRIGNGHVYCSQHISDDEAAATLMANLDGKPLADPRPIRFKTGMRRLAWNENVIAIGLASGFLEPLESTSIHLIQSAIQQLIDFFPDRGFDATDIAEFNRHSRFHYERIRDFVILHYHLNQRDDSAFWQACAHMAIPDTLKEKIDLYRSHGRVIRRDNELFSEVGWVQVMEGQNLKPLRHHPLAELQTEQDTHDYLEGVREVIAKCVEVMPDHAAYIAQHCAAKPM

SEQ ID NO: 82580 - protein, 493 aa, unidentified
  source 1..493: note = Sphingomonas ginsenosidivorax
  REGION 1..493: note = tr|A0A5C6UFJ8|A0A5C6UFJ8_9SPHN Tryptophan 7-halogenase OS=Sphingomonas ginsenosidivorax OX=862135; GN = FSB78_09740 PE=4 SV=1
MAETLVKRVVIAGGGTAGWLAAAVLSRQLGMILDITLVESEEIGTIGVGEATIPTMRAFQGLLGIDEREFMRATKASFKLGIAFEGWTRPGDRYVHSFGTVGKSTWMGDFQHFWLAAKARGDAGDIGDYCYELQAAEAGRFAIDERSQLNYAYHLDAGLYARFLRARAEADGLKRVEGRIAQVDQDPDNGHIRALVLESGERIEGDLFIDCTGFAALLIGKTLDVSYEDWGHWLPTDSAFAVQTAAVEPARPYTRAIAHGAGWRWQIPLQHRVGNGLIYASAHLSDDAARARLLDAVEGEVLIEPRKIRYRTGRRLRVWDKNCIALSLASGFVEPLESTTLHLIMTGLTRLMQQFPSEGISPAVVNRYNDQSRRELEAVRDFIVLHYHLNHRDEPFWRERRAMAIPDTLRARIALFEDAAQTYQGADDLFRTDSWLQVLLGQGVQPRAHHPMAWIMPRDQLATALRDIKRNIAAAVSQLPQHQAFLDRYCAPA

SEQ ID NO: 82581 - protein, 454 aa, Amycolatopsis japonica
  REGION 1..454: note = tr|A0A075UYC8|A0A075UYC8_9PSEU Tryptophan halogenase; OS = Amycolatopsis japonica OX=208439 GN=AJAP_22795 PE=4 SV=1
MDDYDVIVVGGGPGGSTVAGLTAAEGHRVLLLDKDRFPRYQIGESLLPATVHGICAMLGVRDEIERAGFVRKRGGTFKWGTGAEPWTFSFAASDRMAGPTSYAYQVERARFDTLLLDGARRLGAEIRQGHRALGTLRAGERIGGVRYLDDAGYERHATARFVVDASGHGSRLHHDVGGVREYSPHFRNLALFGYFEGGHRMPAPDAGNILCVSFADGWFWYIPLSDTLTSVGAVVKQESADRVQGDPETAYSALIEDCPLIEEFLRDARRATEPPYDRLRVRKDYSYDRTVLWSPGMVLVGDAACFIDPVFSSGVHLATYSGLLAARSINSTLSGFADEKRCFAEFEARYRREFGLFRDFLISFYRLDSGEDDYFRQARRLTGHHGTAGEAFAELVGGVSSQDFSRAMFGDVLAEGVQLQLRGLLGEAAGDEPPMFPGGLVPTADGRRWRVPDA

SEQ ID NO: 82582 - protein, 513 aa, unidentified
  source 1..513: note = Aliikangiella sp.
  REGION 1..513: note = tr|A0A545UHI5|A0A545UHI5_9GAMM Tryptophan 7-halogenase OS=Aliikangiella sp. M105 OX=2592383; GN = FLL46_05160 PE=4 SV=1
MIKSIVIVGGGTAGWITANHLAVALGGAGKSSVQITLLESPDIPTVGVGEGTVPAMRNTLAHFGIRETDFLRECDATFKQSIKFVDWVHNPGASVNNFYHHVFDYPAIYPLNTVPYWLLEPNNLKFADAVSLQGKVCDAGLAPKMITHPEFQGVTEYAYHLDAGKFSQLLANNAVNKLGVKHVKANLTDVDIDESGDIQFVKTDRAGDLKGDLFVDCSGFNALLIDKKYKVKFIDQSQHLFVDTALAMQVPYQNPDDPIASHTIATAKQSGWIWDIGLSSRRGVGYVYSSQYTDDTSAEETLRNYVGGAASELQCRKISMKIGYREKFWVNNCVSIGLSQGFVEPLEATGLLLFDAAAKMLAELLPGHKQDMAKTSRLFNQRSTYTWKRVIDFIKMHYYLSQRDDSEFWIDNRKASSAPQSLLEALDLWHNRPPSEYDFFSRFEAFNLDNYLYVLYGMEFQTNMSGIAGRYTQAEKSQEFYRRFSQQFDELKTQLEPNRKLLGRIKKYGLQTC

SEQ ID NO: 82583 - protein, 500 aa, unidentified
  source 1..500: note = Sphingomonas ginsenosidivorax
  REGION 1..500: note = tr|A0A5C6UH29|A0A5C6UH29_9SPHN Tryptophan 7-halogenase OS=Sphingomonas ginsenosidivorax OX=862135; GN = FSB78_10755 PE=4 SV=1
MARPLRIVIAGGGTAGWMAAATFARFLETGFDIDLIESDAIGTVGVGEATIPQIRLFNDALGLDEDAFLRATGGTFKLGIEFVDWHRKGSRYMHAFGDVGRDVGLLPFHQYWLRARALGLAGDLSAYSLNTQAALAERMQRGPARTAQVLPGMPYAYHFDAALYARHLRRYAETRGVNRIEGKITRVTRDGESGDVSGLVLEDGTTVSADLYIDCTGFRGLLIEEALETGYEDWTQWLPCDRAVAVPSARSAAFTPYTRSTAHAAGWQWRIPLQHRTGNGVVFSSAHMSEDEATATLLAGLDGEAMAEPRTITFRTGKRRRMWNRNVVALGLAAGFMEPLESTSIHLIQSAVSRLLTLLPGQTISEVDRAEFNRQSDFEWSRIRDFIILHYKATERDDTAFWRQCRDMAVPDTLAAKIALWQANGHIVREREELFAEVGWLQVLAGQGLVPRGHHPLADAISPSDLGEFMDMIDKLNAREVAQMPSHAAFVAQHCAAPAA

SEQ ID NO: 82584 - protein, 503 aa, unidentified
  source 1..503: note = Sandarakinorhabdus cyanobacteriorum
  REGION 1..503: note = tr|A0A255YD76|A0A255YD76_9SPHN Tryptophan halogenase; OS = Sandarakinorhabdus cyanobacteriorum OX=1981098; GN = CHU93_10625 PE=4 SV=1
MNKAASPLRVVVAGGGTAGWMTAAALAHTLGPVIELTLVESDAIGTIGVGESTIPPMQLFNRLLGINEAEFMRATQATFKLGIMFENWRDVGHKYFHSFGTTGKDHWSAGFQHFWMHGLTQGHEHPYDDYALELQAAMQSRFAHLPDDRLNYAYQLDSALYARFLRQRAEAGGATRIEGRIAQVELNGESGDIAALVLDGDRRIEGDLFIDCTGFRALLIEGALHAGFDDWSHWRPCDSAIAIQTSSVRPAVPYTRAIAHDAGWQWRIPLQHRQGNGIVYCSRYLSQEAAQERLFATIEGDKLVKPNIIKYQTGVRRRQWHRNCVAVGLSGGFMEPLESTSIHLIQRAVLRICRMLPAGRVSERDIAEFNEQQFTDMEQIRDFLILHYKVTDRRDSPFWRHVASMAIPDSLAHKIELFRETGRVFRKNEELFVENSWVQVMMGQGIMPQSWHPVAAKLRPGELTAFLSGLRDSVARTVAGLPDHHAYVSRYCAAAEPRDNKAA

SEQ ID NO: 82585 - protein, 507 aa, Pelomonas sp.
  REGION 1..507: note = tr|A0A0Q7BAZ6|A0A0Q7BAZ6_9BURK Tryptophan halogenase; OS = Pelomonas sp. Root405 OX=1736529 GN=ASC81_24885 PE=4; SV = 1
MSDPSIRKIVIVGGGTAGWMAAAPLAQRFAAAGPGRCEIALVESPDIGTIGVGEATLPPIRAYNRTLGLDGADFVKRTQGSFKLGIEFRDWGRVGHRFFHGFGDFGPAIEGRSPWQHWLRLQREVAQLPTYEDWSTSTVMARGNRFTPPENGAPSAANAYSFAYHFDAGLYAAYLREYALQRGVQRIEGLIVDVELRPEDGFVAAVKLADGRRIDGDLFIDCSGFRALLIGGAMQSPYEDWSALLPCNSAQAVPSERIEPLTPYTTSTAKAAGWQWRIPLQHRTGNGHVYCSHFISDDEAAATLLAGLDSKALDTPRQLRFTTGRRQQGWVKNVVAIGLASGFLEPLESTSIQLIMDGVGRLIQFFPDRHFKPHLAAEFNRLMGQQYESTRDFIVLHYKLTERRDSELWRYCAAMPIPDNLAHQIELFRTTGRVAILDRDSFAEPSWVSLFLGLGLTPEGYDPFVDHVDAQALLQHFVRLRQAIAQTVNGMPAHADYIASHVKAAPA

SEQ ID NO: 82586 - protein, 500 aa, Novosphingobium sp.
  REGION 1..500: note = tr|A0A3D1P3J4|A0A3D1P3J4_9SPHN Tryptophan halogenase; OS = Novosphingobium sp. OX=1874826 GN=DER67_06245 PE=4 SV=1
MTPQSKLRVVIAGGGTAGWMAAAALSNTLGSVIDLTLVESDAIGTIGVGESTIPPLLLFNRLLGIGEAEFMRATQATFKLGIKFENWKDVGESYFHSFGAAGKDHWSAGFQHFWLRGLQHGHAHSYDDYCLELKAALEGKFAHLPEDKMNYSYQLDSALYAAFLRKRAEGEGAKRIEGRISEVELNGETGEIAALRLDGDRRIEGDLFLDCTGFRALLIEGALHAGFDDWTHYLPCDSAIAIQTASVRPPVPYTRAIAHDAGWQWRIPLQHRQGNGIVYCSRYLGKDAALERLLSTVEGQTLTEPNFIRYVTGVRRKQWHRNCVAVGLSGGFMEPLESTSIHLIQRAVLRLIRMLPSGRVSQRDVTEFNEQQFADMEQIRDFLILHYKVTERRDSPFWRQCASMAVPESLEQKIELFRETGRVFRKNEELFAENSWIQVMLGQGIMPQAYHPIAGKLRPEELDHFLGSLRDMVSKTVAGLPSHQDYIASYCAAADDKVAA

SEQ ID NO: 82587 - protein, 504 aa, Pseudoalteromonas sp.
  REGION 1..504: note = tr|A0A2K9JW18|A0A2K9JW18_9GAMM Flavin-dependent tryptophan halogenase RebH OS=Pseudoalteromonas sp. NC201; OX = 1514074 GN=rebH1 PE=4 SV=1
MNITKIAIVGGGTAGWLAANHLGLALSSNSNVEITVIESLDIPSIGVGEGTVPYIVKSLKKFGISEAELLGSCDATFKQGIRFVSWLDEKVHGAHNFYYHPFEAPYPEGLDITNIWLNLGKKIPFDYVGIQSRVCESGLAPKLKTDGNYQGVLPYAYHFDAAKFAKLLKRNALDRFNVRVLNGTVDESKLDQTGHIESLCMTNGDILHFDFYVDCTGFSAKLISSVSNDSFQDKSEQLLVDTALVQQIERDDPSSLNPYTTATAHKAGWMWEIPLTSRTGTGFVYASKYMSHKEALETYARMLNVDSVNPRKIEMRVGYRNQSWSKNCVALGLAQGFVEPLEATSILLTDFSAEFLSKNFPLSRAEISVFSDHYNDAVNCAWESTIDFIQLHYILSDRVDSDFWVEYRSEVKLSDSLERKLAKFRLRSPQQMDFWSRFELFNEKNFLYVLYGMKFNTHPQTTSQAEFDIGLKLLDKNNEQLRRAKGALLDHGEWLKQLKQYMSS

SEQ ID NO: 82588 - protein, 506 aa, unidentified
  source 1..506: note = Paraglaciecola hydrolytica
  REGION 1..506: note = tr|A0A148KL90|A0A148KL90_9ALTE Tryptophan halogenase; OS = Paraglaciecola hydrolytica OX=1799789 GN=AX660_01395; PE = 4 SV=1
MSDKNLRNIVIVGGGTAGWMAAATLGRFLKDSFCKVRLIEAEDIPTVGVGEATIPQIQVFNRTLGIDENEFIKRTQGTFKLGIEFVNWGKVGDSYIHAFGDVGNDMDSLQFYHYWWKMRQQGHADDIGAYSLNAVAAPLGKFMRSVDAGNSPLSKIVYAYQFDAGLYAQFLREYAGARGVSRTLAKIVETRLRASDGFIESVVLDNGEIVQGDLFIDCSGFQGLLIEKALNTGFEDWSHWLPCDRAWAVPCERTEPLLPYTRSTAHSAGWQWRIPLQHRTGNGHVFSSKFMGEDEAREILMANLSGKALAEPRLLKFSTGKRLKAWNKNCVAFGLSGGFIEPLESTSIHLVQSGIARLMSLFPNRDFNQHDIDLFNQQTDFEYERIRDFIILHYKATERSDSEFWNYCRTMSIPDSLKQKIDQFMENGQIHRTNMELFNDTSWLEVFHGQGMHPKSYHPLVDLVADDELKRRMAFIKNVIDKSVEAMPSQQEFIQHYCLAPKPLNM

SEQ ID NO: 82589 - protein, 498 aa, unidentified
  source 1..498: note = Paraglaciecola hydrolytica
  REGION 1..498: note = tr|A0A136A5Y1|A0A136A5Y1_9ALTE Tryptophan halogenase; OS = Paraglaciecola hydrolytica OX=1799789 GN=AX660_04265; PE = 4 SV=1
MHKPIKKVVIVGGGTAGWISAALLKKVIGAPIDVELVESESIGTVGVGEATIPPIRLLNNVLGLNESEFLAKTKGTIKLGIQFENWRVEGESYFHSFGAAGKSMAFCHFHHFWQRAQSLGLNTSIWDYDLNYLAAKAGKFAQINSKDPIIELPYAYHFDAGLYAKYLREVSERMGVLRTEGLIEHVEQDKDSGFISTLVLQDGRKIAGDLFIDCSGFRGLLIQQQLGAGFDDWSHWLPCDRAIAVPSERHATTLPYTRSIAHAGGWQWRIPLQHRNGNGVVYSSQHYSQQQALDLLLNNLDSKAIGEPNFIKFQTGRRRQQWARNVVAVGLSSGFLEPLESTSIHLIQSAIVRLIHMFPHQGIKAIDVAEYNRQSKVEYEQIRDFIILHYHVNERNDSHFWRDLRNMEVPDSLRHKIELFRATGRLFREQNDLFLESSWLQVLVGQGIVPQDYHPIANNLSKDKLFEMLNTIQAIKNEPLAKLPSHDDFLQSFCTKPN

SEQ ID NO: 82590 - protein, 514 aa, Colwellia psychrerythraea
  REGION 1..514: note = tr|Q47XV3|Q47XV3_COLP3 Putative tryptophan halogenase OS=Colwellia psychrerythraea (strain 34H / ATCC BAA-681) OX=167879 GN=CPS_3699 PE=4 SV=1
MGKAIKKIVIVGGGSAGWITAGSLAAEHCVDAASSIEVILIESPEVNSIGVGEGTWPSMRNTLEKIGIDEKEFLQQCDASFKQGSKFIGWTTGDDTDSYYHPFMTPDGYGHIDLHAAWQANHSEQAFGDAVNIQSHVCQAGLAPKQLATPSYAAVTNYGYHLDAKKFASLLHKHCTQKLNVQHIVDHMDGIISADNGDINAISTKEHGHIAGDLFIDCTGSASLLLGKHFNIGFINKQHILFNDSALAVQVPYPDQVNPINSATLSTAQSAGWIWDIGLQTRRGVGYTYSSQYISDAEAEKSLRQYLINSVGEEQANLLKPKKLIFEPGHREKFWHKNCVAIGMSAGFLEPLEASALAMVELSSTMVSEELPVTRAHMDIIAKRFNERFNYRWQRIIDFLKLHYILSKRTDSHYWRDNQQPNSISEELQELIKLWQYQPPSRYDFVQNEEVFPSASYQYVLYGMGFETEQRANPRKFEANPLAEKTIAETQKKIDKYLTGLPTNRELLNKLKEK

SEQ ID NO: 82591 - protein, 505 aa, Shewanella sp.
  REGION 1..505: note = tr|A0A0Q0JJT8|A0A0Q0JJT8_9GAMM Flavin-dependent tryptophan halogenase RebH OS=Shewanella sp. P1-14-1; OX = 1723761 GN=rebH_2 PE=4 SV=1
MQKQASNTTSSNKPIKKVVIAGGGTAGWMAAAALTKLLGKHLEVVLVESDQIGTVGVGEATIPTLHIFHRLLGIKEQDVMAATNATFKLGIAFENWHDVGKDYIHSFGFLGKDCWACGFQHFWLKGQQRGIVSQIGDYCTEHLAAREGRFAVLPNQDYNHAYHMDATLYAKFLRGIAEQHGITRIEGKIKEVLQHDDTGNIRGLALESGDVIEGDLFLDCTGFRALLIEQTLNTGFDDWSHWLPCDSAIAVQTKTTEKPIPYTRSIARESGWQWRIPLQSRTGNGLVFCSKYMSDEEAKATLMDNIEGEPLTDPRVIKFRTGSRRKTWHKNCVAIGLSSGFLEPLESTSIHLIQRGIVRLLQMFPSQGLVEEDINEFNEQTRTETENIRDFIVLHYKVTDRTDSRFWRYCKNMSVPASLQHRIDMFDASGKVYKHGNELFGESSWIQVMMGQGLAPKQYHPIVDMMEDDELENFLASIKAKAKQKVANLPDHYDFVQHYCKSKML

SEQ ID NO: 82592 - protein, 110 aa, Sphingomonas sp.
  REGION 1..110: note = tr|A0A520EU19|A0A520EU19_SPHSX Tryptophan halogenase (Fragment) OS=Sphingomonas sp. OX=28214 GN=EOP66_12880; PE = 4 SV=1
MGARMQVVIVGGGTAGWMTAATLAMSFAGRLADVTLIESEEIGTVGVGEATVPHIRFFNQRLGIDEADFIRRTNATFKLGIEFRDWGRIGDSYIHPFGDFGHDIDGLPFH

SEQ ID NO: 82593 - protein, 524 aa, Colwellia psychrerythraea
  REGION 1..524: note = tr|Q487J4|Q487J4_COLP3 Putative tryptophan halogenase OS=Colwellia psychrerythraea (strain 34H / ATCC BAA-681) OX=167879 GN=CPS_1022 PE=4 SV=1
MMALDNNHILIIGGGTAGWLSAAILAKTLNSKNTDGVKVTLVESPTIPILGVGEGTWPNLRATLHKIGISETDFIRECDATFKQGAEFINWSKTPEPKQSHSYYHPLSTVSHSSYDFNLAPYWLQQDKKTRLPYDRAVASQARVCDEGLAPKQIVMAEYSAAQEYAYHLNANKLAEFLKRHCVEKLGVKFVSANVTNVALDNEDFITHVDTDHESEKKIFADFFVDCSGAKGLIIKETYNTAWQSISDVIFNDTALAVQVPYADRNQKINTHTLATAQEAGWIWDIGLQDRRGVGHVFSSKYISDQKAEQQLIDYLGDDYSDDLTIRKIKLNHGYHKKFWHKNSVAIGMSAGFVEPLEASAIFLFDAAANMLAAQFPRDKAQMKYAEDKFNQQLTMRMQRTVEFIKLHYCISQRRDSQYWIDNCDPISIPDNLKQRLAFWQGQVPTKYDFENAWEPFNLDSYLYVLYGMGFETDVAKVAAKYTETTKAKHLFNNIDKASVLLIDKLPKQRELIEKVIKYGFTQV

SEQ ID NO: 82594 - protein, 496 aa, Shewanella sp.
  REGION 1..496: note = tr|A0A0Q0GA65|A0A0Q0GA65_9GAMM Flavin-dependent tryptophan halogenase PrnA OS=Shewanella sp. P1-14-1; OX = 1723761 GN=prnA_1 PE=4 SV=1
MSNKIKNVVIAGGGTAGWMAAAAFSKLLGKLISVTLIESDNIPTVGVGEATIPTLHLFHDLLKIKESDFMAATNATFKLGISFENWKQVNEDYMHSFGYIGQSCWAAGFQHFWLKGYQQGIASDIGDYCPEHLASRLGKFAALPNQDRNHAFHTDAGLYAKFLRAISEQHGAKRVEGTISKVNLNHSNGFIKSLTLADGQQINGDLFIDCTGFKGLLIEEALHTGYEDWRHWLPCDSAIAVQTRQTKPLVPYTRSIAHPSGWQWQIPLQYRMGNGLVFCSKYMTDQQAKDLLLENIEGDKLNEPRVLKFKTGTRRKHWNKNCVAIGLASGFIEPLESTSIHLIQQSVVRLMQSLPSTEMEPAVVDDFNRKMRLEIENVRDFIVLHYHVTQRDDSEFWRYCKSMEIPKSLQDRIDLFVQSAQVYKTDQELFGEASWLQVMIGQGLMPKEYHPIVDNMSDEELAGFLNTIKSTIQRRVNSLPNHVDFIQNYCRSAEMS

SEQ ID NO: 82595 - protein, 506 aa, unidentified
  source 1..506: note = Paraglaciecola hydrolytica
  REGION 1..506: note = tr|A0A136A3S9|A0A136A3S9_9ALTE Tryptophan halogenase; OS = Paraglaciecola hydrolytica OX=1799789 GN=AX660_07515; PE = 4 SV=1
MTKSNQQISSIVIVGGGTAGWMTAAALSQHFQHMPVNITLVESSQLGTVGVGEATIPTLRRFYAKLGFSDIDVIRATNATCKLGIEFQDWHSLGSSFIHPFGLFGVPVKDTPFHHYWLKTRQLGQNSELAAYSLGINLAQKNKFCFPSPSPESNLQIFDWALHFDAGLFAELMRNYALKNQVGLVDSKITEVICLPDNGNIASLQLENGQSIAGDLFIDCSGFAGLLIDKTLKCGYEDWSEWLYCDRAFAVQTESTANPIPRTIAKAHSAGWQWQIPLQHRTGNGHVYSSRYMSDEAALQTLIQHLPGEALHTPRQFSFTPGRRKKAWEKNCIAVGLAAGFLEPLESTSIALVETAIEKIILSFPTAQYSQNEVERFNTVTACEYERVRDFIILHYKANQRSDSAMWRDCRAMSVPDSLQEKMQIFKAVGSLERKPWEIFGPDSWLAIYAGFDYLPETYSAQVDNMPNDYLLNNLANMRASINKMVDAVPTHVEFLSRFCAYASKD

SEQ ID NO: 82596 - protein, 529 aa, Shewanella sp.
  REGION 1..529: note = tr|A0A0Q0KYL7|A0A0Q0KYL7_9GAMM Flavin-dependent tryptophan halogenase RebH OS=Shewanella sp. P1-14-1; OX = 1723761 GN=rebH_1 PE=4 SV=1
MEHAIRDIIIVGGGTAGWITAGILAAEHNADNGKLSPSPKLNITLIESPDVATIGVGEGTWPSMRTTLKKIGISETEFLISCDASFKQGSRFINWTHSPDADLTKQPRDHYLHPFSLPIGTNEIDLCPFWLPHRQQVSFADAVGQQNQLSMQGLAPKQITTGEYQFQNNYGYHLNAGKFSQLLQQHCTEKLGVTHIQDHVSDIQKAENGDIRSLVTQHSGELTADFFVDCTGVKSLLLGEQMHVPFVCQKSVLFNDSALAIQVPYPTDDTEIASCTHSTAQTNGWIWDIGLPTRRGVGHVYSSSHTDQAQAEQQLIDYLRPSVNVDLDNLDIRKLSIAPGHRKICWKNNCMAIGMASGFIEPLEASALALVEWSANTLAQQLPANRQVMDIVATRVNQRFSQHWQQIIEFLKLHYVLSQRSDSDYWHDHRESSTIPESLQQQIALWRTQTPNKHDIQHTDVLFPAASFQFVLYGMAFETHVPTHLKPTLQQRAQQLFTENIKRTQGLKQILPTNRELLNKIRQYGLPHI

SEQ ID NO: 82597 - protein, 506 aa, Burkholderia lata
  REGION 1..506: note = tr|Q39P88|Q39P88_BURL3 Tryptophan halogenase; OS = Burkholderia lata (strain ATCC 17760 / DSM 23089 / LMG 22485 / NCIMB 9086 / R18194 / 383) OX=482957; GN = Bcep18194_C667 8 PE=4 SV=1
MNRTFDMLVTGAGPAGLCAALRLNHLGHRVLLVERSPLWPRPQIGEALTPGVRNIIDYLDADEVLESVPIVAGKPTRVRWTSESIETVAHDGAVVERAAFDAALLRLAVARGVDVLRPASLAQVDGAPGAWRVQIATPDGLRSVEAHVLLDARGRQSRREPQRLHARRLSTVWAEAAMATPAAHADAATRVEALDDGWMWGAALPGGRYRVMFTFDPSARDDAREREPASVLRNACTRSALFKDMAGVRWCDSPRMCVSTPYVDALSWQDGRIKLGDAAFALDPISSSGVEKAMRFSLQAAIAINTWCRASDASERELAQRFYESRLIEGAARHLAWTAGYYRQAWCAEAPFWRLRSAPALTSDTVATPSLGDETAARVDLMTHALQDEWARVPSDQPQPGEPAPPPPLPLHSPIRFARNTGIVVVPCATDDRVTAHPALQHPSLDRPVAFWNGVALFPLLDMLTRATHPLELMAFLGRSMEAASAQQLLEWLWSRQMVEPAVFGA

SEQ ID NO: 82598 - protein, 498 aa, Xanthomonas campestris
  REGION 1..498: note = tr|A0A3E1L8R7|A0A3E1L8R7_XANCA Tryptophan 7-halogenase OS=Xanthomonas campestris OX=339; GN = D0A35_03345 PE=4 SV=1
MTQARIRKVVIAGGGTAGWVAAAALAHQFRGLLEIVLVESEQIGTIGVGESTVPPIRAFHRFLQIDEPEFLRAVAGTFKLAISFEDWQGQGDRYIHPFGSTGQGTLVCAFHHFWLEAQRRGMHSGFDEYCLEAQAARADRFAVLQQPAVNYAYHLDAGLYARFLRTHAQRYGATRIEGKIQQVRQHADSGFIEALVLEDGQVVEGDLFIDCTGFRGLLIEQTLHTGYEDWSHWLPCDRAVAVQTESVEPPVPYTRAIAHAAGWRWQIPLQHRVGNGLVYARAHLSDDEASAMLLAAVQGTPRRDPMLVPFVTGRRLQTWNKNVVALGLASGFVEPLESTSIHLAIVAVMRLITLFPADGIAQPQVDLFNRISRAEAEHVRDFVILHYHATQRQEALWRQCRAMELPESLQLRLRAWREGAHAWQDGDELFRVDSWTHVLMGQGIAPAQHHPLTRALPDQHLQQLLDGIRQPLQHVVTQLPTQQAFIDSYCKVDQSTWG

SEQ ID NO: 82599 - protein, 152 aa, Sphingomonas sp.
  REGION 1..152: note = tr|A0A520FR51|A0A520FR51_SPHSX Tryptophan halogenase (Fragment) OS=Sphingomonas sp. OX=28214 GN=EOP66_02810; PE = 4 SV=1
MNAVIRLIQLFPFRGDDHVALAARFNAQSRHEWEHVRDFIILHYHVTQRDDSQFWRDCARMTIPDSLAERIALFTNTAGAWQGQDDLFKIDSWVSVMLGQGVVPRAHHRIASIIKGHELQTSFEDLSRGMASTVRTLPRHCDFLARYCPADG

SEQ ID NO: 82600 - protein, 513 aa, Sphingomonas sp.
  REGION 1..513: note = tr|A0A326GFM7|A0A326GFM7_SPHSX Tryptophan 7-halogenase OS=Sphingomonas sp. OX=28214 GN=DI625_16520; PE = 4 SV=1
MRVTQRVRQIVVVGGGTAGWLAACRIAAAADPHAAEPLAVTLIESPDVATIGVGEGTWPTMRGTLARIGIDEATFLRSADASFKQGSRFDGWRTGALDDFYYHPFTAPADVPAADLLRAWDGGRFAEAVCAQPAVCADDLAPRQPGMAPYAGALNYGYHLDAGKFAALLRDAACNRLGVRHVRDHVTGVEAADDGDIAAVLTRGAGRIAGDLFLDCTGHAALLIGGHFGIGTIDHTPILFNDRALAVQVPVAPDSPIASQTNATAHDAGWIWDIGLPSRRGVGCVYASDFLSDDAAEATLREYLSRTAPGAEAAALAYRQLRFRSAHRERFWQGNCVAIGLSAGFLEPLEASAIVLIELSIDALLDGFPADRSAMPLLARRFNDLFRYRWNRIVDFLKLHYALSERYTPYWCAHRDPGSWTESLRDRMALWPMQPPSPADFAHADEIFPAASHQYVLYGMGVSPPPPSALRPHPCTASALHQVRQRARTLAASLPTNRAYLRALTPPTGMAHV

SEQ ID NO: 82601 - protein, 518 aa, unidentified
  source 1..518: note = Paraglaciecola hydrolytica
  REGION 1..518: note = tr|A0A148KN84|A0A148KN84_9ALTE Tryptophan halogenase; OS = Paraglaciecola hydrolytica OX=1799789 GN=AX660_19595; PE = 4 SV=1
MDKTTRIITIVGGGTAGWLTAGVIAAEHMANSEQGIEVRLIESPDVNIVGVGEGTWPTMRGTLKKMGISETDFIRECDASFKQGAKFAKWVTGAENDAYYHPLVLPQGYEEINLVPFWQPHGDKVSFADAVSFQGHLCERGLAPKQNTTPEYAHVANYAYHLDAGKFAVFLQKHCTQKLGVKHILDHVIQVNAAENGDIASLTTKNSGDISGDLFIDCSGFNALLIGQHYQVPFICKKHILFNDSALACHVPYANKNDAIVSHTVSTGQSAGWIWDIGLPSRRGVGHVYSSTHISDAKAEAELRDYIRTSRADIADELTIRKIDIKPGHREVFWHNNCVAVGLSAGFLEPLEASALVLVELSAQMISEQLPASRAVMDIVAKRFNDKFLYRWDRIIDFLKLHYVLTKRTDSQYWIDNCKAETIPQALQSLLTLWRYESPWHHDFTQVDEVFPSASYQYVLYGMGFETLSRATQRRSQNAQQAEQQFRKNTELSQKLVAGLPTNRDLINKIHQYGLQKI

SEQ ID NO: 82602 - protein, 514 aa, Janthinobacterium sp.
  REGION 1..514: note = tr|A0A0S4KF21|A0A0S4KF21_9BURK Tryptophan halogenase, putative OS=Janthinobacterium sp. CG23_2; OX = 1706231 GN=BN3177_9739 PE=4 SV=1
MKAFHNVLIVGGGTAGWLTACYLARTLGAGAGAGGVSITLVESPEIGIIGVGEGTFPSIRSTLAAIGIDEARFVRECQATFKQGVRFNHWVRPAGAPGADHYFHPFSQPSQRQGGPELLPHWLQGTAGAGIAFAAAATMQKRVADAAHGPKRLADADYAGPMNYAYHFDAGRFAALLAEHGRSLGVRHVQATVDRVELDADGAIACVHTREKGALNADLYVDCTGFRAALIGEALGSPFRKIDDVLFVDRALAMQVPYPALDAPIPSYTISTAHEAGWTWDIGLQQRRGIGYVYSSRHTSDERAEQVLRQYIGAAADGLAPRQLKLNIGYRDVQWIKNCVAVGLSGGFLEPLESSGIGLIETAAYLIGHLFPFNGDSAPVAAQFNRLMRERYERVVDFIKLHYCLSQRTDSAFWTDNTDPRSIPASLRDKLAMWRCRPPHRLDFVADVEMYPTSSWQYVLYGMEFATGLHPSACHPARREEAAAEFAMIAKLAGHALADLPPHRALVEHLCERR

SEQ ID NO: 82603 - protein, 494 aa, Colwellia psychrerythraea
  REGION 1..494: note = tr|Q47XV2|Q47XV2_COLP3 Putative tryptophan halogenase OS=Colwellia psychrerythraea (strain 34H / ATCC BAA-681) OX=167879 GN=CPS_3700 PE=4 SV=1
MKDKIENIVIAGGGTAGWMAAAAFSKLLGKNLNITLVESDDIASVGVGEATIPPIKTFHKLLGINEQEVMRATHATFKLGIGFENWGQQGDHYIHSFGVTGKECWAGEFHHFWLHGLRKGIKADFGDYCYELQAAKANKFALSKNTPINYAYHLDATRYAKYLQEFSKKLGVTRVEGKIQQVNKGNKTGEINSLTLASGQVIEGDFFIDCTGFQGLLIEQALHTGFDDWSHWLPCDRAVAVQTKAVAAPLPYTRSIARKSGWQWRIPLQNRVGNGLVFCSKYCSDEEAISTLTANIEGELLTEPRIIKFNTGRRRKGWNKNCVALGLSSGFIEPLESTSIHLIMSGIIRLLRLFPFDGIHQSAINEYNNKLDSELNAVRDFIILHYKATQREDSNFWLHCKNMEIPPSLVHKMQLFKDTGRVFLDDGDIFRVDSWTQVMLGQGIMPTQYHKIAEIMNDKELENFMSNLKASITNAVEQLPSHTEFIQSYCKSDY

SEQ ID NO: 82604 - protein, 496 aa, unidentified
  source 1..496: note = Microbulbifer aggregans
  REGION 1..496: note = tr|A0A1C9W7N0|A0A1C9W7N0_9GAMM Flavin-dependent tryptophan halogenase RebH OS=Microbulbifer aggregans; OX = 1769779 GN=rebH_7 PE=4 SV=1
MESEKIRRVVIAGGGTAGWMTAAALGKLIGKNLEITLVESDAIGTVGVGEATIPTLHVFHQLLGLKESEVMAATNATFKLGINFENWRVPGEDYLHSFGFLGKDCWACGFQHFWLKGLQRGIDYQIGDYCREHLAAREQRFAVLPDQDRNHAYHLDATLYAKFLRKFAESHGVRRVEGKIGNVKLSPSNGFIEALQLDSGMTIEGDLFIDCTGFRSLLIEGALHTGYDDWTHWLPCDRAMAVQTESTGSPVPFTRAIAHESGWQWRIPLQTRVGNGLVYCSRYLDDEGARELLLENIEGELLNEPRIIPFRTGTRRKHWNKNCVAVGLSSGFIEPMESTSIHLIQRNIVRLMQLFPSSGIVQPDIDEYNSQAMEEMEHIRDFIILHYHVTERTDSKFWRYCRSMQIPDSLAHRIQMFKESGVIFKLPQELFGESSWMQVMFGQGLMPQRYHPIVDLMGDEELATFLGNIRRNVRHQVENMPDHRQFIDHYCKSKLA

SEQ ID NO: 82605 - protein, 514 aa, Sphingomonas sp.
  REGION 1..514: note = tr|A0A2W6SA86|A0A2W6SA86_SPHSX Tryptophan halogenase; OS = Sphingomonas sp. OX=28214 GN=DI605_12720 PE=4 SV=1
MVKPVRRIVVVGGGTAGWLTAATVAARHQSRMPEHFSVTLVESPNVPIIGVGEGTWPTLRSTLRKIGVSETDFFRECDAAFKQGALFARWTTGAPDDAYYHPLVLPQAFSQVNLVPHWLNAGEDSSFCDTVCAQGLCCDDGLAPKMITTPEYEGVANYAYHLDAGKFAPFLQRHATTKLGVRHVLADVRSVELAENGDIRAIMTEQAGEIEGDLFVDCTGFSSLLLGQALGVGFKDCGDTLFCDTALAVQVPYPDEDSPIATHTISTAQSSGWIWDIGLPTRRGVGHVFSSRHISDDAAEGELRAYLGSAADHLPVRKIRIRSGHRETFWKRNCVAVGLAAGFLEPLEASAIVLVELSAKIIAEQMPANREVMDIVAARFNATTTYRWGRIIDFLKLHYVLSKRRDSAFWRDNMLPETISDRLKDLLHLWRYQGPWLHDEFDRVEEVFPAASYQYVLYGMGFRTEIEADSLVADARTAERAIRENKVMAERLRGTLPKHRDLIRKIVDRGMQAI

SEQ ID NO: 82606 - protein, 502 aa, unidentified
  source 1..502: note = Paraglaciecola hydrolytica
  REGION 1..502: note = tr|A0A136A3R9|A0A136A3R9_9ALTE Tryptophan halogenase; OS = Paraglaciecola hydrolytica OX=1799789 GN=AX660_07525; PE = 4 SV=1
MPQSIKNIVIVGGGTAGWMAAASLAKYAQGKNLSVCLIESSQIGTVGVGEATIPNIVEFNRQLGIDEQELIKATQATFKLGIQFENWQQQGTQFFHPFADFGLTIDNVEFHQYINRLVANGAQYKLEDYSFACVMAKKGKFAQPHPNPPSPLADYSYAYHFDASLYAKYLNKFSVNLGVVHIDAKIEQVNLQSCNGFIKSVSLQDGREISGDLFIDCSGFQGLLIEQALHTGYEDWSKWLFCDSAYALQTERTGEINPFTRSIAREAGWQWAIPLQHRMGNGYIYSSQFQDDADAKNTLLANVTGKPLNEPRKLSFTPGRRKQIWNKNCFAIGLASGFLEPLESTSISLVQTAIAKLLSFFPDTEFNPADIAEVNRLHNREMENIRDFLILHYKLSQRSDSEFWRQCQAMEIPDALAHKMALYESRGHIVLLDNESFQSASWLAMYNGFNFKARRYDPRADVVTLAVLEQKLAQMRNNLDGIASQSLSHQQFITMHCQAEPL

SEQ ID NO: 82607 - protein, 506 aa, Sphingomonas sp.
  REGION 1..506: note = tr|A0A326GPH0|A0A326GPH0_SPHSX Tryptophan 7-halogenase OS=Sphingomonas sp. OX=28214 GN=DI625_08590; PE = 4 SV=1
MAIDQEPVRTVAIIGGGSAGWMAAAALARFLPAGTVITLVESDAIGTVGVGEATIPQLRLFNQHLGIDEDDFVARTGGSFKLGIEFAGWNGADSRYLHAFGTIGRAVGLVPFHHYWLAAGGGDRPQSLWSHSACAVAAAANRFDRDPGNPQAPSGIAWAYHFDAARYAAYLRERAERAGVVRVEGRVVDVSQDGETGLIAGVTLYDGRRVEADFFIDCSGFAALLIGRMAGDRWDDWSALLPCDRALAVPCASVEPITPYTRATARTVGWQWRIPLQERTGNGLVYSSAHLSDDEAATTLLDNLDRAALGDPRPLRFTTGRRQAPWIGNCVALGLAAGFMEPLESTSIHLVQSGIARLLSLWPSAKPRTADIAEFNRQSAREWLSIRDFLIAHYALNGRDEPFWQERRATPLPDSLIERIALFEQSGRIVRDEHELFAEVAWLQLLVGQGVVAKGYHPLADALPAARRDQFLDISAQHVAATVARMPTHDQFLRAHCPAPDAKVAA

SEQ ID NO: 82608 - protein, 508 aa, Novosphingobium sp.
  REGION 1..508: note = tr|A0A0N1BN95|A0A0N1BN95_9SPHN Tryptophan halogenase; OS = Novosphingobium sp. AAP93 OX=1523427 GN=IP83_17100 PE=4; SV = 1
MSNPIQHIVIVGGGTAGWLSACLLAARLPDKRVTLVEAPDIPTIGVGEGTWPTMRETLATIGIPEAEFLTECDAAFKQGSRFDGWRDGSAQDSYLHPFSAPPAADMQGLAAGWQASGQQGPFAAAITPQHAVCAANLAPRQRTMPDYAGALNYGYHLDAGKFAALLMRHGTKRLRVKRIAAHVTGVTRAANGDIAALMLRDGEPLAGDLFLDCSGQAGILIAGECGADWIDRSDVSFNDRALAVQVPVEPGSPIAAQTIGTAHEAGWLWDIGLPTRRGIGCIYASRFLSDERAEEILRGYVAAKVPGADAASLTPRKLAFKTGHRDRFWIGNCLAVGLSAGFIEPLEASAIVLIELSLKALAENFPQSRASMDIHAARFNELFRYRWDRVVEFLKLHYVPSQRTEPYWQAQRAPETIPPRLAECLALWREQQPSAWDFPRVDEMFPAASQQYVLHGMGLPVPLSGASPSPARLADVAAKARALAAALPTTRDYLDRLAAQTAAARIPA

SEQ ID NO: 82609 - protein, 526 aa, Dyella japonica
  REGION 1..526: note = tr|A0A075K384|A0A075K384_9GAMM Tryptophan halogenase; OS = Dyella japonica A8 OX=1217721 GN=HY57_04760 PE=4 SV=1
MARLKKVLIVGGGTAGWLAACYLAKAVNAVDPQAVQVHLVESPDIGLLGVGEATFPSIRGTLSAIGLDERRFLVGATATYKQGIHYRHWVRPPGAPGADHFFHPFNAPSQRPGGPELLPYWLLGAAPPGMPFADAVSMQATLVDHARGPRRFKDPDYQGPMNHAFHFDAACFARVLAEHGQETLGVTRHVATVERTELDEHGAIARVVTKELGELTADLYVDCTGLRGLLIGNVMQSPFRSRADVLFANRAVAMQVPYERQDAPIPSYTISTAQEAGWIWDIGLQQRRGVGYVYSARHTSDERAEEVFRHYLGPVAEGLKAMHIKFETGYRPEHWRKNCVAVGLAGGFVEPLESTGIALIELATYLLSHLLPGDTDDMERAARHYNAMMVARYDRIIDFIKMHYCLSHRRDSPFWIDNADPASIPQTLQDKLALWKHRPPHRLDFVSDLEMFLVSSWQYVLYGMEFRTDLSAMRSAYPRVDEARQEFHNIQRAAAQALQDLPDHRMLVEQMCRDHHERAGTSTAAA

SEQ ID NO: 82610 - protein, 508 aa, Novosphingobium sp.
  REGION 1..508: note = tr|A0A0N0K3R5|A0A0N0K3R5_9SPHN Tryptophan halogenase; OS = Novosphingobium sp. AAP93 OX=1523427 GN=IP83_17430 PE=4; SV = 1
MAENGAIRSVCIVGGGSAGWLTAGLIAARHGADLKVTLVESVRRGTIGVGEGTWPTMRNTLRKIGLSETDFMRATHASFKQGAKFARWRTGAADDFYYHPLVLPEGFPDLDLAPYWNADPQQSFSDAVCFQEALCEASLAPKLMTSPDYVGVANYAYHLDAVRLGELLAEHCTGKLGVHHIDDDIIDVRLTENGDVTAVVGERHGAIQADLYVDCTGFASRLLGEALGVPFIDRSDVLFVDRALAVQLPVEEDSSIASHTISTAQRHGWIWDIGLPTRRGIGYVWSSRHAGNERVEEELAAYVGPDFAKLSPREITIRSGHRAQFWKNNVVAVGLSAGFLEPLEASALVLIELSADYIATSMPASRSAMDFVARRFNTMTRYRWDRIIEFLKLHYVLSEREDSAFWRDNRDPATIPQDLQDQLELWRDSPPGEHDFSSAHEMFPAASYQYVLYGMGFRTRPRPGRLSNADAAQDAFDRTAALKRKLTATMPSNRALLTRLAQYRFPPL

SEQ ID NO: 82611 - protein, 508 aa, unidentified
  source 1..508: note = Caulobacterales bacterium
  REGION 1..508: note = tr|A0A258CBN2|A0A258CBN2_9PROT Tryptophan halogenase; OS = Caulobacterales bacterium 32-67-6 OX=1970502; GN = B7Z13_09620 PE=4 SV=1
MTTAIPSATAVRRVVIVGGGTAGWMTAAALARLVAPSGVQITLVESEAIGTVGVGESTLPHIRAFNERLGIDEAAFMKATRATFKLGIQFENWGQIGGSYIHPFGDYGAPGGEAPFHHYWLRGRELGDVGPIDDYSLPVVAAREGRFAPPSDDPRSLLSTYRYAYQFDATLYARFLRGMAETEGVRRIEGRIQNVAQDGESGAITKVTLDDGRQIEGDLFVDCSGFRALLIEQTLKAGFTDWSHWLPCDRAVALPCESDQPTVPYTRATALEAGWQFRIPLQHRVGNGYVYSSAFIDEAAALDRLVGRLEGKPLKAPNVLKFTAGQRTRNWAANCVSVGLSSGFIEPLESTSIYLIQIAITKLIELWPTAVIDPATEAEFNRQMDLEYIRIRDFIILHYCATARNDTPFWDYVRTMPLPDTLSEKIELFRARGIVQDYREGLFLHPSWVAVYLGQDILPRRHHPLVDAVSATQLMSSLERLRRMVREASYKLPSQDDYIARYCAHLPL

SEQ ID NO: 82612 - protein, 537 aa, Colwellia psychrerythraea
  REGION 1..537: note = tr|Q48AA7|Q48AA7_COLP3 Putative tryptophan halogenase OS=Colwellia psychrerythraea (strain 34H / ATCC BAA-681) OX=167879 GN=CPS_0239 PE=4 SV=1
MHIMNKLTKTVVIVGGGIAGWLTAGRLAAKHKSNTEQGLNVILIESANIPAVGVGEGTWPTMRSTLRALGISESDFIRECEASFKQGAKFAKWFDGTEDDFYYHPLVLPQGFGKTDLAAHWLAKQTQTKQKNSHVNSFSNEVCYQEAICEQGLAPKTIRHAEFSDVANYAYHLDSAKFAVFLQKHCQEKLGVTHIVDDVTGVNCDVNRADKDIIDETIDKGDILSVSTQNHGDIAGELFVDCTGFSSLLLGKHYQVPFKKCDDILFIDTALAVQVPYDSKDSPIASHTISTGQKAGWIWDIGLQHRRGVGYVYSSKHSTEAEARAVLAEYVGDKFSSLNVRKIPIVSGHREKFWQNNCVAVGLSAGFLEPLEASALVMVELAAQMISEQLPASREVMDVVAKRFNETALYRWDRIIDFLKLHYILSERTEPFWTDNRESATIPQSLQDLMTEWKYRSPADHDFTSNNEVFPAASYQYVLYGMGFKSDYCHTPYAFDDCDFADGQFKQNKVLIDKALSSLPSNRELLDKIKSYGFSRI

SEQ ID NO: 82613 - protein, 494 aa, Sphingomonas sp.
  REGION 1..494: note = tr|A0A2E1YZT4|A0A2E1YZT4_SPHSX Tryptophan halogenase; OS = Sphingomonas sp. OX=28214 GN=CMN72_07270 PE=4 SV=1
  VARIANT 62: note = Xaa can be any naturally occurring amino acid
  VARIANT 66: note = Xaa can be any naturally occurring amino acid
MAGQRVKRVVIAGGGTAGWCAAAALSRQLGALIEVVLVESDAIGTVGVGEATIPTIRTFHQXLGIXEREFLRATSATFKLGIAFENWGQVGDRYVHSFGEVGHGTWMGGFQHFWLQAREAGFAEPIGAYSLEHEAAEAGRFATGDQSALSYAYHLDATGYARFLRAIAESSGAERKEGRIARVERDGQSGDLTALVLESGERVAGDLFVDCTGFRALLIEDALETGFDDWSHWLPTDRALAVQTEATGPAVPYTRAIAHDAGWRWRIPLQHRIGNGLVYSSAHLSDDAAHDALIAGIEGDRRTDPRLIRYRTGQRRKAWNANCIALGLSSGFVEPLESTSIHLIMIGVTRLMQLFPFEGVSHALRDRYNDLAEREIEGVRDFIILHYHLTQRGDSEFWKSRRTMAIPDSLAHRIALFRESAQAFQASDELFRVDSWLQVMLGQGLEPQGYHHMGKIMPPDRLKAALESMRSNIADAVGAMPTHQAFLDRYCNGR

SEQ ID NO: 82614 - protein, 497 aa, Sphingomonas sp.
  REGION 1..497: note = tr|A0A326GNC5|A0A326GNC5_SPHSX Tryptophan 7-halogenase OS=Sphingomonas sp. OX=28214 GN=DI625_09300; PE = 4 SV=1
MEDRCNPVRVVVVGGGTAGWMTAAGLVGLLPAACTVTLIESEAIGIVGVGEATLPHLRLYLERLGVDEAAFMAATEATYKLGIEFRDFGAIGDRYIHPFGTYGRPLGGVAFHHYWLRRASAGAMPPIGAFSAGVTAAEQRRFERPGGDPNDPTTSFGYAYQFDATRFAPFMRDWSEARGATRVEGRIVAVERDGDTVRAVTLDDGRRVKGDLFVDCSGFRSLLLGEALGEPWEDWSHWLPCDRAVAVPCASPDGVIEPYTRATAMPAGWRWRIPLRHRVGNGYVYASGHVSDDEAAAALLAGLDGPALAEPRFLRFRAGRRRRSWVGNVVAVGLASGFLEPLESTSIYLVQAAITSLIEHFPGQQVAPVDRDGFNAAIDAEYDRIRDFLILHYHATTRDDSPFWSHVRTMAIPETLADKLALWRGSAQVSKYSHGLFLEPSWVAVYLGQGVVPDGWDPRADLPDAAGLDRALGSLARAIADRVAAMPTHDAALERLA

SEQ ID NO: 82615 - protein, 504 aa, Sphingomonas sp.
  REGION 1..504: note = tr|A0A326GWY5|A0A326GWY5_SPHSX Tryptophan 7-halogenase OS=Sphingomonas sp. OX=28214 GN=DI625_01815; PE = 4 SV=1
MKDGNIRSITIVGGGTAGWMAAAAFSHILSGSGIAIRVVESEEIGTVGVGEATIPHIQYFNRLLGIDEDEFVRRTCATFKLGIEFVDWGRIGERYIHPFGSYGQEMEGLHFHQFWYRQAQMGGALPLDRYSIGVGAARAGKFQRPDHSRPGSPLAGISYAFQFDAALYARYLRERAEAAGVERIEGRIVDVALNGANGHVDHVLLEDGRKVAGDLFIDCSGFRGLLIEGALKAGYDDWSEWLPCDRAVARPCARIGDPTPYTRATATSVGWRWRIPLQSRTGNGHVYCSDYIDDDAALAMLDASLDGEPLAGPNFLRFTAGVRRKAWDRNVVALGLASGFLEPLESTSIHLIQSGIARLLTNFPDRSFNQPDIDYYNRRTRAEYEQIRDFLILHYKATARDDSPLWRRCRDMAIPASLEERIAIFRENARLYRHDNELFSETSWLAVLHGQNIAPKRYHPIADLLPDAELDDRMTRIAAAMDSGVRVMPDHMAFIDRHCRSPNQ

SEQ ID NO: 82616 - protein, 489 aa, unidentified
  source 1..489: note = Paraglaciecola hydrolytica
  REGION 1..489: note = tr|A0A136A0P3|A0A136A0P3_9ALTE Tryptophan halogenase; OS = Paraglaciecola hydrolytica OX=1799789 GN=AX660_11490; PE = 4 SV=1
MNEKVNNVVILGGGTAGWMTAALLSKALKNLNIKLVESEQIGTIGVGEATIPSLHFFNDMLGINSTNFVKKTSGSFKLGINFENWHKDGESYFHGFGSTGSGMWAAGFHEYWKRGLDLGFSKPFSHYNFEAMAGLNHKFAHQQGGLNFAYHLDASLYAKTLKQVSEENGVTRIEGMVKQVHTDSASGDITSLELADGNCVTGELFIDCSGFKGVLINETLNTPFIDWSHWLPMDSAIAVQTKLSQAPAPYTRSIAHHAGWQWRIPLQHRMGNGIVYSQQYMSDDEAKALLLSSIEGEMLTEPRKLQFKTGCRAKQWHKNCVAIGLAGGFIEPLESTAIHIIQQGIMQLIKYFPSNGINALEVDEYNHYMLNDYNDIKDFIVLHYCQTERQDSPFWHFCKNMTIPASLKSRMDLFKKTGRFVQRKNEIFGDSWLQVMIGQGLIAEQHHGLADELSETELQDFLQQIEQDIAAKVQHLPSHGEYLNSLSTR

SEQ ID NO: 82617 - protein, 500 aa, unidentified
  source 1..500: note = Paraglaciecola hydrolytica
  REGION 1..500: note = tr|A0A148KN70|A0A148KN70_9ALTE Tryptophan halogenase; OS = Paraglaciecola hydrolytica OX=1799789 GN=AX660_19535; PE = 4 SV=1
MKHNNIKSVVIVGGGTAGWMAAAALSKSLGTKDINIQLVESEEIGTVGVGEATIPHIKYFNRLAGIEESEFLLHTSATFKLGIEFVNWGKLGDSYIHPFGPYGVDMQGVHFHHTWLRQKHKGTAKPVDEFSLPGLAAKAGKFQHPRPDLTSSPLGTMDYAYQFDAALYAKLMRKVAEERGVIRTEGKIVKVKQNPANHHIDSLELDNGSIVSGDLFIDCSGFKGLLIEETLKTGYEDWTHYLPCDRAVARLTERLPELPPYTRATAKKSGWQWRIPLQSRTGNGYVYSSQFISDDEALASLNADLDTPVIAEPKFLRFKTGIRKQTWNKNVVAIGLAAGFLEPLESTSIHLIQTAIARLMTNWPDSSFNQPDIDYFNRKTYAEYEKVRDFLILHYYATARNDSPFWNYCRTMEIPKSLEERIAIYKENARLYRDDLELFTPVSWFAVFNGQNIEPKRYHPLADILDDNSLELRMAELHRATQRCVEVMPSHEQYLKDVCK

SEQ ID NO: 82618 - protein, 315 aa, unidentified
  source 1..315: note = Microbulbifer aggregans
  REGION 1..315: note = tr|A0A1C9W7J6|A0A1C9W7J6_9GAMM Flavin-dependent tryptophan halogenase RebH OS=Microbulbifer aggregans; OX = 1769779 GN=rebH_5 PE=4 SV=1
MNTIKNIVIVGGGTAGWLVAASLARQLNIINDSETNITLVESPDAPTIGVGEGTWPTMRSTLKRIGIDETDFIRECDVSFKQGTQFVNWHRLHKDGSDATYFHSFELPHTQWRTSPGPYWHYLKSELNRSYADAISVQPEACRGYFAPKTMATPAYEGLLNYAYHLDAGKFAKMLAKVATEKLGVRHISAYIERARLDEDGYITSLATREKGDIKGDFFVDCSGFAGLLIDRTYEIPFRSVKDKLFVNSAIAIQMPYERPDAPISSPTLSTAQTAGWIWDIGLQARRGTGHVYSDDFISDDEAEAQLRRYPRSRL

SEQ ID NO: 82619 - protein, 493 aa, Sphingomonas sp.
  REGION 1..493: note = tr|A0A326GHY1|A0A326GHY1_SPHSX Tryptophan 7-halogenase OS=Sphingomonas sp. OX=28214 GN=DI625_16505; PE = 4 SV=1
MSVTRVVIAGGGTAGWMAAAAIARTMGRMVEVTLVESEAIGTVGVGESTIPPLVTYNRLLGINEAEFMAATAATFKLGILFDGWHTPDSRYFHSFGTTGRDHWAAGFQHYWLNGRTRGHERPYDDYCTELVAALQGKFAHLPGDATNYAYQLDSGRYAQFLRNMAERDGTQRVEGRIARVELDGETGDIAALLLDGDRRIEGDLFLDCTGFRALLIEGTLHAGFDDWTHWLPCDAAIAVQTESVGPPLPYTRAMAHDAGWQWRIPLQHRVGNGIVYCSRYLDRDGALDRLMGNVEGAVRTEPNFLRFTTGARRKQWHRNCVAIGLSGGFMEPLESTSIHLIQRAVLRLLRLFPQGGIRPADVAEFNDQQLQDMEQIRDFLILHYKVTDRRDSPFWRQCAAMDVPTTLQQKIDLFRQSGRVFRRNEELFGENSWVQVMMGQGIVPEGYHPIADKLSDAELDRLLSMIRRQVADTVATMPPHGDYVARYCPADRP

SEQ ID NO: 82620 - protein, 507 aa, unidentified
  source 1..507: note = Paraglaciecola hydrolytica
  REGION 1..507: note = tr|A0A136A1H3|A0A136A1H3_9ALTE Uncharacterized protein OS=Paraglaciecola hydrolytica OX=1799789; GN = AX660_13125 PE=4 SV=1
MQSANIEHIVIVGGGTAGWMTAAALANRLPQKLCRITLVESDVIGTVGVGESTIPHIRQFNQTLGIDEATFIKKTHATVKLGIKFNDWGNIGDSYFHPFGEHGEITQGIDFHQYWLKARSLGETYGLEQYSIAAMAGFAGKFPLSTSNKPTVFADYTYSYHIDASAYAAFLSDYAQQRGVQRIEGKVVKVNQHLNDFVQSITLESGQTIEGDLFIDCSGFKALLIDGTLNTPYLDWSQWLPTDSAVAAPCEHAPGDHSSSKGKIALQPYTQATARVSGWQWQIPLQHRIGNGHVFTSAFLSDQHATDILMNSLPGKALANPKILRFKAGRRQYSWQKNVVAIGLSSGFLEPLESTSIYLIQLGVSKLLELFPDKAFRQAEMNEYNRSICQQYELIRNFIILHFHVTKRNDSPFWDYCRNMAIPDELQHLLTLFAESGRTDLAQFGVWPAVCIGQNIIPQHYDARLDNIDAEQIKQLMANHRHKIQSMLATFPQADDYIQELLTRGTR

SEQ ID NO: 82621 - protein, 508 aa, unidentified
  source 1..508: note = Paraglaciecola hydrolytica
  REGION 1..508: note = tr|A0A148KN51|A0A148KN51_9ALTE Tryptophan halogenase; OS = Paraglaciecola hydrolytica OX=1799789 GN=AX660_19555; PE = 4 SV=1
MRVCILGGGTAGWMTAAALSKKLKNIINSITLVESDTISTVGVGEATLPHIRLFNEGLGIDESAFMKQTEATYKLGIEFCDWGRLGDSYVHPFGDFGQTINGIAFYQHLLKLTKHGDYGVLNDYAFGIVAAKNNKFQLPKDGKSPLQQAFGYAYQFDAGLYAKFLSGFAQNNGVRRIEGIVVDTLIDKSSGDVTAITLDDGQQISADLFIDCSGFRGVLIEQTLQSGYQDWSQWLPCNRAVAVPCERHGPLSPYTRATARQAGWQWRIPLQHRTGNGHVYWDEFISEDEATSVLLKNLDGPALSEPKQLYFKTGRRNHFWKNNVVAIGLAGGFLEPLESTSIHLIQEGITNLLELFPHESPSPSANTLDKAEYNARMALQFERVRDFLLLHYVATKRDDSEMWRYFSNMTLPDSLQEKIDYWLHRGYVQRYEFGSFLPPSWIAVMLGQNLRPQHYDPRVDNYNFVELKQQAQAMRTDIANGVNQAKNHADFLVAIGAASNSQLIRAKS

SEQ ID NO: 82622 - protein, 502 aa, Sphingomonas sp.
  REGION 1..502: note = tr|A0A326GT09|A0A326GT09_SPHSX Tryptophan 7-halogenase OS=Sphingomonas sp. OX=28214 GN=DI625_01820; PE = 4 SV=1
MNAPLLRRIVIVGGGSAGWMTAAALSSLLGPKDVAITLVESDAIGTVGVGEATIPDILAFHRMLGVNEAEFMAATRATFKLGIEFVDWGAKGDRYIHPFGQHGVDMQGIDFHQYWLRAREDGATDPIEAYSLCAVAAQAGRFVLPDPNPRSVLSQIRYAYHFDATLYARFLRRYAETRGVVRVEGTVGEVGQDARGDIARLTLSDGRVVEGDFFFDCTGFRALLIGQTLDAGFVDWSPWLPCDTALAVPSAHAGAPTPYTRSTARDAGWQWRIPTQRRVGNGHIFASAFQSEDAARDVMLATLEAAPLADPRRITFRAGCRERFWQGNCIAIGLAAGFLEPLESTSIYLIQEGISRFISLFPRGDIPEILRTEYNRHMRTEFEQVRDFIILHYAATTRDDTPFWNYCRTMTLPDTLLHKIELFRETGRVFRYNDELFARPSWVAVMLGQGIMPTTSDPIVATLPADDVARSLASMREAMAAAVQRMPTHGEFLLRYCPAVAA

SEQ ID NO: 82623 - protein, 491 aa, Sphingomonas sp.
  REGION 1..491: note = tr|A0A326GT24|A0A326GT24_SPHSX Tryptophan 7-halogenase OS=Sphingomonas sp. OX=28214 GN=DI625_01565; PE = 4 SV=1
MTRKRIVIAGGGTAGWLAAALLTRQLAGLVDVTLVESEAIGTVGVGEATIPTIRSFHALLGLDERDFMAATGANFKLGIAFEGWARAGDRYIHSFGEVGRSTWMGDFQHFWLEAREQGGAADIGAYCLEHEAADAGRFLGGPDTPLNYAYHFDAGRYAAYLRERSEAQGLTRIEGRIARVERDSDSGDIAALVLDDGQHIAGDMFLDCTGFHALLIEQTLGVGFEDWGHWLPTDRALAVQTRATGPAVPYTRAIAHDAGWRWQIPLQHRIGNGLVYSSRHLGDDAARDRLMASVEGQALIEPRLIRFRTGRRLAMWERNCVALSLSSGFVEPLESTSLHLVMIALTRLVQLLPFGHLGAAARNRFNDQARREIEAVRDFVLLHYHLNERPEPFWRERKEIPPPDSLAERIALFAEGAHTYQSSDDLFRTGSWTQVMLGQRLTPAAWHPLARAMPPGELGTVLRGLQSNIAATVARLPTHQQFLDSYCLSRE

SEQ ID NO: 82624 - protein, 519 aa, Sphingomonas sp.
  REGION 1..519: note = tr|A0A2E1Z167|A0A2E1Z167_SPHSX Tryptophan halogenase; OS = Sphingomonas sp. OX=28214 GN=CMN72_12940 PE=4 SV=1
MDDGKGKPDHINKVTVVGGGTAGWLAACRIAAEARRTGREIRLCLVESDRVPPIGVGEGTWPTMRNTLAKIGVSETDFVRECDATFKQGARFTGWADGSPGDSYYHPLNPPAGATRIDLARFWPGEGGGVSFAGWIDFQAALCDAGLAPKAITSAEYQGQANYAYHLDAGKFAAFLKEHATSRLGVEHIVGDVADAVLDDSGDIGHLTLSDGRSVTGDLFIDCTGFAALLIGKVYAVPFRSCRDILFADRAIAMQVPYAQDDAPIASQTISTATGAGWIWDIGLWARRGVGHVYSSAHCDDERAEKMLRDYIGPAAKGLTSRRIDIDAGYRTRFWQNNCVAVGLSAGFLEPLEASALMLVETSLDAIAERLPQNRQAMCIAARQFNTTFLHHWARIIEFLKLHYGITRRRDTDFWRDNADPASFPDELAERLEFWRHHSPNAQDFTHAREVFGWPSYQYVLNGMGFAADRSSLGDGSPNAAVARGLLEQLDRLRSEALARLPAHRDLIRAIREHGLQRI

SEQ ID NO: 82625 - protein, 400 aa, Sphingomonas sp.
  REGION 1..400: note = tr|A0A2E1Z0Y9|A0A2E1Z0Y9_SPHSX Tryptophan halogenase (Fragment) OS=Sphingomonas sp. OX=28214 GN=CMN72_12535; PE = 4 SV=1
MKPVQRIVIAGGGTAGWMAAAAIAHNMRETVDLTLVESDAIGTVGVGESTIPPLATFNRVIGVKEADFMAATNATFKLGIWFEGWRTGAADDRYFHSFGITGRDHWTAGFQHFWLHGREKGHRQPYDDYCLELVAAREEKFAHLPDNRLNYAFQLDATAYGRFLRRLAEQNGARRVEGRIAEVELDGASGDIAALKLESGERIEGDLFIDCTGFRALLIEGALHAGFEDWTHWLPCDSAIAIQTESGRPAPPYTRAMAHDAGWQWRIPLQHRTGNGLVYCSRYLSRDDALARIEGNLEGEAITDPNFLRFTTGTRRRQWHRNCVAIGLSGGFMEPLESTSIHLIQRAILRLIRMMPAGGVISDRDIAEFNDQQLLDMEQIRDFLILHYKATERRDSAFWR

SEQ ID NO: 82626 - protein, 533 aa, Shewanella sp.
  REGION 1..533: note = tr|A0A0Q0KS50|A0A0Q0KS50_9GAMM Flavin-dependent tryptophan halogenase RebH OS=Shewanella sp. P1-14-1; OX = 1723761 GN=rebH_4 PE=4 SV=1
MPNPIDSVNTANAANEQSKNIQHIVVVGGGSAGWITAGTIAAKLNNTFAGQYSVTLVESANVAPIGVGEGTWPTMRTTLKKMGIRETDFIKQCHVSFKQGAKFAKWVTGKQDDYYYHPLMLPEGQNSETSIRQWFTTDYNHSLSTSLSPQESLCEAGLAPKYITTAEYDAEANYAYHLDAGKFSEFLKKHCVNKLDVSHLVTDVVAINNDDYGYIDSLTTEDEGDIHGDLFIDCTGFNSLLLAKHFDVPFKSCKDILFVDSAIAVQVPYESEQSSIASHTISTAQSCGWIWDIGLSNRRGVGHVYASQYISEQEALNELKTYLADSVDDVESLSFRKIPINPGHREKFWHKNCVAVGLSAGFLEPLEASALLLVEISAAMIAEQLPANRESMEIVAQRFNDTFLYRWERIIDFLKLHYMLNQRNDSAFWIDNRKAASIPNSLQTLLTLWQTQVPSDNDFIHATEVFPAASYQYVLYGMGFNTHNAPWALNEKQQDLARTQFNLTKQKTQQLMNTLPSNRALLNLIHQYGLQKI

SEQ ID NO: 82627 - protein, 500 aa, unidentified
  source 1..500: note = Microbulbifer aggregans
  REGION 1..500: note = tr|A0A1C9W7I8|A0A1C9W7I8_9GAMM Flavin-dependent tryptophan halogenase RebH OS=Microbulbifer aggregans; OX = 1769779 GN=rebH_4 PE=4 SV=1
MIVGGGTAGWMAANLMAHRWRDRDVSIMLLESDAIGTIGVGEGSTPYLKGFFKSLGIDESEWMPACNATYKCGIRFPRWSTVPGYESYYHPFFSPLDREIGQVFFENVRRRRSGIDTPANPTDFFHAPFLSSNACAPHPEKPLPFELDYGYHFDAGLLGRFLREKAKAAGVEHLIDTVSTVERNGENIEAIVTEKSGRIAADFFIDCSGFRALLLGGAPDYRFRDFSRTLFNNAAVTVQIERDFSQPLLSETISEGLSSGWMWRIPLQNRTGCGYVYSNHYVSPDAAETELRKTLGLPESARVNHLKMRVGRAEEHWQGNCLGVGLSQGFIEPLEATALMLVQFTIEHFLEAFRFQDTEAPGPHKKTVFNERINQLFDGVLDYVAGHYKLNSREDTAYWRAAREEIVISDRLQALLDCWDNNGDVDRLLEQAGAELVYSRASWYSLLAGMGRFPRNLRPADAAVAREHQEVRRFCTGNLARFRQHQTQLDSLRQSVSEPA

SEQ ID NO: 82628 - protein, 504 aa, Caulobacter vibrioides
  REGION 1..504: note = tr|A0A0H3C9M7|A0A0H3C9M7_CAUVN Tryptophan halogenase superfamily protein OS=Caulobacter vibrioides (strain NA1000 / CB15N) OX=565050 GN=CCNA_02371 PE=4 SV=1
MAQQPIKALTIVGGGTAGWISAALLSRTLGPSVAITVVESDEIGIVGVGEATIPAIRLLNSLLGLDENDFLAATHGTIKLGIDFVDWHTVGQSYLHAFGPIGRPLGMAPFHHYWLRRRQAGHDESLWDYSLNARAAKAGRFDRIPQVGGGYLEGLAYAFHFDAALYAQYLRRYSEAQGVTRVEGRIVGVDQDAESGFVTSLTLQDGRKVGGEFFIDCSGFRGLLIEEALKSGYEDWRAWLPMDSAIAVPCASVTPLTPYTRATAREAGWQWRIPLQHRTGNGHVFCSDYIDAARATDVLMANLDGAPLAEPRQLRFTTGRRKQFWNRNVVAMGLASGFMEPLESTSIHLVQSALNRLLALFPDRGFNPIEIAEYNRQTALEYEYIRDFLVLHYKATTREDTPFWRAVRQMDMPDSLKARIALFSQSGRLFNQDDDLFKEASWIQVLIGQGVIPQAFHPLTGVVTDAQLDEYLANLRQIMSRAIDALPAHGDFIAKNCPSRPARA

SEQ ID NO: 82629 - protein, 503 aa, Caulobacter vibrioides
  REGION 1..503: note = tr|A0A0H3CAY9|A0A0H3CAY9_CAUVN Tryptophan halogenase; OS = Caulobacter vibrioides (strain NA1000 / CB15N); OX = 565050 GN=CCNA_02899 PE=4 SV=1
MSQDHRLRRIVIVGGGTSGWMTAAALGRFLKDGYTQVTLVESEAIGTVGVGESTIPQINIFNRMLGLDENDFVRKTKATFKLGIDFVDWQRIGHTYHHPFGPYGVDMEGVSFHAYWLKLRAMGLDDDLGAYSLQTVGARQSKFMRPNGQANSPLGQIAYAFQFDAGLYAKFLRDYSEARGVTRQEGKIASVQQDGQSGHVTSVTLESGQVIEGDLFIDCSGFRGLLIEQTLKTGYEDWSQWLLNDRAVAMPCTLGGSMAPVTRATARPHGWQWRIPLQHRLGNGYAYSSRHVSDDEALADLLSQLDGEPLADPNLIRFTPGRRKKSWNGNVVAIGLSAGFMEPLESQSIYLIQVGISRLLAHFPDRHFRQADIDRYNRTMTFEYEKIRDFIILHFKATARSDTPYWDYLREMPIPDYLADKIDLFKGSGRVFRENEELFNDTSWFAVFIGQGIYPESYDPMVDCMDETLFKARMAEIKSVIARSAEVMPGHMDFIRENCAAEG

SEQ ID NO: 82630 - protein, 513 aa, Sphingomonas sp.
  REGION 1..513: note = tr|A0A2W6SH92|A0A2W6SH92_SPHSX Tryptophan halogenase; OS = Sphingomonas sp. OX=28214 GN=DI605_05015 PE=4 SV=1
MTKGAESAPSQPASGNRAIRSIVIVGGGTAGWMAATMLVRRLEKQPVRITVVESSEISTVGVGEATVPGIRDFFREIGVTEQEVLVASRGTVKLGIEFVDWKQPGERFFHPFGLYGMRSRGVAFHQYWLKMRQAGLAIDLEDYCLATAMARANRFMLPTDRPVHDLLFFDWAVHFDAGLFAKFLAARATAQGVGHVDARIVNVRRNGESGMIDGVDTACGKSIDGDLFIDCSGFRSLLLGAALGSPYEDWTNLLPCDRAVAMPCELAGPLTPFTRSTALAAGWQWRIPLQHRVGNGYVYSSRHLSDDEAVHVLRSRLEGEALAEPNMIRFRTGHRRDFWRGNCVALGLAAGFMEPLESTSITLIQTGIEKLLALFPDRDFDPALAAEYNRTTALEYERIRDFLLLHYWANRRRGEPMWDRCRDTALPETLARKIRLFKAHGHLVRYDWESFHDPSWLSMYAGFDIVAAGHDRAADYFSLPDLESALARMRDAIGQSLALAEPHDAFLKAYCAA

SEQ ID NO: 82631 - protein, 497 aa, unidentified
  source 1..497: note = Microbulbifer aggregans
  REGION 1..497: note = tr|A0A1C9W402|A0A1C9W402_9GAMM Flavin-dependent tryptophan halogenase RebH OS=Microbulbifer aggregans; OX = 1769779 GN=rebH_3 PE=4 SV=1
MSDQNIKNLVILGGGTAGWMTASLMAKVLGKSINITLVESDKIGTVGVGEATIPPIINFNQALGLNEREFLKATKGTIKLGIQFENWLRQGESYMHAFGSIGKNFPFCDFHHFWRRSRASGQDSSLWDYSLNYQAAINNKFAHLAQIKGTNLPGISYAYHFDAGLYAQYLRSYSESKGIKRIEGTVKSVQVRPQDGFVETLILEDGQSIAGDLFVDCTGLAALLIEKTLGVDFEGWSHWLPCDRAMAVPSAGSKPIVPYTRSIAHAAGWQWRIPLQHRTGNGMVYSSKHWSDDEAREVLMGNLDGEALAEPRVIPFRTGRRTRQWDRNVVSIGLSSGFLEPLESTSIHLIQSAATRLIKSFPHQGIKAEEVAEFNRQSQVEIERIRDFIILHYKLNERRDSAFWRECESMSIPETLENKIELFRRTGKVFRDYDDLFTEVAWQQVMIGQGVFPEDHHTIADNLSEEQLSDLMNSLRTLVDGTVKSLPGHEQFLAGLS

SEQ ID NO: 82632 - protein, 492 aa, unidentified
  source 1..492: note = Paraglaciecola mesophila
  REGION 1..492: note = tr|K6ZCT9|K6ZCT9_9ALTE FADH2 O2-dependent halogenase I OS=Paraglaciecola mesophila KMM 241 OX=1128912 GN=prnA; PE = 4 SV=1
MQQDAIKKIVIAGGGTAGWMSAAALGKLFGKNIDVTLVESDAIPTVGVGEATIPTLHLFHDLLKIKESEFMAATNATFKLGIKFDDWYQKPQSYIHSFGRFNHGCWAAGFQHFWLRGRQLDIASEIGDYCPEHLACRMGKFAIAPKQERNHAFHLDAGLYAKFLRNIAQQCGVQRIEGKIDKVNLDHDNGFIQSLTLDNGRQIQGDLFIDCTGFRGLLIEQALNTGYEDWSHWLPCDSAVTVQTELNDETVPYTRSIAHHAGWQWQIPLQTRMGNGMVFCSKYISDDEAKTQLLANIQGKTLNPPRVLKFKTGVRRKLWNKNCVAIGLAGGFIEPLESTSIHLIQQSIIRLMQSLPTKKMEAALRDRFNASMREEIDNIRDFIILHYHATARKDSAFWRYCKDMPIPDSLQARMDQFAQSGHVYQGNGELFGEASWLQVMLGQGITPKAYHPIVDLMPEQELAKFLASVKQQTERRVNQLPNHLDFIRHYCQ

SEQ ID NO: 82633 - protein, 501 aa, unidentified
  source 1..501: note = Paraglaciecola hydrolytica
  REGION 1..501: note = tr|A0A136A4Z0|A0A136A4Z0_9ALTE Tryptophan halogenase; OS = Paraglaciecola hydrolytica OX=1799789 GN=AX660_09920; PE = 4 SV=1
MLESKGKPKKILIVGGGTAGWMAANLLATKWQDTEICLVESKDIGIIGVGEGSTPHLKLFFDAINVADSQWMPRCNATYKNGITFDGWSTVKGFESYFHPFAAQTDDVFTVPLFFKNIQARMQGYKVDAHPDKYFLESYLAANKLGPLPNDTFPFGLAYGYHFDSALLGQFLAEHAQSLGVKRVYGTVTKVSQNNHGELNAAILSDGTMMEADFFIDCSGFNSLLIQKTLKVGYRSFKECLFNDAAVVMPSVISQELPVETKATALSNGWAWQIPLRNRFGNGYVFSSDYIDANQAETELRQHLGLLHSDVEARHLKMQVGRVEKHWYKNCLAVGLAQGFIEPLEATAIALSFNTIAQFMQYFQQGQFSNQFEDAFNQDINSRFDGIKDYVVCHYKTNQRRDTAYWRDNAANNKISDTLNRIIQLWQHSPDFAGDMQRSKLMGSYQAKSWACMLAGYGVFPPTSSDPSIDYSMHQHEIDALNDFIRRCGLNFKSHNELLSN

SEQ ID NO: 82634 - protein, 520 aa, Novosphingobium sp.
  REGION 1..520: note = tr|A0A1W1Z0J0|A0A1W1Z0J0_9SPHN Tryptophan halogenase; OS = Novosphingobium sp. B1 OX=1938756; GN = SAMN06272759_102318 PE=4 SV=1
MVRAVRDVVIVGGGTAGWLTAAIIAAKHKARIGHDFSVTLVESPNVPIIGVGEGTWPTLRSTLKNVGISETDFFRECDAAFKQGALFAKWTTGAEDDAYYHPLVLPQRFGQLNLAPHWLAGTLNEGGDNGETFCDAVCPQGRLCDENLAPKSMVNAEYEGQANYAYHLDAGKFAPFMQRHCTEKLGVRHVLADMRQVLPDDSGDIRAIETEQAGEISGDLFIDCTGMRSLLLGQTLGVGFKDCNDVLFCDTALAMQVPYPDPQAPVATHTISTAQSAGWIWDIGLPTRRGVGHVYSSRHISREDAEAELRAYVGPAAEGLSVRKIDIRSGHREIFWKNNCVAVGLAAGFLEPLEASAIVLIELSAKMIADQMPPVREVMDVVARRYNEKTLYRWGRIIDFLKLHYVLSKRRDTAFWRDNMDPASIPERLQELMALWQYQGPYMHEEFDRVDEVFPSASYQYVLYGMGFRTEVSARTLEPEVREARRARADNADITARMLSGLPKHRDLIDRIVKYGLQPV

SEQ ID NO: 82635 - protein, 340 aa, Sphingomonas sp.
  REGION 1..340: note = tr|A0A520EHI4|A0A520EHI4_SPHSX Tryptophan 7-halogenase (Fragment) OS=Sphingomonas sp. OX=28214; GN = EOP66_17830 PE=4 SV=1
ESDAIGTVGVGEATIPDMLVFNQMLGISEAEFMRATEATFKLGIEFVDWGHKGDRYIHPFGQHGVDMEGIDFHQYWLRLNRDGGTAPIEDYSLSAVAAGAGRFALPDPNPRSVFSHLRYAYHFDATLYARYLRRYAEKRGVKRIEGVVNEVHRTARGDGIAAVTMDSCSQVKGDFFFDCTGFRALLTGQTLDIDFVDWSAWLPCDSALAVPSAHVGPPPPYTRSTARPAGWQWRIPTQRRVGNGHIYSRSFMDDDEAERVLRKGVEGALLAEPRSIRFKAGHRRQFWRGNCIAIGLAAGFLEPLESTSLYLIQEGISRFISLFPNGDMPDILRVEYNRYM

SEQ ID NO: 82636 - protein, 514 aa, Shewanella sp.
  REGION 1..514: note = tr|A0A0Q0H7Y5|A0A0Q0H7Y5_9GAMM Flavin-dependent tryptophan halogenase RebH OS=Shewanella sp. P1-14-1; OX = 1723761 GN=rebH_5 PE=4 SV=1
MKVQRIVIVGGGTAGWLAANHIGKAAQHLADVSVTLIESPDIPTIGVGEGTVPAIKQSLQSFGISETEFIRECDVSFKQSIKFCNWLDKDIHGANNSYHHLFDVPSPLGENLTDYWLQQTKQQATNQQSFSATVSPQHFICDAFKAPKLITTPEYGGKVSYAYHLNAARFAQLLAKNATTKFNVTHLKANVLDANIDEKGNLTCLKTDSLGELAFDFYVDASGFESILLAKKLKVGFIDKSKQLFVNKAIVAQVPTTEEQVIPPYTIATAHQAGWVWDIALPQRRGTGFVYSDNHMTSAQAEETFDRYLGGKLASLASREIPMKVGYREKFWAKNCVSLGLAQGFLEPIEATSILLTDFAAAYLSKRLPHALSQMPALAERFNHTMGYAWERVVEFAKLHYCISDRQDSDFWRDNRCPDSIPNPLKQKMALWQNFSPLTDDLFSRYEVFNVDNYLYVLYGMKYATQVNQCDKQYLLAAQQQTEQIRRIGQGLAAELPEHRVLLNKIKQYGLKTI

SEQ ID NO: 82637 - protein, 499 aa, unidentified
  source 1..499: note = Pseudoalteromonas piratica
  REGION 1..499: note = tr|A0A0A7EFH4|A0A0A7EFH4_9GAMM Uncharacterized protein OS=Pseudoalteromonas piratica OX=1348114; GN = OM33_09555 PE=4 SV=1
MAIPKRIVVLGGGSAGWMAASLLHHSWANKGAEITLIESDIIGVVGVGEGSTPSLKYFFEKLQIAENEWMPFCNATYKCGISFPDWTSHLDENEYFHPFYSDHDWKTGQAFIHNCNVRRQGFDIETRPNHYWLQAKLAKNNLSPKLKQPQNKELDYGYHFDSQKLGEFLKNRAIKLGIKHIIGTVEVVNNDDEGVHSLTLNCGKTIAGDLFIDATGFASLLLQKTLKVPFISYKDYLLNDSAIAIPTETRTDDDISPQTVSRALSAGWAWTIPLRNRNGNGYVYSSKYISPEDAEAELRAYLGISDRHDIKARHIKMRLGRVAKHWHLNVLGVGLSQGFIEPLEATALSCIQYTVEHFIETIEKGGDVSALQEPFNQQINTVYDAIRDYISAHYRLNTRIDSDYWLANREADSPEKLIKILSAWDDPASQFESTLKRLNAEVMYFSPSWYCLLAGKGRFKHKAQTLSSSIKTANVADIDNYCEQQATHFKPHHQALSND

SEQ ID NO: 82638 - protein, 514 aa, unidentified
  source 1..514: note = Microbulbifer aggregans
  REGION 1..514: note = tr|A0A1C9W305|A0A1C9W305_9GAMM Flavin-dependent tryptophan halogenase RebH OS=Microbulbifer aggregans; OX = 1769779 GN=rebH_1 PE=4 SV=1
MNRQRTKVINVVGGGSAGWMTAIYLNRYFNRSAKNFAIRVIESPDVGIIGVGEATVHSIRFFFAAMGLDEAELMAETNATVKSGILFRNWKKPVHGKVHEYFHPFDQQQPGGSVDISSAWFVAGRNKSERYDRAVSINSHLIDDGRCPKAISSAPYQAVTPYGYHLDAKLLARYLRKKAVEAGVEHIEATISDVTVDGEQITGVTTERGEFAGDFFVDCSGFRALLLEKLAADNWHSFADALPCNRAVAIQRPLAEGEAPKPYTVATALSNGWAWQIDLVNRQGCGYVYDADRLLPEDAERELREFLGPGSETLKCSHLEMNVGCRDRFWIGNCVAIGLSGGFIEPLESTGLHMIHLGVSLLATHLAAGEVPQALRDAYNQKMRGFYQDLKQFIVLHYCLSDRDDSEFWRAAKATAEHCPWLKQQLELWRYKICEYQDFAGTYASIFTDTNYRYVLYGMQHYPDLQFVLAEEEREALFRRFDGLVRRAKVAALDHQTFLRTLPVGERSEIVGVG

SEQ ID NO: 82639 - protein, 496 aa, Colwellia psychrerythraea
  REGION 1..496: note = tr|Q47XR9|Q47XR9_COLP3 Putative tryptophan halogenase OS=Colwellia psychrerythraea (strain 34H / ATCC BAA-681) OX=167879 GN=CPS_3734 PE=4 SV=1
MNNLSEVKNVVIAGGGTAGWMAATALAKLIGNNLNITLVESDEISTVGVGEATIPPLLTFHKMLKINEAEFMSSVNATFKLGINFENWKDNDSEYFHSFGTTGRDCWATTFLQFYNRSKKEGYQAKYEEYCLELQAGLNEKFAHLPNSGLKYAYHMDATLYAKFLRKLSEKNGVKRIEGKIEQVNIDEKSGFIKSLTLLSGVTIEGDLFIDCTGFRGVLIEQALHTGYDDWSHWLPCDRAVAVQTESTEEPKPYTRSIAHESGWQWKIPLQNRTGNGLVYCSKYLNDENAEKLLLENVEGKTLKKPLFIKFTPGQRRKHWNKNCVALGLSSGFIEPLESTSIHLIQRGIIRLMQMFPKMGITDSVINEYNYQSEEEIRYIRDFIILHYHVTNRNDSTFWRYCSKMDVPSSLSHRIELFKEHGYVFKAPWDLFAENSWVQVMLGQGLSPQNHHPIADMMSTNEQDMFLNGIKNSIEQTVKSLPTHKQYLDQYCNSKA

SEQ ID NO: 82640 - protein, 505 aa, Sphingomonas sp.
  REGION 1..505: note = tr|A0A326GSY0|A0A326GSY0_SPHSX Tryptophan 7-halogenase OS=Sphingomonas sp. OX=28214 GN=DI625_01830; PE = 4 SV=1
MTDRRVTSACIVGGGTAGWMTAAALANRLAGLGVRVRLIESEEIGTVGVGEATLPHIRAFNATLGIAEPELMRATEATYKLGIEFCDWGRIGDRYIHPFGNYGPEEDGIPFYHQWLRLRAMGDAGRLDDYSYPVIAAEQNRFRHPASEPGRVESSFGYAYQFDASLYAAFLRRYAETRGVERIEGKVVDVALDGEGGFVRDVTLADGRTIGAELFIDCSGFRGLLIEGALQSGYDDWSRWLPCDRAVAVPTESRGPLGPYTRATARTAGWQWRIPLQHRVGNGHVYCSDFISDDEAERQLVDHLDAPMQANPRRLRFTTGRRRDFWKRNVVAIGLASGFLEPLESTSIHLIQDGITELLALFPDRDFAAEDIDEYNRRMALHFERVRDFLLLHYVATERDDSPMWRHFRALTLPDSLAHKIDTWRTRGYVVPYQFGLFLPPSWVAVMLGQRLMPGAYDPRVEMIAPDALAAQAAALRAEVAGAVQATPDHADYIRRSPAAAGLAA

SEQ ID NO: 82641 - protein, 496 aa, unidentified
  source 1..496: note = Paraglaciecola mesophila
  REGION 1..496: note = tr|K6Z1Z9|K6Z1Z9_9ALTE FADH2 O2-dependent halogenase I OS=Paraglaciecola mesophila KMM 241 OX=1128912 GN=prnA; PE = 4 SV=1
MKQVIKNVVIVGGGTAGWLTAALLQKVVGTSINITLVESEAIGTVGVGEATIPPIRLVNQVLGINEAEFLRETKATIKLAIKFENWRTPNESYFHTFGSPGKSMAFCHFHHFVNRAKNLGHESTIWDYDLNYLCATQGKFAHIKAQDPVLDLPYAYHFDASLYAQFLRRYCQKLGAKRIEGMIESVQQHPSGDIAGVTLQDGQQIHGDLFVDCSGFRGLLIQQTLGVGYDDWTHLLPCDRAVAVPSERFDKTVPYTRAIAHKAGWQWRIPLQHRNGNGLVYCSSHMSDDEATHSLLNNLDSTPIGDPKVIHFKTGRRRKQWHKNVVAVGLASGFLEPLESTSIHLIQSAIVRLIHLFPHQGIDSAAVDEFNHQSELEYTQIRDFLVLHYHLTERDDSQFWRNIQSMDIPASLAHKMALFKQTGKLFREQNDLFLESSWLQVMVGQGIEPNDYHPIANNLSEPQLLNMLNKMCEVKQEPLTSLPSHDEFLKHFCKVT

SEQ ID NO: 82642 - protein, 544 aa, unidentified
  source 1..544: note = Streptomyces malaysiense
  REGION 1..544: note = tr|A0A1J4Q384|A0A1J4Q384_9ACTN Tryptophan halogenase; OS = Streptomyces malaysiense OX=1428626 GN=VT52_013640 PE=4; SV = 1
MGEPIRNIVILGGGTAGWMAASYLGKALSGQASITVVEAPAIPRIGVGEATVPNLQRVFFDYLGLPEEEWMGECNAGFKMAVKFVNWRTPGPGEPAARRDAGGSDHFYHPFGLLPAPDGVPLSHYWTRKRLAGTTGEPFDYACFVEPPLMDANRSPRFLDGTRCTNYAWHFDAARVAAFLRGFATGKQGVRHVEGTVSDVRADARGYIESVTLESGEVVGGDFFVDCSGLRGLLINKKLGEPFIDMSDHLLNNSAVATQVPHDDETHGIEPYTSSIAMPAGWTWRIPMPGRFGSGYVYCDAFADKDEAARDLCRLWGLDPEKAALNHIRFRVGRNRRAWVGNCVGIGLSSCFVEPLESTGIYFITASLYQLVKHFPERDVDPVLRDRFNREIVDMFDDTRDFLQAHFSLSPRTDTPFWRATKELTLADQIKEKIEMYRSGVPVNPPSTDESTYYGNFESEFRNFWTNGSYYSVFAGLGVRPRSSLPIISYRPGSVVTAERAFADVKARQRRLLSELPSAYEYLSHLYDADRPRHAPAKAPRRQA

SEQ ID NO: 82643 - protein, 511 aa, unidentified
  source 1..511: note = Pseudoalteromonas neustonica
  REGION 1..511: note = tr|A0A558IYE5|A0A558IYE5_9GAMM Tryptophan 7-halogenase OS=Pseudoalteromonas neustonica OX=1840331; GN = FQP85_00250 PE=4 SV=1
MNNKIQHIVVLGGGAAGWLSAGLLAAEHPKKKITLIESANIAISGVGEGTWPSMRNTLKRIGIEEIDFIRHCDASFKQGSKFINWRNINIGENYYHPFMTPEGYLETDLHAYWQHHASTQKYADAVNMQSFVCQAALAPKQLHTPEYAAVTNYGYHLDAGKFATFLKHHCVKKLNVHHIIDDVIEVKNDHDDYIHSLTTIKHGDIDGDLFIDCTGARARLIGEHYGATLITQEHILFNNSAIAAHLPYNDNQQEIASATLSTAQPHGWIWDIGLPSRRGIGYTYSDKYCDEQTAVNTLKSYAALSVGEQVAEQIQTRKLSFIPGYRTQFWVKNCVAVGMSQGFIEPLEASALAMVELSISMLSEQMPQNRTHMDLLAKRFNERFSYRWQRVIDFLKLHYILSERDESQYWRDIKKPSSIPTRLNELLAIWQYQPPSRFDLIENEEVFPSASYQYVLYGMGFHTQNTTAENTFNNAKAGQYFYQQNREKIAKYLQGLPTNRALLNQLLNNKA

SEQ ID NO: 82644 - protein, 508 aa, unidentified
  source 1..508: note = Paraglaciecola mesophila
  REGION 1..508: note = tr|K6YFZ9|K6YFZ9_9ALTE Tryptophan halogenase, putative OS=Paraglaciecola mesophila KMM 241 OX=1128912; GN = GMES_0575 PE=4 SV=1
MSKAVKKIVIVGGGTAGWLTAAIVAAQHKTDDNNGLQIVLVESSDIPTIGVGEGTWPTMKNTLQQIGLKESEVFARCHAGFKQGGKFVDWVHGNGDFYYHPFTVPLGYGRIDLAPYVEKIENYAVESNFQHHICEAGLAPRSMAEAEYKGQCNYAYHLDAGEFAEVLKEHCKNNLNVTQIIGTVDKVNLSDDGAIASITLKSDEQIDGDLFVDCTGFASLLLGQALEVPFICADKVLFNDSAIALHMPYDDATSPIATHTIATGQNAGWIWDIGLTHRRGVGHVYSSQYLSDDEAEANLRRYLGSGSDDIPVRKIGFKSGHRAQVWKKNCVAVGMAAGFVEPLEATAIMLVEISARFIADNIPPDTSLTPIIEKRFNQQMAYRWSRIIDFLKLHYMLTKRPEPYWQAHTDPDSIPESLQEDLALWKFRGPITADFDAAIELFPAASYQYVLYGMGFKPDFSRQPHLYNEQANAQKIIHRNQQLTQQLLQTLPPHREYIERWLSTQSMR

SEQ ID NO: 82645 - protein, 526 aa, unidentified
  source 1..526: note = Microbulbifer aggregans
  REGION 1..526: note = tr|A0A1C9W7M8|A0A1C9W7M8_9GAMM Flavin-dependent tryptophan halogenase RebH OS=Microbulbifer aggregans; OX = 1769779 GN=rebH_6 PE=4 SV=1
MHPVSFMRNTAVKKVVIVGGGSAGWLTAGVLAAEYAAGGDHPLQITLVESPDVPTIGVGEGTWPSMRGTLKRIGISETEFLLRCDASFKQGTRFIGWRQGGEATDGDEYCHPFTAPAGFHQQNPEPFWQPHRDEMPFGDAVCPQGHISRLHLAPKQLTTPEYAFNLNYGYHLDAGKFAELLQDHCTGCLGVEHLRERVTRIANDQNGYITALHLDSGGSIEGDLFVDCSGARSLLLGDHYGIGIFDQQGVLFNDSALAVQMPYAEEDAPIESCTLSTARENGWIWDIALPTRRGVGYTYSGSHTSDSEAELVLSQYLRMTPAANREKAPELRKISFRPGYREQFWHKNCVAIGMAAGFIEPLEASALVLVEQSAKMLAEQLPPNREVMQAVAVRFNRKLSHHWQRIIEFLKLHYVLSERRDSSYWKDHRDPNGIPGRLADSLSLWRCRSPWVEDSEVADELFPAASYQYVLYGMGFVTDPLPWAMRPEKEQIARKQFHDTIQSRERLQRSLPSNRELLQRMRLAVR

SEQ ID NO: 82646 - protein, 293 aa, Sphingomonas sp.
  REGION 1..293: note = tr|A0A520EUQ8|A0A520EUQ8_SPHSX Tryptophan 7-halogenase (Fragment) OS=Sphingomonas sp. OX=28214; GN = EOP66_12650 PE=4 SV=1
MTKRILIVGGGTAGWLTAGYLAKRLGADLPGGVAITLVESQDIGILGVGEGTFPTIRRTLATIGIDEADLIRRCGATFKQGAKFVHWRHAPGQGATDHYSHPFQVADSSDGLDLLPYWLLGHGGPENWDEVSNPQKKASDRHRAPKLPTNPDYVGPLNYAFHFDAVALAGLLREQGVKNGVRHLTDTVSEVLLDAEGAIGGVRTERNGVLGADLYIDCTGFRAELIGKAMKVPYRSCRDVLFCDRAIAAQLPYARPDDPIASYTISTAQKNGWIWDIGLDRRRGIGHVYSSDH

SEQ ID NO: 82647 - protein, 401 aa, unidentified
  source 1..401: note = Paraglaciecola hydrolytica
  REGION 1..401: note = tr|A0A136A606|A0A136A606_9ALTE Tryptophan halogenase (Fragment) OS=Paraglaciecola hydrolytica OX=1799789; GN = AX660_04270 PE=4 SV=1
MKICIVGGGTAGWMAANLFAKKWADKNIEITLLESPEVGIVGVGEGSTPTLKRFFQMLDIAESEWMPQCNATYKVNIRFAGWSPQSGIASYSHPFISQLDTFTQRALFVNCRTRRLGLATHTNPEDFLINGVLAQHNAGPLTPKNFPFRMEYGYHFDSHLLGEFLATLAKKCGVVHKQSKVVTVTKQANGDIASLITSEQQELAADWFVDCSGFASVLMQQHLGVKFNSYKDNLFNDSAVVMPSKIDAVIPVETKATAIKNGWCWKIPLTNRYGNGYVYSSDFINTEQAELEFRQHLNALDDPQACRHLKMKVGSLETHWQNNCIALGLSQGFIEPLEATALHLVQICTELFMDKFAAGGFSRLHQADYNLAAKERFERVRDYIVAHYKLNTRDDSDYWRG

SEQ ID NO: 82648 - protein, 489 aa, Sphingomonas sp.
  REGION 1..489: note = tr|A0A520FM47|A0A520FM47_SPHSX Tryptophan 7-halogenase OS=Sphingomonas sp. OX=28214 GN=EOP66_04260; PE = 4 SV=1
MAAAALAAKLAGLPISITLVESDEIGTVGVGEATLPHIRAFNLALGIDEAEMMRATEATYKLGIEFCDWGRRGDRYIHPFGDFGPTTNDVPFYQYWLKLRQSGDRSRIDEYSYPVIAAEQGRFRRPSGDLDAVESTFGYAYQFDAGLYAKFLRGFAEKRGVSRTEGKVVRVVQDGETGFVRDVVLTNGTTLSADLFIDCSGFRGLLIETALQSGYDDWSAWLPCNRAIAVPTESNGALRPFTRATARTAGWQWRIPLQHRVGNGHVYCSSFISDDEAHDQLVAGLDAPMQAEPRRLSFTTGRRREFWKKNVVAIGLAGGFLEPLESTSINLIQDGITELLAVFPDKGFAARDIAEYNRRIGLHYERIRDFLLLHYVATQRDDSEMWRHFRNLRLPDSLSERIDAWRSRGHLIQYEFGLFLSPSWVAVFLGQNLVPDRHDPRVENMSVDALTARASDVRAKVDAAVRRTPEHTAFIRESGGAARLAVAGA

SEQ ID NO: 82649 - protein, 518 aa, Sphingobium sp.
  REGION 1..518: note = tr|A0A2W6WBN9|A0A2W6WBN9_9SPHN Tryptophan halogenase; OS = Sphingobium sp. OX=1912891 GN=DI547_06225 PE=4 SV=1
MTTGTFSPSRVVILGGGTAGWLAAAYFSRTLKMPNIALVESSEIGIIGVGEGTFPTIRSTLANLGISEREFLVRANATFKQGVLFNGWADGADSYFHPFNLPIGGEDEALLPHWIADESAQRPSWADAVTVQERVIRAGLAPKLLQDPDFSGPMNYAYHFDAARFADYLRDISVAAGVERIEGTVAQVETQADGDIASLILSDGRRVGGDFFIDCSGFRALLIGETLGAPFTSCGDTLFNDRALAMQVPYPAADTPVRPYTLATAHEAGWTWDIGLTERRGVGYVYSSRHCSDDEAEATLRRYVGTQGDALTPRQLRFATGYRDRQWIGNCAAIGLSAGFFEPLESTGIMLIESALRMIGDFLVPGDRDARDAAARAFNSHMAGRFARIVHFLKLHYCITRRIDTAYWRDNADPATIPPELRDMLAQWRHRPPSRFDFVVDLETFLPPSYHYILYGMGFDTRITAGANRYPGAAEARDAFAKVRAAAGSAIAHLPDHRALLAYYHADPAFAPRTTRVS

SEQ ID NO: 82650 - protein, 510 aa, Caulobacter vibrioides
  REGION 1..510: note = tr|A0A0H3C6Y9|A0A0H3C6Y9_CAUVN Tryptophan halogenase superfamily protein OS=Caulobacter vibrioides (strain NA1000 / CB15N) OX=565050 GN=CCNA_01022 PE=4 SV=1
MQDHRIRKLVIVGGGTAGWMAAAALRRHFHGGPLEITLVESEEIGTVGVGEATIPTIRGFYQQLGLSDIEVMRATQATCKLGIRFNGWLREGQSFIHPFGHFGQDLRGVPFHHYWRKLAQAGEPTDIADYCLGASLAAAGKFMAPPRNPTSTLSVFDWALHFDAGLFAQLMRRVAEDNGVRRIEGKITKVNLRPEDGFVAWLDLEGGARVEGDLFIDCSGFRGLLIEEALHTGYESWSDLLFCDRAWAVQSEGQGDPPPYTDVTAHSAGWRWRIPLQHRYGNGYVFSSRHISDEDALAELKAAVPDPLLHEPRLIRFNPGRREQVWNKNVIALGLASGFLEPLESTSIALIETGIEKIKALFPDRDFAPELADEFNDWSRREMERVRDFIILHYWANKRRDTAFWRDCNAVTLPDTLQRKIDLFLGRGHFVRYRWEMFAPPSWMAIYAGFELLPSAVDPSLDGVDPKALSAPLAEMRKAVREVVASAPPHQAFLDQYCRPAPASASSAAE

SEQ ID NO: 82651 - protein, 533 aa, Bdellovibrio sp.
  REGION 1..533: note = tr|A0A254QEB8|A0A254QEB8_9PROT Tryptophan halogenase; OS = Bdellovibrio sp. SKB1291214 OX=1732569 GN=B9G69_05310; PE = 4 SV=1
MASLNDFVETAFDLSYLNFPKYPATEIKSIGILGGGTAGYLAALALKKLHPKIQTSVIESSKIPVIGVGESTTTEIVPFLHRTLGIDPQEFFQAVEPTLKLGIRFDWGCPGDYHFNFNFFAGHQQESYYYEDHINNANWASVLMDHHKIPVIREKNGEMISLLQSIPFSYHIDNKNLIGFLNKIVKQRQIPIIDAVVEKVHLDDNDFVTSVETDDGKRHSFDLYIDCSGFRSRILGQALKTEFISFKSSLRNNRALTFDLPNNNDIRPYTQCTTMPNGWCWTIPMRAENHYGYVHSTDYCDEAQAVKEARERFGHFEKYKMVEFRTGRHKQAWNKNVFGLGNAYGFVEPLESTAIQTAVHSIMTLCKLMPNNHQDSSSIAAINQEIAATWDTFRWFLSIHYKYNKQLDTQYWKDCRANTEIGDAKMVVDLFNQRAPLSASNLGTNSPYTACEALVFNSYSYDTLLYGQKVLEKPPIRPKMSKEEYVQRTLSYQELTKKSLTLHELFAEDYLIEGGLLEQLFEDQDTWIVETEA

SEQ ID NO: 82652 - protein, 143 aa, Sphingomonas sp.
  REGION 1..143: note = tr|A0A520FB25|A0A520FB25_SPHSX Tryptophan halogenase (Fragment) OS=Sphingomonas sp. OX=28214 GN=EOP66_07385; PE = 4 SV=1
MDRAITSIVIVGGGTAGWLAACLIAARADRDAEHPLQVTLIESPDVATIGVGEGTWPTMRRTLERIGISETEFLLACDAAFKQGSRFDGWRTGAPDDRYLHPFTTPAEAAPRDLASAWSDSGLAFAEALCAQHAVCSQDLAPR

SEQ ID NO: 82653 - protein, 515 aa, unidentified
  source 1..515: note = Paraglaciecola hydrolytica
  REGION 1..515: note = tr|A0A148KLG0|A0A148KLG0_9ALTE Tryptophan halogenase; OS = Paraglaciecola hydrolytica OX=1799789 GN=AX660_01405; PE = 4 SV=1
MQQKSIRQIVIVGGGTAGWMTAAALSNFIDPKHCQITLVESEQIGTVGVGEATIPHIRVFNQMLGIDEKDFLTQTQATFKLGIKFCGWGDQGQDYFHPFGAHGFEIDKLPFHQYWLHARNQGDTSALDDYSFSITAAKNNKFCFPDESSNSIYSSFSYAYHLDANLYAQYLRTYSEQRGVKRVTGLIAEVAKNATDGFVTSVILNDGQQIKGDLFIDCSGFRSLLINKALNVSFEDWSHWLPCNSAIAVPCETEGEPLAYTQSIAHDAGWQWQIPLQHRIGNGHVFCSEFMTKEQAQDILLNNLPAAPMAEPKQLHFKTGMHEKSWSKNCVAIGLSSGFLEPLESTSIYLIQLGIYKLMELLPDMHFSSVDEDEFNRVVKDEYLKVRDFLILHYKLSDPNKSPFWRYCHDMPIPDSLEQRMALFKETGYFSEYSAGLFLTPSWLSVFIGQGYFPDNIDPRVETLNFDAVSKQLQNMRHYLQQSVDAIPTHKNALNALLKGQAHSHSASLNLYGRR

SEQ ID NO: 82654 - protein, 471 aa, Sphingomonas sp.
  REGION 1..471: note = tr|A0A326GSE2|A0A326GSE2_SPHSX Tryptophan halogenase; OS = Sphingomonas sp. OX=28214 GN=DI625_01825 PE=4 SV=1
MTVHRILLCGDGLSARMALAALARHLPPSIAILWARAGDQRGSDLFYGNVTGPSAYAFNLTAGLDERRLTLDSTTAFSWGTRYADWGAGRSWMQSFALPFPVIDGVQFHHYLASAGADSIDPFVAGLQAARRGVFVHPPRAGANGAPHPLSRAEYGYQFDAQDYARLFDVPDRVERIGGAVASVEAADGRIAGVTMDDGRVVIADLYVDASGPEAQLLAALAGDRPSGRAIAIATSDLPADDQAPLRTVRVTSSGWESDTPLKGRTRRTVVGAVGEVAGTKATLGRRSLAWAGNCVGVGQAAGVVEPLTPAPMLLLERDIERLLALIPVTGGMAVEAAEYNRRFAEDYDHAALFQQAMFQAGGLPDGPYWQAARAEAVPERLERKLTMFERRGVLVAYDLEPFHPEDWLILHMGMGRRPARYDPLADRAERAQVTPFLSKMARTIEQGVATLPPARVYRAQLEQYLRKAAS

SEQ ID NO: 82655 - protein, 500 aa, Sphingomonas sp.
  REGION 1..500: note = tr|A0A326GJZ0|A0A326GJZ0_SPHSX Tryptophan 7-halogenase OS=Sphingomonas sp. OX=28214 GN=DI625_12285; PE = 4 SV=1
MQAPDRVRRVVILGGGTAGWMTAAALSRSFGDTVAITLLESDAIGTVGVGEATIPTIHWFNELIGIDEAEFLRATKATFKLGIEFVDWAAPGHRYFHPFGQFGATLPGVAFHHRWLKAQAEGMDVPLSALSLATQLAAEGRFAKPVGDPRSILSTLGYAYHFDAGLYAAFLRRRSEGAGVVRVEGQLRNVERDSDTGLLTALVTERGERIAGDLFIDCSGFRALLIAGEMGEGYEDWSHWLPCDRAVAVPCARVAATTPFTRSTARAAGWQWRIPLQHRTGNGYVYASRYVSDDEAAATLMANLDGEALAEPRFLRFTAGTRRRPWRGNVVAIGLSSGFLEPLESTSIHLIQSGIAKLLTLFPNRDHDPALADRFNTVFARDMDGVKDFLILHYHANTNPAPLWQHCRTMTLPETLIAREEQYRRSGRIILDADELFRDASWLAVLNGQGIVAQGYNPLADAIDSATNKAQVRQIADVVARAAPTLPLHDAALAAIIGTA

SEQ ID NO: 82656 - protein, 476 aa, Aestuariibacter sp.
  REGION 1..476: note = tr|A0A506RTY1|A0A506RTY1_9ALTE Tryptophan 7-halogenase OS=Aestuariibacter sp. GS-14 OX=2590670; GN = FJ444_00420 PE=4 SV=1
MSRLTQADLFDTPANTHTRALKSIWVVGDDVHGLSTAVAFATALKPFGIKVGVVSLTTATAKQASLHTCNGHLFEFHRRYQIPERAFMQSQGVAFFTAMSLATASRPNEPVWLANDTWLPLFNGIELHQIKRWLGESASVETSFATAAAKAGKTVFPSGQQGTLGNSFELGAVVDTEAYCAFLTQHAAERGVTFVTSNDIAFERCPRSGDITSLLLSNNQRIQCDWVVDATGSQARVIGQALKQPFESWHAHLPVCHVDETTEQSASHTTSLAVCVTDSGYYQTQHIGGVKRTVTFAVSHSVAGESESGFREPVSHNCLAVGPAAYHIDMPGMSTLHITHRIIERFLNVVPCLPAPATWGRAFNRSTKQDCKHVRDFSCLLLSAMANRQQETGKPWQVLPQLPEPLTQALALFNESARCSVPPDAMIHRQRWLEALALASSNEQAFEPLLNAVSQASGKQFLQRIATQIQSLVSQC

SEQ ID NO: 82657 - protein, 272 aa, Sphingomonas sp.
  REGION 1..272: note = tr|A0A2E1Z1H4|A0A2E1Z1H4_SPHSX Tryptophan halogenase (Fragment) OS=Sphingomonas sp. OX=28214 GN=CMN72_12955; PE = 4 SV=1
MASPMNRHIVIAGGGTAGWMAAAALARFLPNTVRITLVESEAIGTVGVGEATIPQIRLFNQRLGIAEDQLLAATNGTIKLGIEFAGWNGPESRYIHAFGTIGRPLGNVPFHQHWLRHRCTGRAGALQEYSVAACAAHQNRFAPDLGRPELQTGLAWAYQFDAARYAALLRAHAEQAGVTRLEGRINHVAVDDRGHIASLHLDDGRAVSGDFFIDCTGFSARLIGDALGVGYEDWSRWLPCDRALAVQSAATAPLNPYTRATARTAGWQWRIP

SEQ ID NO: 82658 - protein, 500 aa, Novosphingobium sp.
  REGION 1..500: note = tr|A0A1W1Y5E8|A0A1W1Y5E8_9SPHN Tryptophan halogenase; OS = Novosphingobium sp. B1 OX=1938756; GN = SAMN06272759_101386 PE=4 SV=1
MNDSGLMIRSVAVIGGGTAGWMTAAALAQALRHNCRITLVESDEIGTVGVGEATIPPIRTFNETLQIDERDFVRKTKGSFKLGIEFVDWGSLGNSYFHPFGPHGRAFDIVNLHHYWLRAREGGETAPLDEHSMAWALAKENRFAPPMPDQRNVLSTYDYAYHFDAGLYARFLREYSEAKGVTRMEGKVASVEQDAQTGFVTGVTLEDGRAVEAELFIDCSGFRGLLIEGALKAGYEDWTHWLPCDRAMAVPCENAGPLTPYTRSTAREAGWQWRIPLQHRTGNGYVFCSQFLSEDEAAEKLLSRLDGKALADPRPLRFVTGRRKTFWEKNVIAIGLSSGFMEPLESTSIHLIQAGISKLLALFPDRTFDPIVIDEYNRIAINEYERIRDFLILHYKLTTRDDAELWRYCAAMDIPDTLLMKIEHFRRYGRLVQRDADLFGAPSWLAVHVGQGNIPERTDPLADYRGIDGREWLSKLRAAMHHAALQQPAHEQFIRANCAA

SEQ ID NO: 82659 - protein, 496 aa, Sphingomonas sp.
  REGION 1..496: note = tr|A0A326GL25|A0A326GL25_SPHSX Tryptophan 7-halogenase OS=Sphingomonas sp. OX=28214 GN=DI625_09290; PE = 4 SV=1
MTDPIAHVVIVGGGTAGWMTAAAAGRFLDDGQRRITLVESDAIGTVGVGEATIPSILNFNKLLGIDEAEFLRETKGSFKLGIEFAGWHRPDSGYFHPFGSFGRDIEGINFHQLWLKLRGQAGIGPIADYSPSTVAARAAAFGPPVGDPRSPLSGMAYAYHIDATLYAAFLRRRAEADGVARVEGRIVAVERADNGHVAAVVLDDGRRIAGDLFIDCSGFRSLLLGDTLGVGFEDWSHWLPCDRAIAVPSERTEPVLPYTRATAHVAGWQWRIPLQHRTGNGVVYCSRFIDDDAAERLLLSRLDSAPTAAPRRLSFTAGQRHRMWEGNVVAIGLSGGFLEPLESTSIHLIQQGISKLFALFPDRSFSTVERNEYNRQMADNYRSIRDFIILHYHATARDDSPFWDHVRTMDVPDSLTRKLDLFRHKGRVFRYEDELFAMPSWVAVLLGQGVDPVGHDPVADALDEERLAGALRQMRSATAAAVAALPSHGAVLMRLE

SEQ ID NO: 82660 - protein, 121 aa, unidentified
  source 1..121: note = Caulobacterales bacterium
  REGION 1..121: note = tr|A0A258CAR5|A0A258CAR5_9PROT Tryptophan halogenase (Fragment) OS=Caulobacterales bacterium 32-67-6 OX=1970502; GN = B7Z13_09575 PE=4 SV=1
MDQPRRPLKKICIVGGGTAGWVAAALMAEHFKGRMAEIELVESDDIGTIGVGESTVPPFLEMLKRLGIDERDFIQKTQASFKLGIQFEDWTQKGESYFHPFGAIGVPVDISDFYPVWLKAR

SEQ ID NO: 82661 - protein, 523 aa, Sphingomonas sp.
  REGION 1..523: note = tr|A0A2E2ZQA7|A0A2E2ZQA7_SPHSX Tryptophan halogenase; OS = Sphingomonas sp. OX=28214 GN=CMN73_02085 PE=4 SV=1
  VARIANT 29..31: note = Xaa can be any naturally occurring amino acid
  VARIANT 35: note = Xaa can be any naturally occurring amino acid
  VARIANT 63: note = Xaa can be any naturally occurring amino acid
  VARIANT 72: note = Xaa can be any naturally occurring amino acid
  VARIANT 78: note = Xaa can be any naturally occurring amino acid
  VARIANT 80: note = Xaa can be any naturally occurring amino acid
  VARIANT 83: note = Xaa can be any naturally occurring amino acid
  VARIANT 276: note = Xaa can be any naturally occurring amino acid
  VARIANT 364: note = Xaa can be any naturally occurring amino acid
  VARIANT 485: note = Xaa can be any naturally occurring amino acid
  VARIANT 489: note = Xaa can be any naturally occurring amino acid
MDRPIAQIVIVGGGTAGWLAACTIAARAXXXAPAXLQVTLIESPDIPTIGVGEGTWPTMRHTXQRIGISETXFLTACXAXFKXGSRFDGWRTGAPDDRYYHPFTPPVEGDPRDLIAAWRDTGPATDFAATACAQPAICDRMLAPRQRNMPEYGGALNYAYHLDAGKLAALLARHGTERLGVRHIRDHVDAVEATADGDIAAVTTQGSGRVAGDLFLDCTGHAALLLGGHYDVPIIDCSDTLFNDRALAVQVPVAPYSPIASQTTGTAHAAGWIWDXGLPTRRGIGCVYASRHMSDDDAEATLRDYIVRAVPGADPHALAPRRLSFRSGHRERFWERNCLAIGLSAGFVEPLEASAIVMIELSLXALLDNFPATRSAMDLHARRFNALFRTRWDRIVEFLKLHYVLSERDEPYWRAHRDPATIPSRLGELLEIWRHHPPSTADLDRVDEIFPAASYHYVLYGMGFSPPPDGAIRTGPREPLTRAFXQTHXRARALAAALPDNRAYLDAVRAAGLTPSQEHAIQS

SEQ ID NO: 82662 - protein, 506 aa, Janthinobacterium sp.
  REGION 1..506: note = tr|A0A0S4K1X2|A0A0S4K1X2_9BURK Tryptophan halogenase; OS = Janthinobacterium sp. CG23_2 OX=1706231 GN=BN3177_2099; PE = 4 SV=1
MTDQGIKQIVIVGGGTAGWMSAAALAQLLPVGHHYRLIESDQISTIGVGEATIPSIRNFNLHLGIDENDFIRATQGSFKLGIEFIDWGYKGSNYIHGFGSVGRDQPTANFFHYWLKMHQAGQADSLEPYSINTMAARLGKFSRGRPDLPNSPLADLSYAFHFDAGLYARYLRTYSEARGVQRTEGRIIDTELHPDGSIAALLMENGERIGGDFFIDCSGMAGLLIEQALHTGYDDWSDWLPCDRAIAVPCEAHGPMAALTRSSAHTAGWQWRIPLQHRTGNGHVFSSKFMSADEAQAILMGNLDGQPLAEPRLLKFTTGKRKRAWNKNCVAIGLSGGFMEPLESTSIHMVKTALMRLISFFPDKGFDQVDIDTYNRLCDKEYDQIRDFLILHYKASTRDDSPFWRYCRDMEVPAALRGKLDLYASHGRILRENEELFPEDSWLQVMHGQGLRARGYNPVVDQRAPDEIADFLQGTQAVIRKCVDAMSSHEAFIKANCQAPPMRRAA

SEQ ID NO: 82663 - protein, 500 aa, Aestuariibacter sp.
  REGION 1..500: note = tr|A0A506REF4|A0A506REF4_9ALTE Tryptophan 7-halogenase OS=Aestuariibacter sp. GS-14 OX=2590670; GN = FJ444_14690 PE=4 SV=1
MQSPLKKILILGGGSSGWMTAAALGKILKNHPCEIQVIESEDIGTVGVGEATIPQILLFNDLIGLDEDTFIKRTQGTFKLGIQFKDWRNVGHSYYHAFGEVGKNMEGVHFYQYWLKMRQQGKAAPLDEYTLSSLACNEKRFMRPIEAGNSPLSNIAYAFHFDAGLYAKYLRECAEGHGVIRTEGKVTQVNQHPNGDIRSLVLENGEEHQADFFIDCSGFRALLIEQTLKTGYEDWRHWLPCDRAIAAPSTLTEEPWPFTRAAAQQAGWQWRIPLQHRVGNGHVYSSEFMSDHDAERTLRENIDGELLADPRLIKFVTGKRKKFWHKNCLAVGLSGGFMEPLESTSLHLVQVAISKFFSFFPFQTPTQSDIDEYNAQMDFEFTRIRDFLILHYHVTEREDTPFWRYCKHMSIPDTLQEKIDQFKANGRINRFNNELFNDLSWFEVMYGQGLRPQGYHALADIFGDDELAKRLEGIQRVVRKSVDYMPSHAEFIAKTCPAKP

SEQ ID NO: 82664 - protein, 514 aa, Novosphingobium sp.
  REGION 1..514: note = tr|A0A0N0KD97|A0A0N0KD97_9SPHN Tryptophan halogenase; OS = Novosphingobium sp. AAP93 OX=1523427 GN=IP83_00115 PE=4; SV = 1
MTPDPLRSILIVGGGTAGWSAAALLSAVLAPSGCKITLIESSDVPTVGVGEATIPPVFEFLSNCGVDEIDFIRHCQATFKLAIRFDDWLERGHSYWHPFGNLGVTINQRPFHHYWWKNKAAGHDETFADLCPAIALAQDGKFAFPPPDGSYPGGALNYALHFDAGLVAEYLRKHATARGVTHVDARIVGAELADDGAIAAVRLTDGRRIEADFFIDCSGFRGLLIEEALHAGYEDWTSWLPCDRAVAMPTATVGPPAPYTISAAHEAGWRWRIPLQSRVGNGYVYSSRHVSDEQAAETLREAAAGEPLAEPRFLRFTAGHRKAMWVKNCLAVGLSSGFLEPLESTSIHLIHTALNRLLDYFPDRHCDPALAAAYNREAADEYAHIRDFLLLHYVPNRRHGEPFWDEIRANPLPDSLAAKLELFRRTGRIVSRRRELFADISWFFVAAGMGIVPEALDPLADAADFGEVRRVIGQIREVMGRYRAAAPTHLAMLARLLDPALKGRPNFKQTWGGA

SEQ ID NO: 82665 - protein, 494 aa, Sphingomonas sp.
  REGION 1..494: note = tr|A0A520FNJ2|A0A520FNJ2_SPHSX Tryptophan 7-halogenase OS=Sphingomonas sp. OX=28214 GN=EOP66_03715; PE = 4 SV=1
MDTAKVRRVVIAGGGTAGWIAAAALVKQLGPLLDITLVESEDIGTVGVGESTIPTSRTFHNFLGIDEQAFMRATQASFKLGISFENWGRAGERYIHSFGTIGRKTTWMGDFHHLWLHARDRGFAGSLGEYCFELKAADAGRFATASDAQINYAYHLDAGRYARFLRELSEPAGVRRVEGKIERVEQHGETGDVEGLVLESGVRIEGDLFLDCTGFRGLLIEQTLQSGYEDWTQWLPTDSAIAVQTASVGPAVPYTRAIAHEAGWRWRIPLQHRVGNGIVYAQDCLSDDEARAKLLAGIEGEVLTEPRVIRYRTGARRKVWNKNVVALGLSSGFVEPLESTSIHLMKIAVTRLIQLFPFDGINDALTARFNAMSHREAEGVRDFIILHYHLNQRDEPLWRRCREMQIPDTLAERIALFREDAQAYQASEDLFRVDSWVQVLLGQNLQPGGYHRMGQMISDANLKRALGDIRGDVENRVAKLPAHQDFLDRYCSAR

SEQ ID NO: 82666 - protein, 514 aa, Sphingomonas sp.
  REGION 1..514: note = tr|A0A2E1Z219|A0A2E1Z219_SPHSX Tryptophan halogenase; OS = Sphingomonas sp. OX=28214 GN=CMN72_14550 PE=4 SV=1
MVARTRHIVIVGGGTAGWLTAGVIAAKHRARIPHDLTVTLVESPTTPILGVGEGTWPTLRSTLARIGVSETDFFRECDAAFKQGALFARWTTGAADDAYYHPLMLPQHFSKLNLVPHWLAQQEASSFCDAVCPQGRLCDDGLAPKTIATPEYDGVANYAYHLDAGKFAPFLQRHCCGKLGVRHVLADVREVRLHENGDIRAIDTEQAGEIAGDLFIDCTGFRSLLLGDAMGVGFRDCSDILFCDTALAVQMPYPDAQSPIATHTISTAQSAGWIWDIGLPTRRGIGHVYSSRHQSQDAAERELRAYLGPGGADLPIRKIAIRSGHRETFWKRNCVAVGVAAGFLEPLEASAIVLIELSAKMIAEQLPACREVMDVIASRFNETTHYRWGRIIDFLKLHYVLSKREDSEFWRDNRLPETVPDRLRDLMLLWRYQSPWFHDEFDRVEEVFPPASYQYVLYGMGFETEVDPTMLSGDRRLADQAMRENAVQTDRLRQGLPRHRDLIAKIHQHGLQPV

SEQ ID NO: 82667 - protein, 500 aa, Novosphingobium sp.
  REGION 1..500: note = tr|A0A1W2ATV5|A0A1W2ATV5_9SPHN Tryptophan halogenase; OS = Novosphingobium sp. B1 OX=1938756 GN=SAMN06272759_10560; PE = 4 SV=1
MTASHLPRRIVIAGGGTAGWMTAAAIARTLGAVAQVTLVESEQIGTIGVGESTIPPLVMYNRLLGINEAEFMRATQATFKLGINFENWRVQGENYFHSFGGTGKDHWSAGFQHFWLNGLERGHTEPYGEYCLELKAAEAGKFAHLPDDRMNYAYQLDSALYARFLRAMAERDGTTRIEGKIAHVELDGESGDIAALVLEGNRRIEGDLFIDCTGFRALLIEGALRAGYDDWTHWLPCDSAIAIQTSSVRPPVPYTRAIAHEAGWQWRIPLQHRQGNGVVYCSDYLSHEAALEKLLSTVEGEKLVKPNHIRFRTGARRKQWHRNCVAVGLSGGFMEPLESTSIHLIQRAILRIVRMLPAGAISTRDIDEFNDQQFTDMEQIRDFLVLHYKATDRRDTPFWRHCASMEIPASLEHKIELFRETGRVFRKNEELFAENSWVQVMMGQGINPQSHHPVAAKLRDEELAHLLGSLREQVSRTVAALPAHGDYVARYCGAEVPAAA

SEQ ID NO: 82668 - protein, 516 aa, Novosphingobium sp.
  REGION 1..516: note = tr|A0A0N1BZ33|A0A0N1BZ33_9SPHN Tryptophan halogenase; OS = Novosphingobium sp. AAP93 OX=1523427 GN=IP83_00505 PE=4; SV = 1
MSSTETSGSASTPGPVRIVVAGGGTAGWMAASALGHFLDTGFTVTLVESEEIGTVGVGEATIPQIRMFNQALGIDEDAFIRATQATFKLAIEFVGWGAPGERYMHAFGDVGRDVGLCAFHHYWSRARRLGLAGPHGDYAINDVAAHAGRMHRGAPLTSRNVPEMPHAFHFDAGLYAAFLRQFAESRGVTRREGKIAEIRQDPLSGDITQLVLTSGEEIAGDLFIDCTGFRGLLIGGAMGSGYIDWTNWLPCDRALAVPSGRVEDFTPYTRATAHDAGWQWRIPLQHRTGNGRVYCSAFTSDEAAAESLLAHLDAPALADPRPIRFTTGRRAEAWRGNVIAVGLSSGFLEPLESTSIHLIQSAISRILKFLPGKDQTQAARDEYNRQFTFEMERIRDFIVLHYHVNQRPEPFWQAMRNMALPDSLAERIELFRANGHIFRHGDELFSEVGWFQVMAGQGIVPERSHALAETISEADLKGYLETLNGLYRREVERYPGHAEFIARHCAAPPLKMGAAA

SEQ ID NO: 82669 - protein, 516 aa, Novosphingobium sp.
  REGION 1..516: note = tr|A0A0N1BS89|A0A0N1BS89_9SPHN Tryptophan halogenase; OS = Novosphingobium sp. AAP93 OX=1523427 GN=IP83_11245 PE=4; SV = 1
MNDRVRQVVIVGGGSAGWIAAARIAAAHRPGGENGVSVTLIESETIGTIGVGEGTWPTMRNTLRKIGISETEFFRSCDAAFKQGARFTGWVTGEPGDSYYHPLNPPQAATQINLSAHWLRRQDGAGTDFAHAVDFQSALCDAGLAPKSISTAEYVGLANYAYHLDAVKFAALLKKHCVEKLGVRHITDDVTGVKVDDAGFVTGVEAKQTGFLAGDFFVDCTGFAALLIGQTYGVPFIDCGDVLLADHAVALQVPYEHEDDPVASQTNSTAQGAGWIWDIGLPTRRGTGYVYSSRHTSHDEAEATLRAYLGPVAEGLDTRRIPIRSGHRQRFWEKNCVAVGLANGFLEPLEASALMLIETAVDFITERLPQSRAVMAPLARQFNAAFEHHWARIIDFLKLHYVLTKREDTAFWRDNRDPATVPDRLLEQLELWRHLPPGPQDFPHQPEVFSWPSYQYVLHGMGFECNLAEGSQVTAEAALAQRCFMATQRQQEQALAALPSHRALLDAVRVHGFQAV

SEQ ID NO: 82670 - protein, 517 aa, Sphingomonas sp.
  REGION 1..517: note = tr|A0A2E2ZPH4|A0A2E2ZPH4_SPHSX Tryptophan halogenase; OS = Sphingomonas sp. OX=28214 GN=CMN73_00525 PE=4 SV=1
MARNILIVGGGTAGWITAGYLARLLGSDRPGGIAITLVESADIGILGVGEGTFPTIRKTLARIGISESDLVRECDASFKQGARFVDWLHAPGTASRDHYFHAFQSAEDLNGPELLPYWLIGLAGDGEWDDVASPQKRAADAHRAPKLPTHPDYVAPLNYAFHFDAVSLAKLLRRQAITNGVRHITDTVSDVLLGEDGAISGVRTAEHGILDAELFVDCTGFRAELIGKALDQPWKSCRDTLFCDSAVALQLPYATPDEPIASYTVSTAQKYGWVWDIALGSRRGLGHVYSSAHGGPDEAERILREYAGPASKDLTTRHFRFDAGYREVNWHKNCVAIGLSSGFFEPLEATGIVFSEIAASLLANLFPWGGDYESSARQFNANLKLRYERARDFIKLHYSLTQRRDSEFWIENADPATSPDSLLELLDRWRFRPPNELDFDPNTDIFGAPSWQYVLYGMGWKTDLSAKAPVFRLGQDAAQAFATIRRQGEYAAQQLPSNRDLLRFARTGRFGSSGPAA

SEQ ID NO: 82671 - protein, 459 aa, Sphingomonas sp.
  REGION 1..459: note = tr|A0A2E1YVS3|A0A2E1YVS3_SPHSX Tryptophan halogenase; OS = Sphingomonas sp. OX=28214 GN=CMN72_03120 PE=4 SV=1
MTSRAIRTIAVVGNGIAGWNAAAALKKRVPGISVALVPVADLKPGLADLCASAAPSIGDFHRDIGLSESDIVLRTGAAFRLGSRYQDWHGPGSGFFHAYGPAGFAQGQLPFAALWLRAGSPRPYQDYAPGAVLAEQGRFLPGDYAHGLMLDLHVYPRFLAAYARHLDVLVSEGTLAGMDVSDGRVTGLRLSDGSTLRADMYVDASNVAASLMRALADPDWQDWRQWLPADTLERSRTAPDPGLPPFDRVRAISNGWEATISLPACTETLRVTAKPGDAGASAVRFASGRRAQAWSGNVVAIGDAYAVIEPLEGAPLHLLHSQIDRLVGSLPDRDFDAIELAQYNRETGEEADRVRDFLIAHYVLSGRCDAAPPLLAETLALFAHRGRLPMRDGESFDKHSWLALLFGHGTVPAHADPLAVALDTGEAQRALADHRLHLEQGAAKAPAHSAYLKSLEASA

SEQ ID NO: 82672 - protein, 499 aa, Sphingomonas sp.
  REGION 1..499: note = tr|A0A2E1YVU9|A0A2E1YVU9_SPHSX Tryptophan halogenase; OS = Sphingomonas sp. OX=28214 GN=CMN72_03125 PE=4 SV=1
MEGSIVVPIRVVILGGGTAGWMSAAALSILLGRQMAQVTLVESEEVGIIGVGEATLPHIRAFNERLGIDEADFMRATGATFKLGIEFRDWARIGDSYIHPFGIFGHDVEGVGFHHYLNRAGRIATLFDYSVPIVAAREARFAPPAADPRSLASTYGYAYQFDATRYGPYLRNRAEAAGTRRIEGRVEAVERSEHGDIAALRLSDGRRVEGDLFVDCSGFRSLLLGQACDEPFEDWSRWLPCDRAVAVPCEGKGPLLPYTSAVAMSAGWRWRIPLQHRTGNGYVYSSAHIGEDAAREQLLSELEGPPLAEPRLLRFKAGRRRRNWVRNVIGIGLSGGFLEPLESTSIYLIQIAITRLIELFPQNPAAAIDRDAFNRAIDLEYDRIRDFLILHYHATQRDDSPFWNHVRTMEVPESLSEKMALFRKRGRVARYREGLFLEPSWLAVYFGQRIVPTGYDQRADGPDDGALARALDQLRQEVAAAAAALPDQSVYLERVGALA

SEQ ID NO: 82673 - protein, 515 aa, Aestuariibacter sp.
  REGION 1..515: note = tr|A0A506RLU3|A0A506RLU3_9ALTE Tryptophan 7-halogenase OS=Aestuariibacter sp. GS-14 OX=2590670; GN = FJ444_06470 PE=4 SV=1
MNTTTSKTRVVIVGGGTAGWLTAGIIAAHNPLLGEHSTTDVILLESPDVKNLGVGEGTWPTMRDTLKKIGLSEREFLTCCDASFKQASKFVGWRDSASHHYYHPFTAPAGYGVVSLADAWIAAGSPNDFESWVSAQGHACERYLSPKLSQLPEFAFTYNYGYHLNAGKFVAMLQAHCTEKLGVIYRQGHVAQIESHDNGAIQALVLEDGSRVNGDFFIDCSGFAAVLMGKHYQIPFVSQRAVLFNDTAIAAQVHHADEQSPIASATVATAQEYGWIWDIALQSRRGIGHVFASEFCTTEQAEHTLRNYIANDVNLCQEDIATRVIRFDPGHRKYFWHHNCVAIGVSAGFVEPLEATALVLIEKSAQWIAEQLPRTPAAMQVLAKRFNQLTNSRWQEIIDFIKLHYVLSDRTDSPYWRSHQHHESWTESLSDSLQLWLSQPPGLYETNNRQELFSSASKQFVLFGMGFRAEQWQSSGLLARHQPLLDRFRQEIQQQVNRVNTQLLTNREYLQKLRR

SEQ ID NO: 82674 - protein, 219 aa, unidentified
  source 1..219: note = Microbulbifer aggregans
  REGION 1..219: note = tr|A0A1C9W7J7|A0A1C9W7J7_9GAMM Flavin-dependent tryptophan halogenase PrnA OS=Microbulbifer aggregans; OX = 1769779 GN=prnA PE=4 SV=1
MMKRRHSCGDTLGPGSEKLDAKHIKMRLGYREKVFHKNCVAVGLAAAFLEPLEASAIFLVEAACNMLGELFQRNSEMLERLEKKYNASFIGRWNSVVDFIKLHYYLSGRTDSDFWIENTRPETAPESLREYLDFWQYYPPSRFDLSSSLEPFVRESYEFILYGMGYGNYQYDNPARLPHLEYARENFARIDRMRREVPTQLVTNRRLLDQLKDFRFQSI

SEQ ID NO: 82675 - protein, 501 aa, Sphingomonas sp.
  REGION 1..501: note = tr|A0A2E2ZQB1|A0A2E2ZQB1_SPHSX Tryptophan halogenase; OS = Sphingomonas sp. OX=28214 GN=CMN73_02070 PE=4 SV=1
MSAMDRRLRRVVIAGGGTAGWMAAAAIARVLGSAVDVTLVESDAIGTVGVGESTIPPLVTYNRLLGINEADFMRATNATFKLGINFEGWRDGTDSYFHSFGITGKDHWSAGFQHFWRYGREKGHDQPYADYCLELGAAMAGKFAHLPDNGLNYAYQLDATAYARFLRNMAEGDGAKRIEGRIAQVELNGETGDIAALILDSGQRIEGDLFLDCTGFRALLIEGSLHAGFDDWTHWLPCDAAIAVQTENVRPPIPYTRAMAHDAGWQWRIPLQHRTGNGLVYCSRYLSQDDALERLLGNLEGKPLTEPNKLRFTTGARRRQWHRNCVAIGLSGGFMEPLESTSIHLIQRAVLRLIRMMPLDRISPRDVAEFNDQQHVDMVQIRDFLILHYKVTERGDSAFWRQCRDMEIPDTLTQKIELFRETGRVFRRNEELFAENSWVQVMLGQGIVPQSHHPIAEKLTDEELASLLSNLRDLVTRTVSGLPDHAAYVARYCGARQPETV

SEQ ID NO: 82676 - protein, 500 aa, unidentified
  source 1..500: note = Paraglaciecola hydrolytica
  REGION 1..500: note = tr|A0A136A6F5|A0A136A6F5_9ALTE Tryptophan halogenase; OS = Paraglaciecola hydrolytica OX=1799789 GN=AX660_05190; PE = 4 SV=1
MNTRQNIVIVGGGTAGWMAANMLQQQLGSSGFNCILIESPDIPTIGVGEGSTPQLKSFFSALGITESQWMPQCHATYKNGISFKNWSVDKDHREYFHPFPSAVDQHTARGFLQHCIAKQQGRNVDTQTDRFFLAAQLAKQNRSPILKSGAVGISYGYHFDSVLLGKYLQKLTVKQGVQHIKSTVVGIKLHLNGDIKSLQLADGQVIEAELFVDCSGFKALLIQQTLGTEFISYRSQLFNDSAIALPSTQLTPLTSQTVATALNHGWAWEIPLSNRTGNGYVYSSDYCSAEQAETELRQKLNMINYPVAAKHLKMKVGRVALHWNNNCLAVGLSQGFIEPLEATALHLVQHTIESFISAFSAGNFSTQHQAQFNQRINARFDGIRDYIVCHYKVNQRHDSAYWRDNRANTNMSNSLQAILECWDKGGDLLAEINQQQIAGYYSAVSWYCLLAGYGRFVATQHKPTEALVNISEIERSLQQLSQQFLDQNQALDFLAATTEI

SEQ ID NO: 82677 - protein, 503 aa, Asticcacaulis sp.
  REGION 1..503: note = tr|V4NC58|V4NC58_9CAUL Uncharacterized protein; OS = Asticcacaulis sp. YBE204 OX=1282363 GN=AEYBE204_06625; PE = 4 SV=1
MSEIKTIVIAGGGTAGWMCAAILAHYLPKSMRIHLVESEQIGTIGVGESTVPPFLELIRRLGIDEQDFIQKTQGSFKLGIRFKNWRRKGEEYYHPFGSIGGIIEGQDFYQHWLRAQALGDDAPLQAFAPATEMAKHHKFMLPFKAPRTPIAAASFALHIDASLVAKYLRGHAEANGVTRHEGMIGQVHHHANGFISALELSDGRRLEGDLFLDCTGFRALLIEKALKVGYIDWSKELLCDRAIAVQTENVSDPHPYTYAEAQDAGWRWRIPLQHRAGNGYVFSSKHLSDDDAIKTLMAQVEGEPLMKPMVIPFRTGMREALWSKNCVSVGLASGFIEPLESTAIHLIYRSMDFLLRYFPGTDCDENLIRDYNLRMAGDYAEIKDFVVLHYCATERDDTPFWRDVQAAPVAQTLREKIALFRENGSLREGVDELFRAPSWQSVMEGMGVRPRRHSPLVDRLSEAELRATLDAARTQLPPFVAQLPGHGDFLRTHCPAERPKVSA

SEQ ID NO: 82678 - protein, 498 aa, Aestuariibacter sp.
  REGION 1..498: note = tr|A0A506RKA7|A0A506RKA7_9ALTE Tryptophan 7-halogenase OS=Aestuariibacter sp. GS-14 OX=2590670; GN = FJ444_09235 PE=4 SV=1
MNKPDISANKVNKVIIAGGGTAGWMAAAALSRLIGKSVNVTLVESKDIGIVGVGEATIPPIRTFHKLLGIDEKAFMRATNATFKLGIEFANWREPDHAYIHSFGVTGRECWAGEFHHFWMRAQQEGLGSAFGDYCFELKAAQQYKFGMSDRMPINFAYHFDAVAYGKFLRQFAEKLGVTHVEGDIDTVNMHVTSGDIESLTLKDGRTLAGDLFIDCTGFKGLLIEQALHTGYENWSHWLPCDRAVAMQTESVEAPAPFTRSVAHEAGWRWQIPLQNRVGNGLVYCSRYMSDDQAKQTLTDQVTGNPINEPRVIQFTPGKRRLGWNKNCVALGLASGFIEPLESTSIHLIMTGIIRLLRLFPFDGVTQSAIDEYNNKYNSEMAAILDFIVMHYKVTHRDDSLFWQHCQRMAIPDSLTHKINLFKETGRVFLDDGDIFRVDSWTQVMLGQGLVPAQYHRVADEMSIEELTRFMNGLHQHVSQQVQALPAHGDFLKQYLGV

SEQ ID NO: 82679 - protein, 538 aa, Burkholderia sp.
  REGION 1..538: note = tr|A0A2G1S4I3|A0A2G1S4I3_9BURK Tryptophan halogenase; OS = Burkholderia sp. AU18528 OX=2015350 GN=CFB52_031000; PE = 4 SV=1
MSNPIRNIVIVGGGTAGWMSASYLVRALQQQANITLVESAAIPRIGVGEATIPSLQKVFFDFLGIPEREWMPQVNGAFKAAIRFVNWRKSPDGSRSDHFYHLFGNVPNCDGVPLTHYWLRKREQGFQQPMEYACYPQTEALDGKLAPCLADGTRQMSHAWHFDAHLVADFLKRWATERGVKRVVDEVEQVHLDDRGYISRLSTKEGRTLEADLFIDCSGMRGLLINQALKEPFIDMSDYLLCDSAVASAVPADDARDGIEPYTSAIAMNSGWTWKIPMLGRFGSGYVFSSKFTSRDRATADFLDLWGLSDKQPLNQIKFRVGRNRRAWVNNCVSVGLSSCFLEPLESTGIYFIYAALYQLVKHFPDTSFDPRLIDAFNAEIVYMFDDCRDFVQAHYFTTSRDDTPFWRANRHDLRLSDAIKEKVERYKAGLPLTTTSFDDSTYYDTFDYEFKNFWLNGNYYCIFAGLGLLPDRSLPLLRHRPESIDKAEEMFARIRREAERLRTTLPTNHDYLRSLREGDAALSRSEPGPTLATPEIL

SEQ ID NO: 82680 - protein, 500 aa, Novosphingobium sp.
  REGION 1..500: note = tr|A0A0N1LJH2|A0A0N1LJH2_9SPHN Tryptophan halogenase; OS = Novosphingobium sp. AAP93 OX=1523427 GN=IP83_17115 PE=4; SV = 1
MTGTYAKRRVVIAGGGTAGWMAAAALARTMGDAIDLVLVESEAIGTIGVGESTIPPLVAYNRLLGIGEADFMRSTQATFKLGINFENWRVEGENYFHSFGITGRDHWSAGFQHFWMHGLTKGHKASYDDYCIELQAAMKSKFAHLPDNRINYAYQLDSGLYAVFLRKLAEADGCRHVEGKIAEVQLHPETGDIAALRLESGQRIEGDLFLDCTGFRALLMEGALHVGYDDWTHWLPCDSAIAVQTASVRPPVPYTRAIAHDAGWQWRIPLQHRGGNGIVYCSRYLSQDAALERLLGTVEGEVLTKPNVIRFTTGARRKQWHRNCVAIGLSGGFMEPLESTSIHLIQRAILRVIRMMPMGEISPRDVAEFNDQQLTDMEQIRDFLILHYKATDRRDSPFWRQCAGMDIPESLTHKIELFRETGRVFRKNEELFVENSWVQVMMGQGIMPKSYHPVATKLSDAELAHLLAGLRDSVAKTVAGLPDHHAYVAQYCGAQEARAA

SEQ ID NO: 82681 - protein, 506 aa, Xanthomonas campestris
  REGION 1..506: note = tr|A0A3E1L1H9|A0A3E1L1H9_XANCA Tryptophan 7-halogenase OS=Xanthomonas campestris OX=339; GN = D0A35_14470 PE=4 SV=1
MIPAPLRNIVIVGGGTAGWMAAAAFARVLGPSFNVQLIESEQLGTIGVGEATVPHIKAFNNLLGIDEAEFVRQTQGSFKLGIEFVDWQRPGTSYIHGFGTQIGHPLGLLPFHQYWIKQQRRGKAQPLGAYTLNTVAATRGKFMTSAGDVPANSPLANIAYAYHFDASQYARFLRGYAEQRGVTRLEGLIEQVQLNAHTGHVQSVQLASGQVVSGDLFIDCSGFRGLLIEEALHTGYHDFTHWLPCDRALAVPCEKVGPPTPYTRSTARAAGWQWRIPLQHRTGNGYVYSSAHVSDDEAAATLLANLDGTPLADPRPLRFTTGRRKQFWNRNVVALGLASGFLEPLESTSIHLIQSGISKLLELFPRESISPVLVQRYNDRLAFEFDRIRDFLVLHYHATERDDSAFWRHCRTMPITPELQTTLDLFRDSGRFYRNAEEMFAEISWVQVMVGQGILPQGYHPLVDQVPDTDAEGFLASVAQTISHCVDVMPTHQQFIDRYCRADPVR

SEQ ID NO: 82682 - protein, 521 aa, unidentified
  source 1..521: note = Xanthomonadaceae bacterium
  REGION 1..521: note = tr|A0A2A3VR17|A0A2A3VR17_9GAMM Tryptophan halogenase; OS = Xanthomonadaceae bacterium NML93-0792 OX=2032566; GN = CMZ82_01490 PE=4 SV=1
MDHADTPPGAIRRVVIAGGGTAGWLAACALAHQFRDRLDITLVESEQIGTVGVGESTVPPIRTFHRFLQIDEQDFLRAVAGTFKLSISFENWRRPGDRYIHPFGITGQGTWAAGFHHCWLDAQRRGMVSELGDFCLETLASRADRFALGTDPQVNYAYHLDAGLYARFLRRIAERHGLTRIEGKIREVTRHAHSGDVEALVLEDGQRLEGDLFIDCTGFRGLLIEQTLQTGYEDWSEWLPSDRAVAVQTESDGAPVPYTRAIAHEAGWRWYIPLQHRVGNGLVFSSRYMSDDEAHAKLLRDVGGRPLRDPWLVPFRTGRRRKAWNGNVVSLGLASGFIEPLESTSLHLTISAVVRLVQLFPFDGISPALVEVFNDVSRAEMEHVRDFIVLHYHATQRDEPMWVACREMALPPSLDIRLRAWRERAHAWQNADELFRVDSWTHVLLGQGIAPGPPHPLARALADDDLRRLLHGIRAPIERAVAQMPSQQAFIARYCRADTGVWRAPAPSGDIRPPASRTGGA

SEQ ID NO: 82683 - protein, 498 aa, Xanthomonas campestris
  REGION 1..498: note = tr|A0A2S4JP00|A0A2S4JP00_XANCA Tryptophan halogenase; OS = Xanthomonas campestris OX=339 GN=TR80_10415 PE=4 SV=1
MTQARIRKVVIAGGGTAGWVAAAALAHQFRGLLEIVLVESEQIGTIGVGESTVPPIRAFHRFLQIDEQEFLRAVAGTFKLAISFEDWQGQGDRYIHPFGSTGQGTLVCAFHHFWLEAQRRGMHSGFDEYCLEAQAARADRFAVLQQPAVNYAYHLDAGLYARFLRTHAQRYGATRIEGKIQQVRQHADSGFIEALVLDDGQVVEGDLFIDCTGFRGLLIEQTLHTGYEDWSHWLPCDRAVAVQTESVEPPVPYTRAIAHAAGWRWQIPLQHRVGNGLVYARAHLSDDEATAMLLAAVQGTPRRDPMLVPFVTGRRLQTWNKNVVALGLASGFVEPLESTSIHLAIVAVMRLITLFPADGIAPPQVDLFNRISRAEAEHVRDFVILHYHATQRQEALWRQCRAMELPESLQLRLRAWREGAHAWQEGDELFRVDSWTHVLLGQGIAPAQHHPLTRALPDQHLQQLLDGIRQPLQHVVTQLPTQQAFIDSYCKVDQSTWG

SEQ ID NO: 82684 - protein, 512 aa, Asticcacaulis sp.
  REGION 1..512: note = tr|V4NUY1|V4NUY1_9CAUL Uncharacterized protein; OS = Asticcacaulis sp. YBE204 OX=1282363 GN=AEYBE204_07790; PE = 4 SV=1
MSGEHIKHIVIVGGGTAGWMSATTLWQAFQGKRVRITLIESDEIGTVGVGEATIPPIRRFNSLAGIDEVEFVKRTQATFKLGIEFVNWTRQGHSYIHPFGHFGKPIDLISFHHYWLRMKAAGEDVPLDAYSLPIMAARNNKFLVGPNDPESVFSTYSYAFHFDAGLYARFLRDHCEQRGVKRVEGKITRVNLNPEDGFIDSVTLDRGETIEGDLFIDCSGFRGLLIGEALGVGYDDWSAFLPCNRAVAVPCESAAPLTPYTRSTAHKAGWQWRIPLQHRTGNGHVFCADFISEDEAISTVMNNLDGKPMAEPRVIRFKTGKRKKFWEKNCIAVGLASGFMEPLESTSIHLVQKAMARAVGFLPTHRHDTVSLDEYNRLMLEEFVEIRDFLVLHYNATERDDSDFWRYCRNMTLPETLKRRIDLFRARGRVVSHADELFGEASYVAVFMGQGIVPQGYDPLANVLETEDVKERLFKMREVIRDTVQRMPTQAQFIERTCKAYSMEDLRRAMAM

SEQ ID NO: 82685 - protein, 510 aa, Aestuariibacter sp.
  REGION 1..510: note = tr|A0A506RKD5|A0A506RKD5_9ALTE Tryptophan 7-halogenase OS=Aestuariibacter sp. GS-14 OX=2590670; GN = FJ444_12720 PE=4 SV=1
MPNIIKHITIVGGGSAGWMTAAALSRMLPTGDVKITLVESEQIGTIGVGEATIPDMINFNKLLGISESEFIKATNGTFKLGIEFNDWGKLGDSYFHPFGGHGVDMNGVDFHQYWLHTLTAGNTCELEDYSICAVAAKQNKFVLPEQNPNSVLSHLRYAYHFDATAYAAYLRKYAEQRGVKRIEGKIASVQQHTDTGNIAGLTLEDGTTVGGELFFDCSGFRSLLLGDTLGVKFRDWSHWLPCNTAQTVATEQTSKVLPFTRSTAKAAGWQWRIPTQQRVGNGHIYCDRFIDHDQARQVLLDGLDSKPISEVRTIQFKTGCQEAFWEKNCIGIGLSAGFLEPLESTSLFLIQQGISRFISLYPDAGLHPVIRNEYNRLMSREFEQVRDFIILHYKATTRDDSPFWRYVRDMDIPDSLTHKMTLFQQGGRVFRDDHELFTRSSWVAVMVGQGIFPNTFDPILANIPVADIQRSLNSMKQAMEQAVARLPDHAMFIDKYTAMQPNPTFSMGRQ

SEQ ID NO: 82686 - protein, 500 aa, Aestuariibacter sp.
  REGION 1..500: note = tr|A0A506RFB2|A0A506RFB2_9ALTE Tryptophan 7-halogenase OS=Aestuariibacter sp. GS-14 OX=2590670; GN = FJ444_12730 PE=4 SV=1
MTAAALANKLQGLAIDIELIESDSIGTVGVGEATLPHIRFFNSALGIDEAAFMRETEATIKLGIEFCDWGNLGESYIHPFGDFGLPINNVEFYQHWLKHFQSGVITTSLHEYAAGVMSAKHNKFRIPEPSSSNIEQHYGYAYQFDSSLYAKFLRRYAQAKGVIRTEGKIVEVKQHNDTGEIVSLILDNQAVIEGDFFVDCSGFRGLLIEQTLHAGYDDWSEWLPCNRAVAIPCESTDPLMPYTRATAKAAGWQWRIPLQHRTGNGFVYWSEHISDDEACSQLLNALDGKPLAEPNQLYFKAGRRNVCWEKNVVAIGLSSGFLEPLESTSIHLIQEGITTLIELFPQQRIQQQDADEYNRRMALNFERVRDFLLLHYVATKRDDSDMWRYFRNLPLPDSLQTKIELWLSRGYIQRYEFGVFLPPSWIAVLLGQNLMPTGFDPRVNNTSDAEFIQTSERMRKAILSSVNNTPLHREFLTRYGAASNSKPLMSAMASTTSGGN

SEQ ID NO: 82687 - protein, 495 aa, Aestuariibacter sp.
  REGION 1..495: note = tr|A0A506RF92|A0A506RF92_9ALTE Tryptophan 7-halogenase OS=Aestuariibacter sp. GS-14 OX=2590670; GN = FJ444_13450 PE=4 SV=1
MMNQTHPASVIIVGGGTAGWMCAAYLAKQWGTSTHITLIESSQIGTVGVGEGSTPFLKQFFADLGWQEQDWMPDCDATYKTGIEFANWTNSARFSQYFHPFFTPLDQHTGELFFNSCQQLRSGLANADVKPEHYFSAAEMVRKRVTPQSSKLPGDIDYAYHFDASKLALRLHSFSMKQGVTHREGKVAEVYTEAGNIRGLRMEQGDVLHADLYVDCSGFIGLLMKKALNAPFKRYRDTLFNNAAVALPTMHGNDDPITPQTRSVGMDSGWMWQIPLTTRIGNGYVYSADFCSADEAEAALRKALNVDDGIPARHLNMEVGRLEQHWQGNCVAIGLAQGFIEPLEATALMLVQYALYQLVDGVGSDKPLARAQQEYNCEMNRMFDGIRDYIAAHYYLNTRTDSAYWTACRHDMVVPDNLQYLLEKWDSGACFETALDHLDSELVYLRPSWYCILAGMGRFNQLDTSQPAPVNRASIAHLEKLVGHYFSHQQRPLSV

SEQ ID NO: 82688 - protein, 522 aa, Xanthomonas campestris
  REGION 1..522: note = tr|A0A2S4JHA8|A0A2S4JHA8_XANCA Tryptophan halogenase; OS = Xanthomonas campestris OX=339 GN=TR80_19735 PE=4 SV=1
MHAPAPSESQRLVRRVVIAGGGTAGWMAAAALSKLLGRQLQITLVESDEIGTVGVGEATIPSLVTFHRLLEIDEAQFMAATQATFKVGIAFEHWRDVDRHYIHSFGHTGTDHWSAGFQHFWLKARARGVARDFGDYCLELRAAQEGRFAHLPNGGMNYAYHLDAGLYARFLRRFSEGFGVQRIEGRIGSVQTDAHSGDIAALVLDDGTRIEGDLFLDCTGFRALLIGQTLGVGSEDWSRWLFADSALAVQTESVGAPVTFTRARADRAGWMWRIPLQHRVGNGIVYSSRYIDQDSAAQVLEHNLQGRALTTPRALRFTPNQRHRVWEKNCVALGLASGFLEPIESTNIHLIQRGIVRLLQTFPQVIDPVDIAEYNRQAAEEIAHIRDFVILHYHATDRRDTAFWRDCAGMEIPDSLRHRMELFRQSGRVFHQGNELFAENSWIQVMLGQGIVPRHHHPVADLMGDAELSQFLEGIRQRVEAALARLPPHAEFLRRYCPAPAPAPPAPMPQPAPGTPLAAPAA

SEQ ID NO: 82689 - protein, 587 aa, Microcystis aeruginosa
  REGION 1..587: note = tr|A0A552E2X2|A0A552E2X2_MICAE Tryptophan halogenase; OS = Microcystis aeruginosa Ma_QC_B_20070730_S2 OX=2486256; GN = EWV80_05040 PE=4 SV=1
MMKTTNSVRQFVYDVVIMGAGFAGVCQARHLMLKVPNIKIALIDPRPENRSDKDLKIGESTVEIANLFICKELGLYEYMIENHPPKFGLNFHWPKDSHKTDTIEDYYHIWTNRQPPLASSQMNRAKFERDLLRMNKEMGVDFYNGRVVDVTIHPGNDPHQVKVKLHDEVIELTAKHLVDAAGRQFIIGKKTDNVIFDPEHLCGVNTGSAWVRVKNIDRTLFHSGYDPEATSCSHYYATNHWFGQGHWLWMIPTDTDTQEISIGVIHHHEIIPADYLNQEQKFYAFLKANHKLLYDLLSSGEKIDFHYWPRIAHTSKEVLSADNWYVIGDAAYIFDAFYSMGTSLTTFAIESVTEVIRSKLAGEADAEVKRVAYNQFNLAQAEGVNQLMRDHKTQLGHASIMSWRIYFEYIWWFGILVPLYVGKWHLNVSFIEGFVKIHRQTVNSLFVEIYEQLNQLVERKANLGLLDCYRGDQLLGDYQPPVHFDSFLENAQYEPFRSNIFTSIKYTHFYGAIWYLVFQWKGFGLGGVIAPKHLYHFLRLLLLSGVASFGEFYHRLKMKKIPHNHQIACTTEEFKHYQYQSSLNPWI

SEQ ID NO: 82690 - protein, 507 aa, Pelomonas puraquae
  REGION 1..507: note = tr|A0A254NBI7|A0A254NBI7_9BURK Tryptophan halogenase; OS = Pelomonas puraquae OX=431059 GN=CDO81_18260 PE=4 SV=1
MSDPSIRKIVIVGGGTAGWMTAAPLAQRFQQAGPHGCEVVLVESPDIGTIGVGEATLPPIRAYNRTLGLDGADFVRRTQGSFKLGIEFRDWGRVGHRFFHGFGDFGPAIENRSPWQHWLRLSRIVDGLPGYEDWSTSTVMARGHRFTPPVEGPPSAANAYSFAYHFDAGLYAAYLREYALARGAQRVEGLIVDVELRPEDGFVSAIRLADGRRIDGDLFIDCSGFRALLIGGAMQSPFEDWSALLPCNSAQAVPSARVEPLTPYTTSTAKAAGWQWRIPLQHRTGNGHVYCSHFISDDEAAATLLAGLDSPALDTPRQLRFTTGRRKAGWVKNVVAIGLAGGFLEPLESTSIQLIMDGVGRLLQFFPDRSFKPHLAAEFNRRMSVQYESIRDFIVLHYKLTERRDSELWRYCAAMPIPDTLAHQIELFREAGRVAVLDPDGFAEPSWVSLFLGLGLVPERYDPFVDHIDPEALLQHFARLRQAIAQTAAGMPRHADYIRQHCLAPSA

SEQ ID NO: 82691 - protein, 501 aa, Pseudoxanthomonas sp.
  REGION 1..501: note = tr|A0A4Q8L545|A0A4Q8L545_9GAMM Tryptophan 7-halogenase OS=Pseudoxanthomonas sp. NML171200 OX=2480816; GN = EA660_17715 PE=4 SV=1
MTDSSQPRPVKRVVIAGGGTAGWMAAAALSRTLGKVLDITLVESEEIGTVGVGEATIPTLVTFHRLLDIDEQAFMAATGATIKLGIQFEGWREPGQDYIHSFGTTGKDHWSAGFQHFWMKGRQRGLARDYGDYCLELRAAQEQRFAHLARNGMNYAFHLDAGLYARFLRRFSEGFGARRIEGKIAAVQTSAQGDIAALVMEDGTRVEGDLFIDCTGFRSLLLGQTLGVAFEDWSHWLFADSALAVQTESVGPPVPYTRSMAGAAGWQWRIPLQHRVGNGIVYSSRFMDQEAARAALLGNLEAPPLFEPRLLRFTPGQRRVTWQRNCVALGLASGFLEPLESTNIHLVSRNLTRLLQCFPHVIRQVDIDEYNAQTEAEMIHIRDFVILHYHVTRRRDTPFWQACAHMDIPATLRHRIDLFAQTGRVFHVPNELFAENSWIQVMLGQGIAPAQYHPVADLMDDAELARFLDGIHQQVEQTVARLPTHADYLRSYCAQARPAVA

SEQ ID NO: 82692 - protein, 510 aa, Stenotrophomonas sp.
  REGION 1..510: note = tr|A0A126NE76|A0A126NE76_9GAMM Tryptophan halogenase; OS = Stenotrophomonas sp. KCTC 12332 OX=1793721; GN = AXG53_00515 PE=4 SV=1
MDAAKTHDGARVRKVVIAGGGTAGWLAGCALAHQFRDQLEITLVESEQIGTVGVGESTVPPIRTFHRFLQIDEQEFLRAVAGTFKLSISFENWRRPGERFFHPFGTIGKGTWATPFHHFWLDSLRRGMPSDLGDFCLESVASRGDQFSLQTQPEASYAYHFDAGLYAKFLRRKAEGHGLRRVEGKIREVRQHVHDGSVQALVLEDGQVIDGDLFIDCTGFRGLLTEQTLHTGYEDWNEWLPSDRAVAVQTEAVGPPVPYTRAIAHEAGWRWHIALQHRVGCGLVFSGKHMSDDEAHAKLLRDVGAPPLRDPWLVPFRSGRRLKAWNKNVVALGLASGFIEPLESTSIHLTISAVVRLIQLFPFDGMSASLVDLYNDVSRQEMEHVRDFIILHYHATQRDEPMWKACREMTLPESLQLRLRAWRERAHAWQDPGELFRVDSWTSVLMGQGIQPGSPHPLARALGDADMRTLLNTIRQPVQHAAAQMPSQAAFIEQYCKAAPDVWPQSVALA

SEQ ID NO: 82693 - protein, 495 aa, unidentified
  source 1..495: note = Actinobacteria bacterium
  REGION 1..495: note = tr|A0A0N1NEN0|A0A0N1NEN0_9ACTN Tryptophan halogenase; OS = Actinobacteria bacterium OK006 OX=1592326 GN=OK006_0682; PE = 4 SV=1
MSTGEEFDVVVVGGGPSGSTVASFVAMQGHRVLLLEKESFPRYQIGESLLPATVHGICGLLGVSEEIERAGFMRKHGGTFRWGSSPEPWSFAFAISPRMAGPTSHAYQVERMKFDDILLKHSRKLGVEVREECSVVEVTEDEERVRGLVYTDSTGARHTVGARFVVDASGNKSRIHRDAGGDRIYSDFFRNIAIFGYFEGGKRLPAPRDGNIFCAAFDEGWFWYIPLSDRITSVGAVVSREFADSVQGDPADALSRLIAKCPRIDDMLADAERITEGVYGQVRVRKDYSYSNSRYWRPGMVLVGDAACFVDPVFSSGVHLATYSALLAARSINTVLAGDLGEDESFAEFEARYRHEYGLFYEFLVSFYDMNSDHESYFWQAKKVTAFAESELEAFVELVGGVASLDGTFVDAESARARFKHTAGELERSVSQVDRTRGDDSTPMYQSDIMGSVMEQGTQIQVQAVLGGDLDPEAALFPGGLVPSADGLRWAAPAE

SEQ ID NO: 82694 - protein, 502 aa, Caulobacter sp.
  REGION 1..502: note = tr|A0A3Q9IIN4|A0A3Q9IIN4_9CAUL Tryptophan 7-halogenase OS=Caulobacter sp. FWC26 OX=69665; GN = CSW63_18125 PE=4 SV=1
MEPIRKIVIVGGGTAGWMSAAGLAAVLKGLPVSIALVESAEIGTVGVGEATVPHIRHFNARLGLDEADFMRKTQATIKLGIQFCGWGRKGESYIHPFGAYGHAIDGLPFHQHWLAARARGEAGPIEAYSLPIIASLAGKFAPPSTDPRSLGSTFNYAYQFDAALYAQYLRAYAEARGVTRTEGKIASVQQRPEDGFVTGVTLEDGRIVEGDLFVDCSGFRGLLIEGALQAGYEDWTRWLPCDRAVAAPCESVEPPTPYTRATADQYGWRWRIPLQHRVGNGHVYCSSYIDDEDAARALVEKLDGKLQQDPRFLRFTTGRRKKQWLKNVVAVGLSSGFLEPLESTSIHLIQVAITTLLELFPHQGCAQADQDEYNRVMDLEFERIRDFLVLHYHANQRDDSPFWIERREGPIPDSLAYKMVLFRERGAVVGYKDGFFLEPSWLAVYFGQNILPSGHDPLVAASDPVRTTRIMADLAAAVTRTVDAMPTHQSFLRSVVDAGTSA

SEQ ID NO: 82695 - protein, 332 aa, Hirschia baltica
  REGION 1..332: note = tr|C6XNI8|C6XNI8_HIRBI Tryptophan halogenase; OS = Hirschia baltica (strain ATCC 49814 / DSM 5838 / IFAM 1418) OX=582402 GN=Hbal_2453 PE=4 SV=1
MKKKLIQSVLVKGEGYAPILVACTLARFVIPDPLKIEVLSTQLKSDVGSLFLKSDMDQLHRSLGIAQSHMQRISKNKTPIAAVQLSENLRLPFWDYGAPLKGVPFYHIWLREHLNGGVKDLRSFNPSFAPVHRDAGYWEIDPSKYEELLRSISAHAGIGKIYSDVEQVSCDEQDLIIETQGGPIRQQLTDCLRLGNGRFPTVSITNFDLMVMQRNLLALVQNFPQIGSKKIERQELEEELNSVLASVEDMQFLMSADFDTGKLSERVKYRIELWLDVGRVIPCEGDLFLPHEWLAVLHKRVGPPMAYSRLVDSISRQEASAHLQKYQIDEGI

SEQ ID NO: 82696 - protein, 512 aa, unidentified
  source 1..512: note = Erythrobacter xanthus
  REGION 1..512: note = tr|A0A3A1P4X0|A0A3A1P4X0_9SPHN Tryptophan 7-halogenase OS=Erythrobacter xanthus OX=1784712; GN = D2V17_17785 PE=4 SV=1
MGQVEHIVIVGGGTAGWLTAGVIAARHQARMSHGFTVTLVESPNVPIIGVGEGTWPTLRNTLRGIGVSETDFLRECDGAFKQGARFNRWTTGEPDEGYYHPLMLPQGFARLSLVPHWQTERATTFCDAVTPQGRICDAGLAPKTIATPEFESLANYAYHLDAGKFSQFMQRHCCEKLGVRHVLADVTEVVTDESGDVTMVRTQQAGDIVGDLFVDCTGFKALLIEGAMDVPFRSCNEVLFCDTALAVQVPYADPDDPIASHTISTAQSAGWIWDIGLPTRRGVGHVFSSSHISADEAERELRAYIGPAADGLTVRKIPIRSGHRETFWKRNVVAVGLAAGFLEPLEASAIVLIELSAKMIAEQMPPNRAVMDVIARRYDETTLYRWGRIIDFLKLHYALTKRTDTEFWRDNLRPETIPDRLLGLMELWKYQPPWLHDEFDRAEEVFPSASYQYVLYGMGWHTDLPPGEAQRERDQAIRAMRENRQQTERLMQGLPRHRDLLDRIREHAMMPV

SEQ ID NO: 82697 - protein, 531 aa, Rhodanobacter sp.
  REGION 1..531: note = tr|A0A1V3PES2|A0A1V3PES2_9GAMM Tryptophan halogenase; OS = Rhodanobacter sp. C01 OX=1945856 GN=B0E50_15720 PE=4; SV = 1
MPRLKKVLVVGGGTAGWLAACYLAKAMNAVHPDSVQVHLVESDHIGLLGVGEATFPSIRGTLSAIGLDERRFLAGATATYKQGIHYRHWVRPPGTPGSDHFFHPFSQPSQRPGGPELLPYWLLGAAPAGVPFAEAVTMQSTLVDHGRGPRRPTDPDYQGPMNHAFHFDAACFAKVLAEHGQEALGVKRHVATVERTVLDEHGAIACVVTKELGELTADLYVDCTGLRSTLIGGIMQSPFHSRRDVLFADRAVAMQVPYAKPDTPIPPYTISTAQEAGWIWDIGLQKRRGVGYVYSSRHTDDERAEEMFRRYLGAAGAGLTAMHIKFETGYRPEHWRKNCVAVGLAGGFVEPLESTGIALIELATYLLTHLLPGDTDDMESAAHHFNEMMVARYDRIIDFIKMHYCLSQRRDSQFWIDNADAASIPQTLQEKLAKWKHRPPHRLDFVGDLEMFMTASWQYVLYGMEFRTDLESMRSAYPQMEAARREFAMIRQAASHALDDLPDHRALVEQLCREHLQRIRPDADMVAAASG

SEQ ID NO: 82698 - protein, 505 aa, Pseudoxanthomonas sp.
  REGION 1..505: note = tr|A0A4Q8LDG2|A0A4Q8LDG2_9GAMM Tryptophan 7-halogenase OS=Pseudoxanthomonas sp. NML171200 OX=2480816; GN = EA660_06990 PE=4 SV=1
MGDNRIDSVVVVGGGSAGWMAAAALATYLGRQARVRLVESEQIGIVGVGEASVPHMRTFNAQVLGLDEREFAQRTQATAKLGIAFEDWGRIGERYVHGFGTIGQSKGPLPFHQFWLKQFLAGRAGPIGAYSLQTVMAPLERFIPGMPDAPSGSPLADIAYAYHFDAGLYAQYLRQVSEARGVERIEGRIVQVHQHPETGHVTSLVLDGGRQVEGELFVDCSGFVGLLIEQTLQAGYVDWSQWLRCDRALAVPCVRSGPIAPYTRATARGAGWQWRIPLQHRTGNGYVYSSAYVDDDQAAATLLAHLDGAPQGQPRQLRFTTGMRRRFWQGNVVALGLAAGFLEPLESTSLYLAQSGISRLLALFPTRDFDPLLARRYNRESAFEYERVRDFLILHYHATTREDTPFWRDCRAMEIPESLREAMDLFAADGRYFRNGEDFFALPSWVQVMLGQGIVPRGYHPIVDDMPQDALARYVEGTRERLAQAVAAMPTHQQFLDRYWKAEAP

SEQ ID NO: 82699 - protein, 506 aa, Rhodanobacter sp.
  REGION 1..506: note = tr|A0A1V3PMU9|A0A1V3PMU9_9GAMM Tryptophan halogenase; OS = Rhodanobacter sp. C01 OX=1945856 GN=B0E50_04370 PE=4; SV = 1
MTDPRIKNIVIVGGGTAGWMAAAAFAKVLGPTYSIRLVESEEIGTVGVGESTVPHLKLFNDLLGIHDTEFMKNTQGTFKLGIQFNDWGRVGDSYIHGFGTIGHDVSLLPFHQFWIKAMQKGMASDIGAYSIHTLAAPRGKFMTSATDVPSSSPLADIAYSYQFDATLYAKFLRGYAEKRGVRRTEGKIAQTVLRPDDGFVEAVVLESGERIEGELFIDCSGFRGLLIEQALHTGYIDFTHWLPCDRALAVACEKVEPPTPYTRSSARLAGWQWRIPLQHRTGNGYVYSSAHVSDDEAAATLLKHLDGKPMGDPRPLRFTTGVRKKSWNKNVVALGLASGFLEPLESTSIYMIQSGIARLLNLFPQRDFSEVVIDRYNAQAKFEYEHIRDFLILHYHATERNDTPFWNQCRTMSIPAQLQDNIRLFRDSGRFFRDAEEMFATTSWVQVMLGQHIVPRGYHPLVDQMPDQELARFMASVSQVVASCVDAMPSHQAFIDRHCVAPSMAV

SEQ ID NO: 82700 - protein, 501 aa, unidentified
  source 1..501: note = Xanthomonas hyacinthi
  REGION 1..501: note = tr|A0A2S7ER70|A0A2S7ER70_9XANT Tryptophan 7-halogenase OS=Xanthomonas hyacinthi OX=56455; GN = XhyaCFBP1156_18220 PE=4 SV=1
MIRNLVIVGGGTAGWMAAAALARVLGPDYRITLVESEQIGIVGVGEATVPHIKAFNNLLGIDEAEFVRQTQGSFKLGIEFVDWQRPGTSYIHGFGTQIGHPLGLLPFQQYWIKQALAGKAKPLGAYTLNTVAAKRGKFMTSASDAPPNSPLANIAYAYHFDASLYAAFLRGYSEQRGVTRREGIVEEVQLHPESGDVRSVRLASGEVIAGDLFIDCSGFRGLLIEQALHTGYHDFTHWLPCDRALAVPCAKVGPPTPYTRATARAAGWQWRIPLQHRTGNGYVYSSAHLSDDEAAATLLANLDGAALADPRPLRFVTGRRRQVWNRNVVALGLASGFMEPLESTSIHLIQSGISKLLELFPREGISPVLVQRYNDRIAFEFDRIRDFLVLHYTATERDDSDFWRQCRTMAITPELQATLDLFGDSGRFYRNGDEMFAEISWVQVMVGQGILPRAYHPLVDQVPAADIERFVASIEQTIGHCVDAMPPHQAFIDRYCAAAPL

SEQ ID NO: 82701 - protein, 499 aa, Pseudoalteromonas sp.
  REGION 1..499: note = tr|G7ER02|G7ER02_9GAMM FADH2 O2-dependent halogenase I OS=Pseudoalteromonas sp. BSi20311 OX=383911 GN=prnA PE=4; SV = 1
MQSKQIKDVVIAGGGTAGWITAALLNKVLGKVVNITLIESDQIGTVGVGEASIPPILHLNAALGIPESEFIKATQATIKLGIEFENWRAPQHSYMHAFGEIGKDLPFCEFYHYWLRAKQQGTNADFWDFSLNYQAAKQHKFAHLKHIPNTQLSGLNYAYHFDATLYGEFLKGLTISRGVKRIEGQIADVKQCPESGFVKALELLDGQIISGDLFIDCTGLSALLIEKTLNTGFDDWSHWLPCDSAIAVQTKTTAEPAPYTRSIAHDAGWQWQIPLQHRVGNGLVYSSRHITDEQAKQQLLDNIPGEPITEPRVIRFKTGRRRKQWHKNVVAIGLSSGFLEPLESTSIHLIQTAAIRLIKLFPHQGIKPVLIDTFNKQSKTEVERIRDFIILHYKLTERDDSGFWRQCKQMDIPISLQNKIDLFKQTGKLIREDDELFAEVAWQQVMIGQGLEAHDYHPLADALSDEQLAELFTNLKTLINGTVKQLPTHSEFLARMKNN

SEQ ID NO: 82702 - protein, 511 aa, Pseudoalteromonas sp.
  REGION 1..511: note = tr|G7EUJ2|G7EUJ2_9GAMM Tryptophan halogenase; OS = Pseudoalteromonas sp. BSi20311 OX=383911 GN=P20311_2361; PE = 4 SV=1
MDIKKVAILGGGTAGWLAANHIGKELLKRKGVSVTLIESPDIPPIGVGEGTVPDIRNTLKSFGIREDEFIRQCDATFKQSIKFVNWMDKKKHGEGNFFHHLFDVPSPYDTKHLTQYWLNDKQTTKSHAQYLSSQHAICEAGLAPKNITNAQYEGELAYAYHFNAGKFAQLLACNAKDKFSVSHVHTNVTQVKLANDGTIAALMTDSEGELEFDFYIDCSGFESLLIDKALKVPFVDVSDSLLINSALVVQVPTKEDEDIPPYTLATAHQAGWIWDIALTNRRGVGFVYSNNHMTDEQAHEKLDRYLGASKQDLSYRKIPMRVGYRKKFWHKNCVALGLAQGFLEPLEATSILLTDFSAKFLTLRFPSSTKQLEQLETRFNHAMGYAWERAIDFIKLHYCISDRTDSAFWVANKNDDTTSESLKEKLSLWEEFIPVRDDFFSQFEVFYLENFLFVLYGMHFNTKAPPCTSAEHEHCLVRLQQRAEIDQYLLNKLPNHRALLDKIKQYGLQTI

SEQ ID NO: 82703 - protein, 508 aa, Shewanella sediminis
  REGION 1..508: note = tr|A8FSJ7|A8FSJ7_SHESH Tryptophan halogenase; OS = Shewanella sediminis (strain HAW-EB3) OX=425104; GN = Ssed_1209 PE=4 SV=1
MDIKRVVIVGGGTAGWLAANHLGKAALNNELLSVTLIESPDIPTIGVGEGTVPAIRQSLQSFGISETEFIKRCDVTFKQSIKFANWLDKEVHGQHNFYHHLFDMPSSLGKELTQAWLSKKGRTYAETISPQHAVCEAYKGPKTISDAEYKGHLGYAYHLNAAKFAKLLGENAQERFNVQHISANVQEVILGEDGEIKSLVTDSVGTLDFDFYIDCSGFASLLIDKALKVPFVDKAEQLFVDKAITVQVPTDPASAIPPFTIATAHQAGWIWDIALSNRRGVGFVYSSKYMDDETAVCKLDHYLGGKLSEHSYRTIPMKVGYRERFWEKNCVALGLAQGFLEPLEATSILLTDFSAGFLANRFPTSAAQLDGMRQQFNQVMGYAWERVVDFIKLHYCLSDRIDSQFWIDNGDPGTMSDELSKRLSLWSSFIPNREDFFSKFEVFDLENYLYVLYGMNLPTQVALSRASDESNARMHSDKIARIADQLVNELPNHRELLEKINRYGLQEV

SEQ ID NO: 82704 - protein, 602 aa, Microcystis aeruginosa
  REGION 1..602: note = tr|A0A552F085|A0A552F085_MICAE Tryptophan halogenase; OS = Microcystis aeruginosa Ma_MB_S_20031200_S102 OX=2486254; GN = EWV92_05555 PE=4 SV=1
MNSTITQSREYDVVIMGAGFAGLCQARHLMLNIPNIRVALIDPRPVERTDKDLKIGESLIEVAALFLCKELGLHDYLIENHPPKSGLNFHWPKDPAKTETLDDYYHVWANRQTPVGSFHLQRAKFEQDLLAMNCQMGADFYEGRVKDVALTSGDELKTVYAKVGDENITLQAKHVIDAAGKNFIIGRKTDNVLSGPENLLGLNNGSAWLRVKNIDRTIFHSGYHPEGASTSHYYATNHYFGQGHWLWMIPIDKHSMELSIGIIHHHEVIPAHSINNLDKFSNFLKSNHTILSQLIESGEVVDFHYWPKIAHKSKVLFSPDNWYIIGDAAHIFDAFYSYGTTMIAFEVESVTEIIRAKLAEEAAAEQKRSAYNDFNLAYARTVNCLYRDHAYQLGHASVMSWRIYFEYMWWFGVHVPTYIGKWHLDLNFIPRYVKIADGNVNGIFADLCQEFHQLVSQGANIGLMDAYRADQLLGGYGTLKHFDDFLENTKFEPRRCNVFASMKAAYFYIAIWYALFQWKAFGIAGWLNPKHWYYFGRMLKLSIQATIAEVIYKRKTRGIADNSQIEKMREEFKNYHYQPQKKSPSVVQNVISERVKIESFPA

SEQ ID NO: 82705 - protein, 499 aa, unidentified
  source 1..499: note = Gammaproteobacteria bacterium
  REGION 1..499: note = tr|A0A2N1XFW3|A0A2N1XFW3_9GAMM Tryptophan halogenase; OS = Gammaproteobacteria bacterium HGW-Gammaproteobacteria-4; OX = 2013800 GN=CVV14_06565 PE=4 SV=1
MSESRIRDVVIVGGGTAGWMAAASLAKAMGQQLRIRLIESEEIGIVGVGEATIPQIRLVNSFLGLDENEVLRASQGTFKLGIQFNDWRRVGDSYLHAFGETGMPLGPLSFHHYWLRSQRSGGDSRLWDYSLNTIAAEGRRFGRMDKVGDTPVGGIRYAYHFDAGLYGRFLRRYAEQRGVRRSEGKVVDVQLRAADGFIESVQMDSGERIEGDLFLDCSGFRGLLIEGALKAGFDDWSRWLPCNRAVTVPSVRAEPMRPYTQSNARPAGWQWRIPLQHRTGNGHVYCSDFMSEDEASALLLANLDGEALAEPRALRFTSGIRNKVWHRNCVALGLASGFVEPLESTAIHLIQSCINRLLVMFPDRHCDVALSDEFNRQTRYEYESVRDFLVLHYKATERDDTPFWRHCAQLQLPERAARKVALFRASGQIVRENEELFTEGSWLQVMLGQDIVPERYHPSADAISTEQLDGFLRGIRGTVAQAAATLPGHSEYVAANCRA

SEQ ID NO: 82706 - protein, 412 aa, Salinisphaera hydrothermalis
  REGION 1..412: note = tr|A0A084IQ55|A0A084IQ55_SALHC Tryptophan halogenase; OS = Salinisphaera hydrothermalis (strain C41B8) OX=1304275; GN = C41B8_01877 PE=4 SV=1
MNTEQTDIAVIGAGPAGATIAALLADRGWRVTVLERSHFPRFAVGESLLPRCMDALADAGMLHAVEHAGYQIKRGVTFTENDRDTSFTFDDQFTPGWSWTWQVLRADFDHRLALEAEHRGATLRFGQTVESVDFETPGAPRLSVVGDDDTRTALTARFVCDASGFARVLPRLLGLDRTGSAPPRAALFTHVADHIDAPDYQRDRIVIGIHPSQPEVWYWLIGLAGGRASVGVIGPPEWLHGLDGTPVERLQQAIGEEPRLARLLADAEFDSRVGQTENYAYDIAALHGRDYALLGNAAGFVDPIFSSGVTIALESALRAVGPIDAQLRGSDVDWDTEFEAPIRAGQRVFTSFISAWYRGTLKHVFFNPTPDTTIRTMLSSILAGYVWDTSNPYVAVPERRLETLCRLCAPAA

SEQ ID NO: 82707 - protein, 603 aa, Microcystis aeruginosa
  REGION 1..603: note = tr|A0A552E2T4|A0A552E2T4_MICAE Tryptophan halogenase; OS = Microcystis aeruginosa Ma_QC_B_20070730_S2 OX=2486256; GN = EWV80_05055 PE=4 SV=1
MKNMSNRPYDVIIMGAGLAGLCQARHLMLKIPNIRIAMIDPRPENRTEKDLKLGESTVEVATLFFGKDLGLYEYLIENHPPKYGLNFHWPKRNDQTKTIDDYFHIWANRQPDLASTQLNRPKFERDLLKMNREMGADFYNGRVVDIDLTPNDQLHTVKVKLPNESIELQGKHLVDAAGRRFLIGKKTNNISFDSKDLYGVNTGSAWVRVQNVDRTIFHSGYDPTGASCSHYYATNHWFGKGHWLWMIPTDIDTMELSIGVIHHHDYISSESLNSKEKFYEFLKANHNILYQLVTSAENIDFHYWPRLAHTSKTLYSPDNWYVIGDSACIFDAFYSLGSTMIVSAIDSITEIIRAKLAGEVNAAEKCQAYNQFNLTLINSINLFMHNHSRHLGDASIMSWRIYFENMIWFGILIPIFVGKWHLDLEFIPQFVQTFQTTLRSLVYEIHDQFDQLVDQKKNIGLMDCYRSDQLIWNYHTPKRYTHALENAQYEPKQTSVFTSMKKTFFYLTIWYLKLQWKSGGLSQVCHPRSLGTMAKLLTTSIYIGLGDIIYSLTGNHGSESRLIAEMRQAFQEYQYGDTLQPWTVEGVDTKSPEMEAEKVPLQV

SEQ ID NO: 82708 - protein, 512 aa, Pseudoalteromonas sp.
  REGION 1..512: note = tr|A0A0P9FNR3|A0A0P9FNR3_9GAMM Flavin-dependent tryptophan halogenase RebH OS=Pseudoalteromonas sp. P1-9; OX = 1710354 GN=rebH_4 PE=4 SV=1
MTETTKTINSIVIVGGGTSGWMTAAALANHAPLKHCKITLIESSKLGTIGVGEATIPTLRRFYQNLGLSDIEVLKATKGSCKLGIEFQGWAGENSRFIHPFGIYGQSTPSTPFHHYWLRAEQAGTHSDLTDYSLGVQMAKHNKFVPPKITPQNQLEIFDWALHFDASLFAKLMFDYSTSKGVQHIDNTICSIDNHPDGSIRQLHFEDGSSIAADLFIDCSGFKALLIGENQAVDYENWSHWLLNDSAVAVQTSATAEPITRTLAIAKKGGWQWRIPLQHRVGNGYVYSSKYLSHEEAEQSLLASINGDILQPPRKFSFTPGRRKTAWHNNCVAIGLSSGFLEPLESTSIALVETAIEKLLLTFNSNQYSINDVAKFNDVNAQEYERVRDFIILHYKLNGRSDSPMWQYYRDMAIPASLEEKMLTFAKTGELKRLPWEMFGPDSWLAIYHGLNFLPENYQASADNMPLNYLNEHLAKMREMVANQVKNAPTHSEFLQQHCGYQPIKQQEAVCS

SEQ ID NO: 82709 - protein, 510 aa, Pelomonas puraquae
  REGION 1..510: note = tr|A0A254N8U9|A0A254N8U9_9BURK Tryptophan halogenase; OS = Pelomonas puraquae OX=431059 GN=CDO81_18305 PE=4 SV=1
MNERVREVVVLGGGSAGWLVAGLLAAEHGDLRITLIESTDVPTIGVGEGTWPSMRDTLRRIGLDEAEFIRRCQVSFKQGSRFDGWSRGAPGAQGDRYYHPFMLPVGYGDVDLVQAWLATQPERPFADVVSPSVQVCEAGRAPKQVQTPGFAAVANYAYHFDAGLFAQTLREHATQRLNVRHVVDHVDAVLTSAEGDITALQTRAHGPLAGDLFIDCSGLSARLIGEHFGVGLKSERDVLFNDAAMPVQVPHAQPDAPLATCTIATAWAKGWIWDIGLPSRRGVGCVYSRRHASDDEAQAALQAYLDATGTPPDRPAPRQIRYDPGYRERFWVRNCVAIGLASGFIEPLEASALAMVELSVQRLCDELPMTRATMDAVARRFNDDFSYRWARVIDFLKLHYALSQRDDSTYWRDHRDPATWPERLRELLPMWRLRAPARHDFGRNDEVFPSASYQYVLYGMGFRPELQTQPADRLQAAQACFDEAVRQARRFVPGLPGHRALIDHLHQSNA

SEQ ID NO: 82710 - protein, 497 aa, Ferrimonas marina
  REGION 1..497: note = tr|A0A1M5YWB6|A0A1M5YWB6_9GAMM Tryptophan halogenase; OS = Ferrimonas marina OX=299255 GN=SAMN02745129_4548 PE=4; SV = 1
MNQPPMRVVVAGGGTAGWMTAAALAKLMGKRLDVVLVESDQIGTVGVGEATIPTLHIYHRLLGLKEQDVMAATNATFKLGIQFENWRVQNESYLHSFGFLGKECWACGFHHFWQKGKALGMVSEIGDYCTEHLAAREGRFAVLPNQDYNHAYHMDATLYAKFLRKLAEQHGARRIEGKIESVTQCAESGDIQALVLENGERIDGDLFIDCTGFRALLIEQTLNTGYDDWSHWLPCDRAIAVQTKSVSNPPAYTRSIAHASGWQWRIPLQSRVGNGMVYCSKYWSDEEAKATLLANLEGELLNEPRVIQFRTGTRRQHWNRNCIAIGLASGFLEPLESTSIHLIQRSIIRLMQLLPSGGSYEAERNEFNSQTLEEMANIRDFIVLHYKATERDDSPFWQHCKRMPVPESLAHRMNMFEEAGKVFKHGPDLFGETSWVQVMMGQGIEPKSYHPIVDMMSDHELEGFLGGIKGRVTKKVSSLPPHFDFVAHYCPAKPQES

SEQ ID NO: 82711 - protein, 392 aa, Burkholderia stabilis
  REGION 1..392: note = tr|A0A498RY69|A0A498RY69_9BURK Geranylgeranyl reductase family,Tryptophan halogenase OS=Burkholderia stabilis OX=95485 GN=BSTAB16_6692 PE=4 SV=1
MTPGHGIAIVGAGPAGCAAAIALMQAGAGPVLLIDAAGRDDSGGAREAGARRPRFGESLPPDIRLVFAALGVQHAFDAQGFDPCCGSASSWGADALGYNDFLFNPHGFGWHVERRRFDALLRDCAIRAGVAWKTGRVEHCSATGNGVRLQLALPGGDTEYVDAAFVVDASGHAACVARAMGAERLDGDRLVCVSACVPLNADSGLGQRSLLEAVEYGWWYAARFAPDEAIVVVATDAQMLRRHALQQPASWHACLRGTRHVAAALGDGVRDAPRTLTVRQARSARLSRCAGPRWLAIGDAAASFDPLSSQGVIKAMLDGMAAAREIAGDRDGRAIAARHEQRIGERFADYTRMRDDFYDQERRWANAPFWLHRRHRDTTTPAGVLHATETQP

SEQ ID NO: 82712 - protein, 541 aa, Streptomyces sp.
  REGION 1..541: note = tr|A0A1Q5GAT0|A0A1Q5GAT0_9ACTN Tryptophan halogenase; OS = Streptomyces sp. CB01580 OX=1703933 GN=AMK22_26720 PE=4; SV = 1
MNARASIGGSSVDHRIRKVVILGGGTAGWMAAAYLGKALQRTVKITVLEAPTIPRIGVGEATVPNLHRAFFSYLGIAEDDWMRECNASFKTAVKFINWRSPGESAPRPKPLGDRTDQFFHPFGLLPSADHIPLSHYWAAKYLAGETDEPFDYACFKEPAMMDANRAPRWDDGRPATNYAWHFDARLVADFLRRFAVDKQGTEHVEDEMTEVLRDERGFITALRTAGGRLLEADLFVDCSGFRGLLINQTMDEPFLDMKDHLLCDSAVATAIPHDDAAHGVEPYTSAIAMSSGWTWRIPMLGRFGTGYVFSSDFISRDDATAEFSRLWGLDPEKTAFNQIRFRVGRNRRSWVKNCVSIGLASCFLEPLESTGIYFTYAAIHQLAKHFPDRRFDPVLIDAFNREIEEMFDDTRDFIQAHFYFSPRTDTPFWQANKELRLAEGIQAKVAAYRSGLPVNPPITDESNYYGNFEAEFRNFWTNGSYYCVFAGMGLVPDRPLPALSYKPDSIEAAGPLFEAVKRQQREMAEKLPSNYDYLRRLHGKP

SEQ ID NO: 82713 - protein, 79 aa, Porphyrobacter sp.
  REGION 1..79: note = tr|A0A0P8B1I0|A0A0P8B1I0_9SPHN Putative oxidoreductase (Fragment) OS=Porphyrobacter sp. HL-46; OX = 1479239 GN=HLUCCX21_06385 PE=4 SV=1
MTIQRIIIVGGGTAGWMAAAALSRLKAGRSVEITLIESESIGTVGVGEATIPPFVGFNQLLGVDEREMLAAVGGTFKLG

SEQ ID NO: 82714 - protein, 533 aa, Bdellovibrio sp.
  REGION 1..533: note = tr|A0A514XJA6|A0A514XJA6_9PROT Tryptophan 7-halogenase OS=Bdellovibrio sp. ZAP7 OX=2231053; GN = DOM22_11990 PE=4 SV=1
MASLSDYIDTAFDLSYLNFSKYPQTEIKSIGILGGGTAGYLAALALKKLHPKIQTSVIESSKIPVIGVGESTTTEIVPFLHRTLGIDPQEFFQAVQPTIKLGIRFDWGCPGDYHFNFNFFAGHQQESYYYEDSINNANWASVLMDNHKIPVIREKNGEMISLLQSIPFSYHIDNKNLIRFLNNIVKQRQIPIIDAVVENVHLDDNDFVTSIETDDGKKHSFDLYIDCSGFRSRILGQGLKTEFISYKSTLRNNRALTFDTPNNNDIRPYTQCSTMPNGWAWTIPMRGENHHGYVHSTDYCDEEQALKEARARFGHFEKYKMVEFRTGRHKKAWNKNVFGLGNAYGFVEPLESTAIQTAVHSIMTLCKLMPNNHHDSSSIAAINQEIAATWDTFRWFLAVHYKYNKQMDTKYWQDCRANTEMGDAQMVVDLFNQRAPLSASNLGTNSPYTACEALVFNSYSYDTLLYGQKALERPPVRPKMSKEEYVQRTLSYQELTKKALSLHELFSEDYLIEGGLLEQLFEDQDTWIVETEA

SEQ ID NO: 82715 - protein, 524 aa, unidentified
  source 1..524: note = Actinobacteria bacterium
  REGION 1..524: note = tr|A0A0N1GDA3|A0A0N1GDA3_9ACTN Tryptophan halogenase; OS = Actinobacteria bacterium OK006 OX=1592326 GN=OK006_0206; PE = 4 SV=1
MANNVVIVGGGTAGWMTATYLKAAFGDDVGITLVESKNVPTIGVGEATFSTVRHFFSYLGLAEHEWMPECHASYKLAIRFENWRAEGHHFYHPFERPRNVQGFSLADWWLHTRPGEQFDRDTSLLTALCEAKSSPRHLDGAMFTSGFGAADEPAKAAEDGRETQFPYAYHFDAALLARFLTRFGTERGVRHVLDDVLDVALDDHGDISHVVTREHGALTGDLFIDCTGFRGMLINKALGVPFESFRESLPNDSAVALRVPVNGEKAGMRPCTTATAQDAGWIWTIPLFGRIGTGYVYAGDYCTPEEAERTLREFVGPAADGLAANHIKMRIGRCAQSWVRNCVAIGLSSGFVEPLESTGIFFIHNAVEQLVKHFPGGRGDEHRRRTYNRQVAAVMDGVREFLVLHYYAAARDDNAYWRDAKKRPLPDGLAERIEAWSHQLPDAESVFPRFHGFEPYSYTAMLLGLGGLPVRPPAALSRMDDTAARREFALIRDQAQALAQGLPSQYAYLAHQQNASTGRPASAA

SEQ ID NO: 82716 - protein, 495 aa, Pseudoalteromonas arctica
  REGION 1..495: note = tr|A0A290S216|A0A290S216_9GAMM FADH2 O2-dependent halogenase I OS=Pseudoalteromonas arctica A 37-1-2; OX = 1117313 GN=prnA PE=4 SV=1
MTKTNAVKNVVIAGGGTAGWMAAAALAKLVGNNINITLVESDDIGTVGVGEATIPPIRTFHKLLGINEQAFMKATQASFKLGISFENWGDENTHYIHSFGATGKECWAGEFHHFWLQGKALGINNPFGDYCYELQAAKSGKFAFNQQNPINYAYHMDATRYAQFLREFSEPLGVKRIEGKIQKVVKNTKTGHIESLTLNNGEHINGDFFIDCTGFRGLLIEQALHTGYEDWSHLLPCNSAIAVQTKSTSETVLPLTRSIAHKSGWQWRIPLQNRVGNGLVYCSQYMDDEQAKALLLNNIEGEALTEPRIIKFKTGRRLKGWNKNCLALGLASGFVEPLESTSIHLIMSGIIRFMRLFPFNGITNHAIDEYNKQLKSEIENIRDFIVLHYKVTNRDDSEFWQHCSAMEVPKTLQHKIDLFKQTGRVFLDDGDIFRVDSWVQVMLGQGIEPNQHHLIASMMSDEELTRFLHGIKQQIEQRVSQLPPHHEFLKQYCPA

SEQ ID NO: 82717 - protein, 516 aa, Pseudoalteromonas arctica
  REGION 1..516: note = tr|A0A290S3F5|A0A290S3F5_9GAMM Uncharacterized protein OS=Pseudoalteromonas arctica A 37-1-2 OX=1117313; GN = PARC_a1606 PE=4 SV=1
MTKPITKIVVLGGGTAGWLSAGLLAAEHPHLNVTLVESANVPILGVGEGTWPSMRNTLQRIGIKESDFITQCDASFKQGSKFINWRNLSEGENYYHPFMNPQGYEHTNLHASWQRIAPNQKFADVVNMQSFVCQAALAPKQLQTPEYAAVTNYGYHLDAGKFTEFLKNYCVKNLNVTHITDDVTHVINDEHGYIASLKTNNNGDITGDLFIDCSGSCARLIGEHFNSEFIAQDHILFNNSAVAAQIPNAHADQPIASATLSTAQSNGWIWDIALPTRRGTGYVFSSKYQSDESATSTLKSYIAKSTSEQQAEQLNYRVLKFSPGYRQKFWIKNCVAVGMSAGFLEPLEASALAMVELSISMISEQLPQNRTHMSQLETRFNDRFSTRWQRVIEFLKLHYVLSERDDTPYWQDISNLNTAPERLQNLLKLWQFQPPSRFDFIENEEVFSSSSYQYVLYGMGFNTQTVSAQNTFNDPRTGDYYYQQNREKIAQCLNGLPSNRALLNHLLSNNGQPHND

SEQ ID NO: 82718 - protein, 520 aa, Novosphingobium sp.
  REGION 1..520: note = tr|A0A2Z5EK47|A0A2Z5EK47_9SPHN Tryptophan 7-halogenase OS=Novosphingobium sp. P6W OX=1609758; GN = TQ38_023725 PE=4 SV=1
MTIDNPSSCRVVILGGGTAGWLAAAYLSRTLKMTGITLVESSEIGIIGVGEGTFPTIRSTLAGLGISEAEFLVRANATFKQGVLFEGWATGKDSYFHPFNMPIGGEDEALLPHWLADTSPQRPSWADAVTVQEQVIRAGRAPKRPKDPDFSGPMNYAYHFDAARFADYLREISVAAGVERIEGTVAAVKRKADGDIAALELADGRTVAGDFFLDCSGFRALLIGQTLGADFTSCAGSLFNDRALAMQVPYAQPGAPVRPYTLATAHEAGWTWDIGLTERRGIGYVYSSRHCSDDEAEATLRRYVGPRGDALSPRQLRFETGYRERQWIGNCVAVGLSAGFFEPLESTGIMLIEAALRIVGEFLGPNVLASGDRYARDAAARSFNRLMSARFERIVHFLKLHYCITRRTDTAYWRDNADPATIPEPLRDMLAQWRHRPPSRFDFVVDLETFLPPSYHYILYGMGFETTLGAARYPGAAQAREVFARVRAAHAGARGGLPDHRALLNHYHARTGIQPSKVSR

SEQ ID NO: 82719 - protein, 503 aa, unidentified
  source 1..503: note = Erythrobacter xanthus
  REGION 1..503: note = tr|A0A3A1P0M6|A0A3A1P0M6_9SPHN Tryptophan 7-halogenase OS=Erythrobacter xanthus OX=1784712; GN = D2V17_15470 PE=4 SV=1
MAIERIVIVGGGTAGWMTAAALSRMKAGHRKLEIVLVESEQIGTVGVGEATIPPFVDFNRLLEIDEAEMLAAVQGTFKVGIQFENWGRIGQSYLHPFGTYGYEIDGVSFHHVWHRLKQAGDPRPIQAFNLETMAAHFGKFLRTPDYESDHLPPMNYAYHIDATRYARFLRSYAEARGVVRREGRVADVALDGESGHVASITMDDGEVMPGDFFVDCSGFRGLLIEQALKTGYEDWSHYLPCNRAVALPCEREDGSPPALFTRATAHSAGWQWRVPLQHRNGNGHVYCSEFMGDDEAHAILVANLAGKPGADPNFLRFVTGRRKKFWNRNVVALGLAAGFMEPLESTSIHLVNTGINKLVSILSLDGVTQEQEDAFNRLTAKEYLRIRDFLVLHYSATARDDSPFWNHVRTMDVPDTLKEKIALFRSNGQIFREDDELFIETSWASVMMGQGIQPNGHNVMADALPLDQLRGEIDGIERSIRYLVEHMPSHADYLSKYCKAEAG

SEQ ID NO: 82720 - protein, 523 aa, Burkholderia sp.
  REGION 1..523: note = tr|A0A063B7P3|A0A063B7P3_9BURK Tryptophan halogenase; OS = Burkholderia sp. lig30 OX=1192124 GN=LIG30_3081 PE=4; SV = 1
MRNFVKSILIVGGGSSGWMTAAYLSKAYGHKVKISLIEEPSIPKIGVGEATIPNLQRVFFDFLGLKEQDWMPHCNASFKSAIKFVGWNAESDSTDYSYHMFGQLKEVNGIPLSHYWAHLKNTGQTSEQFAYACYNKAKLLDAKLSPKDRDGRSRMSHAWHFDAHLVADYLRGLSVSWGVEHIQGEVVETRLNESGGIKSVRTQSGAEIAADFFVDCSGFKGLLINQALDEPFIDMSRYLLCDSAVAASIAHDDEANGVEPYTSAIAMSSGWTWKIPLLGRFGSGYVYSSSFCSKETATEDFMKLWGVREDQVKLNHIKFRTGRNRRAWVKNCVSIGLSSCFLEPLESTGLYFIYAAIYQFAQHFPDATLDSRLADSFNKKIEMMFDDCRDFIQTHYFTTSRNDSDFWRANKHDLKISDSLHEKLNAYNAGLVVCPPVTTNESDYYGNFDLEFSNFWTNSNYYCMFAGLDWVPEKSNPKLVYHDEWMKQALAEFQSLKWEEEELSATLPTTYDYLLNIRGTRSA

SEQ ID NO: 82721 - protein, 508 aa, unidentified
  source 1..508: note = Glycocaulis sp.
  REGION 1..508: note = tr|A0A550KMC2|A0A550KMC2_9RHOB Tryptophan 7-halogenase OS=Glycocaulis sp. ZYF765 OX=2518983; GN = FKB34_03990 PE=4 SV=1
MSDNSDSKVRRVLIVGGGTAGWMTAAALSHGLRGTGVRIELVESEAIGTVGVGESTVPHIRYFNQTLGIDEAGFIARTRATIKLGIEFRNWAREGDAYIHPFGAYGEPDGGPDFHHQWLRLGGPETMGPIDQWSLPIAMAKAERFAPPSDEPGALASTYSYAYQFDAALYARYLREFAEARGVARTEGRILDVALDPETGDASSVTLESGRRIEADLFVDCSGFRGLIIEQAMKTGYEDWSRWLPCDRAIAIPSASTDALPPYTRASATEAGWVWRIPLQHRVGNGHVYASAFMDDARAEGLLMTALEGEALAPPNRLRFLAGKRKLQWNRNCVAIGLASGFLEPLESTSIHLIQAAAGYLLDLFPTGDGDEAARDEFNRTMAMEYERVRDFLILHYHATERDDTPFWNHVRTMEIPDSLASKMALFRERGSVAGYEHGVFLEPSWVAVYLGQRIIPARHDLAALAVPEAHARERARALKDEIAALAMRLPLHRDRVGAPRATAGSAA

SEQ ID NO: 82722 - protein, 537 aa, unidentified
  source 1..537: note = Lysobacter silvestris
  REGION 1..537: note = tr|A0A2K1Q0Y6|A0A2K1Q0Y6_9GAMM Tryptophan halogenase; OS = Lysobacter silvestris OX=1645665 GN=Lysil_0206 PE=4 SV=1
MNTKVDVVILGGGLAGLSLSIQLKRMDPALHVTVIERQRHPVREAAFKVGESTVEIAAHYFGHVLGLREHLEGEQIRKFGFRFFFSDGVEAIDRCTELGVSKLLPMVSWQLDRGRFENFLGERARELGVVFLDDATVKHVVPGGDGNLHVVDFEHEGDLVQLEARWLVDASGRASLLKRKFDLVADNPHDVNAAWWRVDGIVDPNQWSNDGDWLSRCTPPHRWRSTNHLCGRGYWAWMIPLASGAHSIGIVADGALHPLEQMKTHALATDWLREHQPALATLLDDPRHAVQDFRFLRHFSHGCRQVFSGDRWAITGEAGLFLDPFYSPGSDFIAIGNTYICDLIQRDRAGTPFAPYAAIYQQLIDSFFDNTMTLYRDQYALFGDARVMPLKVIWDYTYYWSVLAPLFTGSRMTDVAMLGRLRPVFERATRLNIAVQALLREWGERNGAASPPQDGRVLDQYLIPWFHELNRALTDPPQDDVSFHARIAANVVLMDRLAAQLLGEARRDHPQIEDFGLTAMLADVMPGEPLLQAPWVE

SEQ ID NO: 82723 - protein, 399 aa, Alteromonas macleodii
  REGION 1..399: note = tr|A0A351UFD0|A0A351UFD0_ALTMA Tryptophan halogenase (Fragment) OS=Alteromonas macleodii OX=28108; GN = DCZ37_12465 PE=4 SV=1
AEQDFAHAVCSQAALCDHHLAPKQRQTPAYAGIANYGYHLDANKFAALLQKHATTVLGVQHIVDHVDDVVGSSSEPIAAIVGREHGNITGDLFIDCTGFAARLIGQHYGIPLTSCSNVLANDSAIAIQAPYVDSSVDIASTTHSTAQDSGWIWDIGLPSRKGVGYVYSSAHCSEDEARATLETYLKHDKKTADVDVSKARKITFSPGYRKTLWVENCVAIGTSAGFLEPLEASALVMIELSATHIAKQLPRTYKECQAAGRQFNQAFEKKWERIVDFLKLHYVLSEREASAYWRDMRNQESCSTQLQDWLTLWKSRSPISSDFELREELFPAASYLFVLYGMGFRSQYNDVYQANLHTPEQRQAYAKHVQSIQQQLSGLPTNRQFLNQVAQSQGLSMHY

SEQ ID NO: 82724 - protein, 506 aa, unidentified
  source 1..506: note = Rhodanobacter denitrificans
  REGION 1..506: note = tr|A0A368KLL2|A0A368KLL2_9GAMM Tryptophan 7-halogenase OS=Rhodanobacter denitrificans OX=666685; GN = DEO45_00235 PE=4 SV=1
MTDPRIRNIVIVGGGTAGWMAAAAFAKVLDAGCSIRLVESEEIGTVGVGEGTVPHLKLFNNLLGIDDVEFVRNTQGTFKLGVQFNDWGRLGDSYVHGFGTIGHDVGLLPFHQYWIKARQSGKADEIGAYSLNTVAAPRGRFMPSASDAPPGSPLANVAYAYHFDAGRYARFLRSYAEQRGVRRTEGKVAQTVLRAGDGFVEAIVLENGERIEGELFIDCSGFRGLLIEQALHTGYLDFSHWLPCDRALAVACEKVGPPTPYTRASARPAGWQWRIPLQHRTGNGYVYSSAHVSDDEAAATLLGHLDGAPMGEPRLLRFTTGVRRQAWNRNVVALGLAGGFLEPLESTSIYMIQSAIARLLNLFPRRDFSPVLTERYNAQSRFEYEHIRDFLILHYHATERDDTPFWNQCRTMSIPPQLADNIRLFRDSGRFFRDGEEMFATPSWVQVMLGQRIAPQGYHPLVDQMPDAELAGFMASVSHVVASCVEVMPAHQAFIDRCCTAPAMVA

SEQ ID NO: 82725 - protein, 509 aa, Xanthomonas axonopodis
  REGION 1..509: note = tr|M4UGE0|M4UGE0_9XANT Tryptophan halogenase; OS = Xanthomonas axonopodis Xac29-1 OX=1304892; GN = XAC29_20405 PE=4 SV=1
MPDTTPSDPQQRPVRRVVIAGGGTAGWMAAAALSKLLGRHLQITLVESDEIGTVGVGEATIPSLVTFHRLLEIDEAAFMAATQATIKLGIAFEHWRDVDQHYIHSFGHAGTDHWSAGFQHFWLKGRQRGVARDFGDYCLELRAAQEGRFAHLPNGGMNYAYHLDAGLYARFLRRFSEGFGVSRVEGRIGQVETDAQSGFLAALTLQDGTRLEGDLFLDCTGFAGLLIGKTLGVGSDDWSRWLFADSALAVQTESVGPPVTYTRSRADQAGWMWRIPLQHRVGNGIVYSSRYMDQDGARAVLERNLTGRALTEPRPLRFTPNQRHRVWEKNCVALGLASGFLEPLESTNIHLIQRGIIRLLQTFPQVINAVDIAEYNRQAAQEITHIRDFVILHYHATDRRDTPFWRDCAAMDIPDSLRHRVELFRQSGRVFHQANELFAENSWVQVMLGQGVVPQQHHPVADLMGDAELSRFLETIRTRVEAALVRLPAHADFLQRYCPAPPVMATPAG

SEQ ID NO: 82726 - protein, 511 aa, Sphingopyxis sp.
  REGION 1..511: note = tr|A0A270BKH9|A0A270BKH9_9SPHN Tryptophan halogenase; OS = Sphingopyxis sp. GW247-27LB OX=2012632 GN=CD928_01040; PE = 4 SV=1
MNGMVGRVVIVGGGTAGWLSACSLAAARPDLSVTLIEAPDIPTIGVGEGTWPTMRATLASIGIGEAEFLAACDASFKQGSRFDGWVDGAPNDRYFHPFTSPPGMPAHALLAAWRDDASELPFAAAMTPQVHVCERDLAPRQRAMPDYQGAANYAYHLDAGKFAALLARHAVQRLGVNHLADHVVDVRADGQGGIAAVVTRENGEIAADLFLDCTGHAALLIGRHLDVEWIDRGDVLINDRALAAQVPVLRGSPIASQTVATAHAAGWIWDIGLPARRGIGCVYASRFMDDEAAETVLRSYIATALPDAPDVPIRKLSFPTGHRARFWQGNCVAVGLSAGFIEPLESSAIVLIELSLRALTENFPASRVAMPIHAGRFNALFRYRWDRVVEFLKLHYVLSRRDEPYWRAQRDPAHVPQGLADMLALWRDQPPSTWDFPQAEEIFSAESHQYILYGMGHPAPDGQAATERARAALAANGQRARTLAAALPTNRAYLDALLAEGGAGPAHMEGH

SEQ ID NO: 82727 - protein, 501 aa, Alteromonas macleodii
  REGION 1..501: note = tr|A0A2K9IH53|A0A2K9IH53_ALTMA Tryptophan halogenase; OS = Alteromonas macleodii OX=28108 GN=TE101_19885 PE=4 SV=1
MTVSGLDSSKNQTPVKNVVIAGGGTAGWMAATALSRLLGKSINVTLVESKDIGIVGVGEATIPPIRTFHKLLGIDEKAFMRATQATFKLGIEFENWREQGHSYIHSFGITGRECWAGEFHHFWLRAKEYGFGGEFGDYCPELIAAKQSKFATSEAMPLNFAYHFDAVAYGRFLKSLACDAGVTHKEGDIEKVVVCPQSGNIQSLRLASDEVIDGDFFIDCTGFKGLLIEQALHTGYDDWRHYLFCDSAVAMQTELTAPPVPYTKSVAHKAGWRWQIPLQERMGNGLVFCSRFMNDEDAINTLKSQVTGAPINEPRVIRFTPGKRRRGWNKNCVALGLSSGFIEPLESTSIHLIMTGLIRLMRLFPFDGITQSAIDEYNNKFDSEMSAILDFIVMHYKVTQREDSPFWQQCQRMEIPPSLEHKLALFAESGRVFLDDGDIFRVDSWTQVLMGQGMTPSQYHRVADEMSEQSLKQFMAGLKQQVDNHVAKLPSHEAFLTQYLK

SEQ ID NO: 82728 - protein, 374 aa, Alteromonas macleodii
  REGION 1..374: note = tr|A0A351UEE9|A0A351UEE9_ALTMA Tryptophan halogenase (Fragment) OS=Alteromonas macleodii OX=28108; GN = DCZ37_10780 PE=4 SV=1
EYGFGGEFSDYCPELIAAKQSKFATSEAMPLNFAYHFDAFAYGRFLKSLACEAGVTHKEGDIEKVTVCPQAGNIQSLQLASGEVINGDFFIDCTGFKGLLIEQALHTGYDDWRHYLFCDSAVAMQTELTAPPVPYTKSVAHKAGWRWQIPLQERMGNGLVFCSRFMSDEDAIDTLKAQVTGAPINEPRVIRFTPGKRRRGWNKNCVALGLSSGFIEPLESTSIHLIMTGLIRLMRLFPFDGITQSAIDEYNNKFDSEMSAILDFIVMHYKVTQREDNPFWQQCQRMEIPPSLKHKLALFAETGRVFLDDGDIFRVDSWTQVLMGQGMTPSQYHRVADEMSEQSLKQFMAGLKQQVDNHVAKLPSHEAFLTQYLN

SEQ ID NO: 82729 - protein, 500 aa, Alteromonas macleodii
  REGION 1..500: note = tr|A0A1E7DCA6|A0A1E7DCA6_ALTMA Tryptophan halogenase family protein OS=Alteromonas macleodii OX=28108; GN = BFV94_2904 PE=4 SV=1
MTTPHRIVIAGGGTAGWMAANLLAHRWANQAVTITLIESEDIGTIGVGEGSTPTLKRFFQTLDIPEYDWMEECQATYKVNIKFTGWNGNNSHSYSHPFISQLDVFSERAFHVNALTRRLGLDVETRPDKFLMAGYLAKKNLAPLPSHNFPFDIEYGYHFDSLKLGRFLRERAKSKGVCHVVGNIESVHTSPSGDISHLVCQDGQKLDGDLFIDCTGFSGLLLQKTLGVPFRDFSDNLFNDSAVVLPTPSCANLPVETESVAMSNGWRWQIPLRNRTGNGYVYSQQYQEKDAAECELRRALGMENTDVEAKHLSMRVGQCERHWEKNCLALGLSQGFIEPLEATALHLVQTSIELFADNYSFNETSAQQRQAFNREVSERFERVRDYIVCHYKLNGRNDSDYWRDNRANMKLSESLLSLLDVWYRKGDIVEEIKRQGIGRHFSTTSWHCLLSGYGVYPPPALNQPASLKESGDLFEEKKLAAFFNRCSLNFDKQSTLFNAG

SEQ ID NO: 82730 - protein, 502 aa, Sphingopyxis sp.
  REGION 1..502: note = tr|A0A270BBL9|A0A270BBL9_9SPHN Tryptophan halogenase; OS = Sphingopyxis sp. GW247-27LB OX=2012632 GN=CD928_09885; PE = 4 SV=1
MGDSRITKVVIVGGGTAGWMAAAALSRTMGGLSIRLVESEEIGTVGVGEATIPSIRLFNALIGIDEDDFVCETRGSFKLGVQFHDWGRIGDVYMHAFGQIGRSLGMLPFQQYWLRGRAEGVAGRVGDYSLNETAAHQNRFGRLPHIPNTSLDGIAYAFHFDAALYAAYLRRIAEAAGVERSEGKIAEVRRNGETGHVEALVLENGTAIDGELFIDCSGFRALLIEEALGTGFEDWTHWLPCDRAIAVPSENAGPARPYTQAIAHQSGWQWRIPLQHRTGNGHVFCSDFISEDEAAAVLLANIEGRPLAEPRTLRFRTGMRQRAWSGNVVALGLASGFLEPIESTSIHLIQNGIARLLAHFPGRDFDAANIDAYNRRIRFDHERIRDFIILHYHANQRTDSPFWTRCREMAIPETLAQKIALFRSQGQLVREGDELFVEIGWFQVLTGQNIVPRGYHPMADQLSREELSGFFGDIETIVAGAASRLPTHDDFIAQHCAAGVPA

SEQ ID NO: 82731 - protein, 519 aa, Glaciecola sp.
  REGION 1..519: note = tr|A0A2Z6UN50|A0A2Z6UN50_GLASK Tryptophan halogenase; OS = Glaciecola sp. (strain KUL10) OX=2161813 GN=KUL10_16250; PE = 4 SV=1
MDKAIKNIVIVGGGTAGWLTCAVIAAEHCANAENGMRVTLVESPDVKTIGVGEGTWPTMRGTLRKAGISETEFVRECDAAFKQGAKFAKWVTGEDDDAYYHPLVLPQGYSEVNLAPFWQPHADKVSFADAVCFQSHICEQGLAPKQASTPEYGHIANYAYHLDAGKFANFLQRHCTQKLGAHHVLDHVVAINNDETGDIKSVSTKHSGDIEGDLFIDCTGFNSLLLGKHYNIDFKSCKDVLFNDTALATHVPYEHQQSPIVSHTVSTAQKAGWVWDIGLPTRRGVGHVFSSAHTNDEHAEKELRDYIALSRPDLAESLDVRKIDIKPGHREKFWHKNCVAVGLSAGFLEPLEASALVLVELSAAMISEQMPATRGTMNVVAKRFNDKFTYRWDRIIDFLKLHYVLTKRTDSDYWIDNCRAETIPNELSELLELWQYQSPWHQDFTHVDEVFPSASYQYVLYGMGFKTKNPPTLRRSMNQQLAEQHMQKNHALTQKLLNGLPSHRDLINMIKQQGLRMAS

SEQ ID NO: 82732 - protein, 498 aa, unidentified
  source 1..498: note = Flavimaricola marinus
  REGION 1..498: note = tr|A0A238LB93|A0A238LB93_9RHOB Flavin-dependent tryptophan halogenase RebH OS=Flavimaricola marinus; OX = 1819565 GN=rebH_1 PE=4 SV=1
MTALPGHIVITGGGTAGWLSALMLRDLARRRHHDLRLTVIESSKIGTIGVGEGTTAVFRQMLMALGLDEMDFLRETGATIKYGIRHRDWRRLGHYYDGPIDDTAAVAGKGLDTYAVAAGKPITDVHLFTHLMAKGRAPWAERSGRRVAAGPYHHAYHFDQAKAGAFLKRHAKGVEVIDDQVLGVESDAGAISALVLESGQRVEADFFVDCSGFSRRVIRSLGAEWISYGDVLPVNRAMPFWIDLRPGEEIAPLTHAWAQGAGWMWQIPTQGRIGCGYVYSDAHTSPDQAKAEIEAALGHEIEPRRDIKIDAGRLRDAWTGNCVALGLASSFLEPLEATSIHGTIVQLMLLCELLDKPGGAEPYNAAVGRQVDDFRDFIRLHYVSERRDTPFWRDVADSHPAEVTYRLAAWAGRIPERADFTPFPMGLPHVEEQLYTPVLDGLGLLSRDAAKAQMAANPKARATLRKTHEALTREYRKAALQCLPHRAFLSSLQEDVTA

SEQ ID NO: 82733 - protein, 481 aa, Novosphingobium sp.
  REGION 1..481: note = tr|A0A258V4H6|A0A258V4H6_9SPHN Tryptophan halogenase; OS = Novosphingobium sp. 28-62-57 OX=1970409 GN=B7Y36_08455; PE = 4 SV=1
MAAAALSRFAPAGTRIELVESETIGTVGVGEATIPQIHLFNAALGLDEAEFLSETNGSFKLGIEFAGWRHEGHSYMHAFGNIGRPVGLLPFQHYWLRAKQLGFAKPLQRYSLNELAARTMRMQRGRRTPQSPELAYAYHFDAGLYAAYLRRHAQARGVVRTEGLIQSVERDGESGDIAALVLDGDRRIAGDFFIDCTGFRGLLIEGALATGFDDWTQYLPCDRAVAVPCAGGGDFTPYTRSTARKAGWQWRIPLQHRIGNGHVYASAMMSDDEAAAILLANLDGQPLADPRPIRFTTGMRRKHWNRNCLAIGLAAGFMEPLESTSIHLVQSAISRFLAMLPTGKSDPAMVDHFNAQAQFEWTRIRDFIVLHYWANERVGEPFWDAMRAMDLPETLQRKLALWRASGFIHREHEELFTEVGWFQVLAGQGVETSGYNPMADTLSAADLRDLLGLTEAELVEEVRQMPRHIEALEQIMRGVAA

SEQ ID NO: 82734 - protein, 491 aa, Sphingopyxis sp.
  REGION 1..491: note = tr|A0A270BKQ2|A0A270BKQ2_9SPHN Tryptophan halogenase; OS = Sphingopyxis sp. GW247-27LB OX=2012632 GN=CD928_01100; PE = 4 SV=1
MSGVAILGRGAPLWLAAAALRRALAPAGVEIDAVALPDDAAPGDLYPTWPAIEALHDQIGIDEAALLRGARGAFTLGRNIVDRSGAEQPPLLLAHGGYGTRIEGEDFFPHWVKARHHRLGVGLDDFSLTASAAHQGRLFLPDEASARYGRADYGYHLPAAGYAKSLKAIARHLGVRIAETQTVDVERGEAGVAALRIDDGTRIAAALFVDATREGVVLREGLGEAFVPWAAPGDRMLTARAPRLASVPAYAEVRAGAEGWTALYPGLTHLHVAHVWSSAAASDEEALEAASAASGLALEAPAVRTVAPGFVHEPWTANVVGVGEAAAGFDPLHGFALHALQLGLVHLIACFPAGGAMEARRAEYNRQMAMHIARVRDFEAAHFVLQRHAGPFWDAARRVPLSPELDHLIALFRARGEIAPQEGESLPPDAWRALFTGLGVVPEGWRPAADRLPPDVAKAHFRKMLGFVREQVLRQPTHDAYLARIAQASRG

SEQ ID NO: 82735 - protein, 515 aa, unidentified
  source 1..515: note = Rhodanobacter denitrificans
  REGION 1..515: note = tr|M4NGZ5|M4NGZ5_9GAMM Tryptophan halogenase; OS = Rhodanobacter denitrificans OX=666685 GN=R2APBS1_3097; PE = 4 SV=1
MNDPRIRRIVIVGGGTTGWLAAALLTQALGSQVQIRLVESAEIGTVGVGEATIPQIRHINRFLGIDEDEMLRFAHGTYKLGVQLNGFTRPGDSYLHAFGDLGLPLGLTPFHHYWLRAVQARGGAADAPDLWAYSLNAAAAAENRFAPLEKIPDSPLGGLRYAYHFDASRYAQYLRERIAPGAVQRIEGKVVEVRLREGDGFIESLQLEHGERVDGDFFIDCSGFRGLLIEGALHTGYENWQHWLPCDRALAVGSAPGGPMRPYTQASARTAGWQWRIPLRHRTGNGHVYCSRFISDDEAAAQLVANLETEPLGDPRPLRFVTGMRRLAWNRNCLALGLAAGFMEPLESTSIHLVQSGVSRLLAMFPDRRCDSALADEYNRQTRFEYEHVRDFLILHYKATERTDTPFWQQCGAMEIPPSLARRIELFRRTGMVFREGEELFAETGWVQVLLGQRIVPERHHPLADALTDTQLDGFLADIRTLIGRAKNTLPLHHEFVARAGGALDVAQRTAAAAP

SEQ ID NO: 82736 - protein, 491 aa, Kibdelosporangium aridum
  REGION 1..491: note = tr|A0A428ZJ79|A0A428ZJ79_KIBAR Tryptophan 7-halogenase OS=Kibdelosporangium aridum OX=2030; GN = DMH04_09870 PE=4 SV=1
MSVEDFDVVVAGGGPAGSTVATLVAMQGHRVLLLEKEVFPRYQIGESLLPATVHGVCRMLGITDELANAGFPVKRGGTFRWGARPEPWTFHFGISAKMAGSTSHAYQVERARFDEILLNNAKRKGVVVREGSPVTDVVEDGERVTGLRYTDADGNEREVSARFVIDASGNKSRLYSKVGGSRNYSEFFRSLALFGYFEGGKRLPAPVSGNILSVAFDSGWFWYIPLSDTLTSVGAVVRREDAEKIQGDREKALNALIAECPLISEYLANATRVTTGKYGELRVRKDYSYQQETYWRPGMILIGDAACFVDPVFSSGVHLATYSALLAARSINSVLAGDLDEKTALNEFEMRYRREYGVFYEFLVSFYQMNVNEESYFWQAKKVTQNQSTDIESFVELIGGVSSGETALTAADRIAARSAEFAAAVDQMASGDGDNMVPMFKSTVVKQAMQEAGQVQMKALLGEDAEPELPLFPGGLVTSPDGMKWLPHHPA

SEQ ID NO: 82737 - protein, 494 aa, Sphingopyxis sp.
  REGION 1..494: note = tr|A0A270BJN1|A0A270BJN1_9SPHN Tryptophan halogenase; OS = Sphingopyxis sp. GW247-27LB OX=2012632 GN=CD928_01055; PE = 4 SV=1
MRRIVIAGGGTAGWMAAAAIARTLGPVVELTLIESEAIGTIGVGESTIPPLVNYNRLLGINEADFMRATQATFKLGILFDDWKDLGTRYFHSFGLTGKDHWSAGFQHFWLHGRAKGHDAPYEDYCLELAAAVQGKFAHLPDDRLNYAYQLDSGLYARFLRQMAEGDGAKRIEGRIARVELDGESGDIAALVLDGDRRIEGDIFIDCTGFRALLIEGALHAGFEDWSHWLPCDSAIAIQTPNVGPPTPYTRVMAHDAGWQWRIPLQHRTGNGLVYCSRYLDREPALERLLGNIEGDPLTEPNFLRFTAGTRRRQWHRNCVAIGLSGGFMEPLESTAIHLIQRSVLRFVRMLPAGRVSERDIAEYNDQQMQDMVQIRDFLVCHYKVTNRRDSPFWRHCAAMPIPDTLEQKIELFRETGRVFRRNEELFAENSWVQVMMGQGVEPESYHPIAAKLRDDELDRLLRMIRGQVADTVASLPDHQSYVARYCGAEVPQAA

SEQ ID NO: 82738 - protein, 511 aa, Glaciecola sp.
  REGION 1..511: note = tr|A0A2Z6UHJ1|A0A2Z6UHJ1_GLASK Tryptophan halogenase; OS = Glaciecola sp. (strain KUL10) OX=2161813 GN=KUL10_32600; PE = 4 SV=1
MIEHVVIVGGGTAGWLSAGMIAANKHKYSNSTPKITLIESPNIKTLGVGEGTWPSMRNTLQQIGINEREFIKSCNVSLKQGSQFKGWRDGSIQDSYYHPFITPPGYYECDLHTHWQSLAPEMPFADFVSVQSCVCDHKKAPKQFATPDYAGVTNYGYHLDASKFAELLKDHCTDKLNVNYICDDVIGVNTDDNNNITSLVLAKHDELHLDLVIDCSGMHSLLIDKHYGVEFQRCDDVLFNDSALATHLPYSDDNEQIESATVATAQEAGWTWDIGLQTRRGVGYTYSSRHSTDEQAEQVLRDYIRKTSNDRLAQSVDVRKISFTPGYRKQFWVKNCLAVGMSAGFFEPLEASALAMVELSLTMLTEEFPVDHNHMTMLSERFNNRFTYRWQRVVDFLKLHYLFNTRDEPYWVDARDDQSTPNSLKQLLQIWQYQAPNRHDLTQNEEVFPSASYQYVLYGLGFIPKVSKTLSLAQQQQAQRLFQQNRENQSRFIQALPGNRELVTHIKSKVA

SEQ ID NO: 82739 - protein, 443 aa, Nostoc sp.
  REGION 1..443: note = tr|K9QMH7|K9QMH7_NOSS7 Tryptophan halogenase; OS = Nostoc sp. (strain ATCC 29411 / PCC 7524) OX=28072; GN = Nos7524_0707 PE=4 SV=1
MKIAVIGGGTAGYIAASHISKHFPQFNLYHIYDSTIPTIGVGEGTIPYFLTWLDKITNLSYAELEKRCHITRKFGISFENWGVEHEQFFHHFYPVGETYAYHISAVEIVNLLQEYICATKIDCQVIDVKSNGISANIIFANNTNLEVDLAIDARGFPKSFDDDYIQMSWIPTNAALIRQTPGDNDHLIELKMGSHLLKYQSATRSIARPHGWIFTIPLTNRTSYGYIYNRNLNSLSEIEADFDEFFLHEKITYSGQPKNINFPNFTVRNCFDGAVFKIGNTSAFIEPLEATAIGYILQQVEAISCWVLRAFAKVDQREKLDETQLRVFNQYFLNYAYKISIFVGWHYTMGSRFNTKFWEFAKDNFYQEITKLENDQLLEEFYSLLELAAQLPHPIENFPEFSSTLAEITNIFTALLAGFTKTFGQWTKPSFTEVGYGIGYFSN

SEQ ID NO: 82740 - protein, 557 aa, Alteromonas macleodii
  REGION 1..557: note = tr|A0A126Q4T3|A0A126Q4T3_ALTMA Tryptophan halogenase; OS = Alteromonas macleodii OX=28108 GN=AVL55_19920 PE=4 SV=1
MSDNEGHCSMHRVVIVGGGTAGWLAAGILAAKLSANHTVTLIESPNIPSLGVGEGSWPSLRDTLLDIGISETEFLTVCHGAFKQGSSFVNWRKGGHCYYHPFTVPTGYNELDIYTCWKSIAPNTSYEDAFSLQAAMCAAGKAPKQIATPDYAHVLNYGYHFDATKLAELLKNHCIDKLNVAHVVGHVDNVHSHQNGDIESVSTKDGKKIVGDLFIDCSGHSGLLINKHFTIPWIPVKRTMLNDRAVALQVPYSNEDAEIKSTTVATAQTCGWTWDIALQHRRGVGLVYSSQFTDEDQAKQVLIDYVRERYPSAQDAELSFRTLSFEPGYRSQFWVKNCLSLGMSSGFVEPLEASAIAMVELGLRMLCEAFPQNKAHMEIASKRYNSRFAYRWQRVIDFLKLHYALSDREEPYWLAQRDKASIPVSLAELLELWKYQSPSRLDLIENEEIFPSASYQYVLYGMGFSSSTSPLRLNEERKRKAVHIRETLQQTKNAYLQGLPSNRVLLNDIAKRYSNEKQHVPSHAQREKNEHASASSCNDIKNTSDKKDASYDRIGFR

SEQ ID NO: 82741 - protein, 494 aa, Novosphingobium sp.
  REGION 1..494: note = tr|A0A258V4G1|A0A258V4G1_9SPHN Tryptophan halogenase; OS = Novosphingobium sp. 28-62-57 OX=1970409 GN=B7Y36_08440; PE = 4 SV=1
MKAGTAPPHVVVLGGGSAGWITACLMHKEWAARGGSVTVVESPDIGIIGVGEGSTPQLKALFDHLGIAEADWMPACDATYKLGIRFTGWSDRPGFESYFHPFPGPTDLHSQPDFFLNAMLARRGFDVPAHPDPWFLATHLADAGKAPQASPNFPFAPSYGYHFDAYKLGAFLRDWAVARGVVHLPCKVLDVEFADDGDIAALLCEDDKRIAGDVFVDCSGFRALLIQQKLGVPFKSYGENLFNDRAVVMPTPHTASFKPQTDAVAMRAGWRWSIPLTTRVGNGYVYSSSYLSDDAAEAELRAAIGMSGSDQPARFLQMNVGRVEHSWSRNCLAAGLSQGFIEPLEATALHIVIATALEFVRAYESGGFTPQHRDAFNHSAATRFEGIRDYIVAHYRVNQRQDGAYWQANAANQSLSDGLKAMLTAWFTHQDIAAANTAAYGDPHYSAMSWHCLFAGYGTFPPPAKVQPLPPAAAAGDMDAITAMLKACAMNFAP

SEQ ID NO: 82742 - protein, 501 aa, Sphingomonas sp.
  REGION 1..501: note = tr|A0A0Q4LD92|A0A0Q4LD92_9SPHN Tryptophan halogenase; OS = Sphingomonas sp. Leaf42 OX=1736219 GN=ASE97_11230 PE=4; SV = 1
MNDQAIRRIVIVGGGTAGWMAASTFARLLGPKYCEIHLVESDAIGTVGVGEATIPQMATFNRMLGIDENEFLRETKGTFKLGIEFVDWTRIGHRYFHPFGSYGVNMNGISFHAYWLRLHALGEAPAIEPWSLQAMASADAKFMRAIDAGNSPLSDIPYAFHFDAGLYARYLRRYAEARGVVRHEGKIERVELRPENGFIDGVVLDDDRRIEGDLFIDCSGFRGLLIDQTLGAGFVDWSHWLPCDRAVAVPCAGGERLDPFTRSTARAAGWQWRIPLQHRIGNGHVFSSAHMSDDEATAILLANLDGEPLADPRFVPFRTGHRDRVWIRNCVAIGLSSGFLEPLESTSIWLIQSGLSRLMAMFPDRRCDPAEVARYNRILATEYAEIRDFLILHYHATERNDSPFWDHCRTMDIPERLAEKMRVFQSRGRTFRENEELFNDTSWFAVLQGQGLRTNGHDPIADTLTLDETRERLAHIREAIAASAAYMPTHREFIRQHCAAE

SEQ ID NO: 82743 - protein, 506 aa, Sphingomonas sp.
  REGION 1..506: note = tr|A0A0Q4L7G1|A0A0Q4L7G1_9SPHN Tryptophan halogenase; OS = Sphingomonas sp. Leaf42 OX=1736219 GN=ASE97_15390 PE=4; SV = 1
MSPAADHDAPHLRRIAIVGGGTAGWMAAAALSRVLNGSVAIALVESDAIGTVGVGEATIPPIRAFNALLGIDEDAFIRATGGTFKLGIEFAGWGDVGERYFHPFGVYGVDVGAVPFEALWHRLRAEPGARPLAAYSICAAAAATGRFQRPRTDPGNTPLHQIGHAFHFDAARYAAYLRRLAQAAGVVRHEGRIATVERGGDRIDAVLLDDGRRIEADFFIDCSGFASLLLGGAMGSAFLDWSHWLPNDRAVAVPSTAIPAPPPYTRATAHGAGWQWRIPLQHRTGNGVVFASAHLDEDAATDLLLANLDGTPLGDPRVLRFKAGRRAESWVGNCVALGLSAGFLEPLESTSIHLIQAGIARLLEMLPARDPDPAMVRRYNRLMGEEFDRIRDFIILHFHATRRDDTPYWRHLRTMAIPDSLAGRIAEYRATGRVYRDGDELFTRTSWLAVLEGQGVRATGVDPLAMTLSLDEARARLDRIAQVTQAAADRMPTHADFIAAHCQAAS

SEQ ID NO: 82744 - protein, 505 aa, unidentified
  source 1..505: note = Rhodanobacter denitrificans
  REGION 1..505: note = tr|A0A368KEI6|A0A368KEI6_9GAMM Tryptophan 7-halogenase OS=Rhodanobacter denitrificans OX=666685; GN = DEO45_05725 PE=4 SV=1
MNDSRIRQVVIVGGGTAGWMAAALLAQALGTGVAIRLVESAEIGTVGVGEATIPQIRHINRFLGIDEDELLRFVHGTYKLGVQLNGFTRPGDSYLHAFGDLGLPLGLTPFHHYWLRAVQERGHADAQGLWAYSLNAAAAAENRFAPLETVPDNPLGGIRYAYHFDATRYAQYLRERIAPGAVQRIEGKVVDVRLRAGDGFIESLQLDNGEIVEGDFFVDCSGFRGLLIEGALNTGYENWQQWLPCDRALAVASAPGGPMRPYTQASARTAGWQWRIPLRHRVGNGHVYCSRFISDDEAAAQLLANLETEALGDPRPLRFVTGMRRLAWNRNCLALGLAAGFMEPLESTSIHLVQSGISRLLAMFPDRHCDSALVDEYNRQTRFEYEHVRDFLILHYKATERTDTPFWQQCGAMEIPPSLARRIELFRRTGMVFREGDELFAETGWVQVLLGQRIEPERHHPLADALTTPQLDGFLADIRTLVGRAKNTLPAHHAFVARAAGSPVT

SEQ ID NO: 82745 - protein, 508 aa, Glaciecola sp.
  REGION 1..508: note = tr|A0A2Z6UBZ8|A0A2Z6UBZ8_GLASK Tryptophan halogenase; OS = Glaciecola sp. (strain KUL10) OX=2161813 GN=KUL10_18310; PE = 4 SV=1
MSQAITKIAIVGGGTAGWLSAAIIAAHHKTNQTQGIQVCLVESSDIPTVGVGEGTWPTMKNTLKEIGIKEAEMFAHCKAVFKQGGKFVDWVHGNGDFYYHPFTVPLGYGRIDLAPYVEDIEQYAVESNFQHHVCEAGLAPRTISEAEYSGQCNYAYHIDAGAFGELLKNHCKQQLNVQHIVDTVEHVTLAADGSIASIELAKTTPIEADLYIDCTGFASMLLGGKLNVPFMKMDKYLFNDSALALQVPYEKADSPIASHTIATAQNAGWIWDIGLTHRRGTGHVYSSEFLSDDEAEQNLRKYLGKAADGLTPRKISFQSGHREKFWEKNCVAVGMAAGFVEPLEATAIMLVEISAKFVAENLPPTKAIMPTVAKRFNQQMRYRWTRIIDFLKLHYMLTKRPEPYWQAHTQEDSIPDSLKEDLAIWGYRGPTNSDFESAVELFPAASYQYVLYGMGFKPDFSQQAHLYQQQQQAQTIIQRNQKITQQMLQTLPSHREYIEKWLASAKTN

SEQ ID NO: 82746 - protein, 513 aa, Massilia lutea
  REGION 1..513: note = tr|A0A4P6L343|A0A4P6L343_9BURK Tryptophan 7-halogenase OS=Massilia lutea OX=321985 GN=EWM63_24895; PE = 4 SV=1
MNQQIKHIVIVGGGAAGWITAGRIAARHARADSGITVTLVESPSIGPIGVGEGTWPTMRSTLMKMGISESDFMRECEATFKQGAKFARWVDGTSDDYYYHPLMLPQGFGQLDLVPYWQTACAGRSFSDTVCLQEQVCEHGLAPKMITTPEYASVANYAYHLDAGKFVTFLTRHCTATLGVEHVLGDVTAVRSASNGDIAAIVTTQQGEIAGDLFIDCTGFSSLLLGKHLEVPFVDRSDVLFIDKAIAAQVPYEREDAPIASHTISTGQAAGWIWDIGLVTRRGIGYVYSSRHTSDDEAEAALRAYIGPAGKSVGTRSIPIRSGHRQLFWKNNCVAVGLAAGFLEPLEASALVLVELSADMLAEQLPATRDTMDIVARRFNETFLYRWDRIIDFLKLHYILSKRTDNAFWTDNRDPETIPDSLKDLMRLWRYRPPGNCDFTSNNEVFPAASYQYVLYGMGFRTDPEFLRPSPSEGRAAQEQLSQNSVAVRRALKMLPAHRDLIARIHAYGLPTV

SEQ ID NO: 82747 - protein, 496 aa, Alteromonas macleodii
  REGION 1..496: note = tr|A0A126PZJ7|A0A126PZJ7_ALTMA Tryptophan halogenase; OS = Alteromonas macleodii OX=28108 GN=AVL55_09625 PE=4 SV=1
MNKAVRNVVIVGGGTAGWISAAVIKRLIGAGVNVTLVESEEIGTVGVGEATIPPIITLNNVMGIDEKEFLRETNATMKLAIKFENWRIEGESYFHTFGAPGKSYAFCQFHHYFKRAQELGLADSIWEYDLNYLACKAGKFAHIKSPDPIIEMPYAYHFDASLYARFLRKKCEAMGVSRKEGIITDVKQDVDSGFISGVTLKSGEYIGGDLFIDCSGFKGLLTQQTLNTGYEDWSHWLPCDRAVAMPSERHEHTHPYTRSIAHSAGWQWRIPLQHRNGNGLVYSSNYYTDDQALDILSRNLDTKPLADPKFIRFKTGRRRKQWNKNVVAVGLSSGFLEPLESTSIHLIQSAVVRLIHLFPHDGFKQHQINEYNKQSQLEYEQVRDFIILHYHVNERTDSHFWKDLREMDVPDSLTHKIELFRESGNLFREQNDLFLESSWLQVLMGQGVFQKDHHPLANALSEQKLQELMQNIKRIKNEPIGKIASHDEFLKQFCGS

SEQ ID NO: 82748 - protein, 506 aa, Alteromonas macleodii
  REGION 1..506: note = tr|A0A1E7DBL4|A0A1E7DBL4_ALTMA Tryptophan halogenase family protein OS=Alteromonas macleodii OX=28108; GN = BFV94_3018 PE=4 SV=1
MNKLPQEIVIVGGGTAGWMTACYLARTAELMANNSNVPIPAPKITLLESAVISTVGVGEGSTPYLRHFFEFLGINENEWMLRCSATYKMGISFERWTATVESKTTDPAFTESDSYFHPFFSSLDIPTADMYFSAVNEYRKGASHDINPSHYFTAAHMVEKGITPDAICSSANIDYAYHFDAGLLGDFLKEYALNKGVSHQIGTVANVECHEHTINSLKLDDGNTLSADFFIDCSGFRGLLGKQALSRRFTSYADTLFNDAAVAIASDATASPETALQTRSIALSHGWQWHIPLTSRTGNGYVYSSQFCTEAQAEEELRLALEPDQFHQQARHLKMTVGRLEEHWKGNCLCIGLSQGFIEPLEATALMLVQYALHHFIDCWQSNNPRREERYNSEINRMFDGIRDYIAAHYYLNTRDDSAYWVACREDLKVPDTLSYLLNAWDKGASFEQALNEVDNKLVYLRPSWYCIFAGMKRFSNNTTPLAHPNTLALRTMQQSVEGAHRVRQP

SEQ ID NO: 82749 - protein, 513 aa, Kaistia soli
  REGION 1..513: note = tr|A0A1M5NLF9|A0A1M5NLF9_9RHIZ Tryptophan halogenase; OS = Kaistia soli DSM 19436 OX=1122133 GN=SAMN02745157_5028; PE = 4 SV=1
MADQPHFVIVGGGTAGWLAAFILSDKARRLKLDARVTVVESSKIPTVGVGEGSTAALRVLMQYFNLNELEFFRETGATFKLGIRHKDWRRIGHSYDGPIDDPHQVVKAPAGAPSDYLNVFCVAAGRKLQDMHLFGPLLEKKKSPYALKDDGTLVPLGPFHHAFHFDQARVGKFLKARAGNVNTIDATLSGIERDPETGYIRAVVLDDGTRLAGDFFVDATGFRKRIIVQELAAPWISYANELPVNRALPFWLDIKPGEEIANYTLAWALEAGWMWQIPTQERYGCGYVYSDAFKTPDEAKLEVERVLGHPIEVRDDIRFQIGRLATPWLGNCLAVGLSSSFLEPLEATSIHGSVVQLLLFADNYLKHPSEMTEADRVDYNRRFGRQVDDFRTFINTHYVTERDDTPFWRNVREERLHEETRQRLALWRKEMPRREHFPSFLGGLPHVETQLHYPVLDGLGLLDPAVARAEMARDPKLRQFARETYESLVREYRAAATKALGHAEFLRYVNGIA

SEQ ID NO: 82750 - protein, 534 aa, unidentified
  source 1..534: note = Frankia canadensis
  REGION 1..534: note = tr|A0A2I2L273|A0A2I2L273_9ACTN Flavin-dependent tryptophan halogenase RebH OS=Frankia canadensis; OX = 1836972 GN=rebH PE=4 SV=1
MTANPDNRIQKVVILGGGTAGWMTAAYLGKALQGTVGITVLEAPTIPRIGVGEATVPNLQRSFFDFLGISEDDWMRECNASFKMAVRFVNWRTEGPAQATARELRNGGPDHFYHPFGLLPDYGQTPLSHFWFKRKYEGRTTEPFDYACFREPPVMDALKAPRWLDGRPATRYAWHFDAQLVADFLRRFATEKQGVHHVQDAMVRVEQDDHGYVTALRTKGGLTLEADLFVDCSGFRGLLINQALEEPFIDMGDHLLCDSAVATAVPHDDKRYGIEPYTSAIAMSSGWTWKIPMLGRFGTGYVYSSKFTDQESATQEFCNLWDLDPEQAKFNHIRFRVGRNRRAWVKNVVGIGLSSCFLEPLESTGIYFITAAIYQLAKHFPDRNFSQGLIDSFNHEIELMFDDTRDFIQAHFYYAPRNDTPFWQANKNLRLPENIQKKISAYRAGLPINSPITDESTYYGNFEAEFRNFWTNGSYYCIFSGLGLHPDAPLPALAHQPESVAGAEPLFETVKRQQQNLLETLPSAYDYLRQLHGA

SEQ ID NO: 82751 - protein, 500 aa, Novosphingobium sp.
  REGION 1..500: note = tr|A0A437NDE3|A0A437NDE3_9SPHN Tryptophan 7-halogenase OS=Novosphingobium sp. FSY-9 OX=1908524; GN = EOE18_02025 PE=4 SV=1
MEQRKIRKVVIVGGGSAGWMSAAMLAQALQRDCAITLVESEEIGTVGVGEATIPPIRLFNQTLGIDEREFMKRTQGSFKLGIEFVGWGREDSRYFHPFGPYGRDFDMVPLHQHWLKARSMGESAPLDDHSMAWALAKAGKFAHPAPDPRSVLSTFDYAYHFDAGLYARYLRELSEARGVQRVEGKIASVAQHGESGHVEAVVMEDGRRIEGELFIDCSGFRGLLIEGALQTGYEDWSHWLPCDRAVAMPCAKVGDPTPYTRSTAREAGWQWRIPLQHRTGNGYVYCSQFMEDGRAADLLSQRLDGKALGDPRPLRFTAGRRKLHWNKNVIAVGLSSGFLEPLESTSIHLIQANISKIIALFPDLDFDPATRDEFNRVAHGEMERIRDFIILHYKLTQRQDSELWRYVAAMDVPDTLKLKIEHFRRYGRLIARDLDLFAAPSWLAVHIGQGNIPEALDPLLEHRGMDAREWLCKLRGAMAAEAARMPGHGAFLAQHCPAGA

SEQ ID NO: 82752 - protein, 507 aa, unidentified
  source 1..507: note = Lysobacter silvestris
  REGION 1..507: note = tr|A0A2K1Q122|A0A2K1Q122_9GAMM Tryptophan halogenase; OS = Lysobacter silvestris OX=1645665 GN=Lysil_0360 PE=4 SV=1
MTASDQRIRNVVVVGGGSAGWTAAAALVTYLDTSVSVHLVESEEIGIIGVGESTVPFMKTFNGLVLGIDEIDFIRETQATFKLGIQFNDWGRIGDSYVHGFGTIGRSLGPLPFHQYWLKLFLAGRAPDIGAYSLPTSAAPLDKFMISPPDAPSGSPLADIAYGYQFDAGLYARYLRNLAERRGVHRSEGKIVDVVQRGEDGFIEAIVMENGERVEGELFIDCSGFRGLLIEQTLKAGYEDWSEWLPCDRAMVAPSASAGPLTPYTRVSARPAGWQWRIPTQQRIGNGYVYSSNHISDDEAAATLLATLDGPALADPRPLRFTPGRRKEFWRRNVVAVGLAGGFMEPLESTAIYLAQSGVQRLLALFPDRDCDPLLSGRFNRESAFEHERVRDFLALHYNATERNDTPFWDHCRTMAIPDSLRETIAQFRIDGRYFRNGEDFFALPSWVQVMLGQRIIPGGYHPIVDKLPEERLEQFVDRARQEVARAVNAMPSHQAFINHYCKTIPA

SEQ ID NO: 82753 - protein, 557 aa, Alteromonas macleodii
  REGION 1..557: note = tr|A0A351UES6|A0A351UES6_ALTMA Tryptophan halogenase; OS = Alteromonas macleodii OX=28108 GN=DCZ37_11420 PE=4 SV=1
MNNSQNQCGLHRVVIVGGGTAGWLAAGVFGAKLSTKHSVTLVESPTVSSIGVGEGSWPSLRDTLLDIGISESEFLTLCQGAFKQGSSFVNWRKNAHSYYHPFTVPAAYNELDIHACWKALAPNTPYQDAFSLQAAMCVAGKAPKQIATPDYAHVLNYGYHFDATKLADLLKQHCVDKLNVDYVSGHIGSIKSSSDGYIEKLITECGKEIVGDLFIDCSGSSGLLIDKHFNVPWIPVKRTMLNDRAVALQVPYSDTDTEIKSTTVATAQTCGWTWDIALQHRRGVGLVYCSQFTNEEQAKQVLIDYVRERYPSAQDAELSFRTLSFEPGYRSQFWVKNCLSLGMSSGFVEPLEASAIAMVELGLRMLCEAFPHNKKHMEIVSKRYNSRFAYRWQRVIDFLKLHYVLSDREEPYWIAQRDKASIPDSLAELLELWKYQSPSRLDLIENEEIFPSASYQYVLYGMGYSTSAPLLRLSEANKLKALHIRETLQQTKNAYLQGLPSNRVLLNDIAKRYSNEKQHVPSLAQREKNEHASASSCNDVKNTSDKKDTSYDRIGFR

SEQ ID NO: 82754 - protein, 500 aa, Novosphingobium sp.
  REGION 1..500: note = tr|A0A437NC70|A0A437NC70_9SPHN Tryptophan 7-halogenase OS=Novosphingobium sp. FSY-9 OX=1908524; GN = EOE18_00145 PE=4 SV=1
MPRQRIVIVGGGTAGWMTANLLAQRWPHMAIALVEAPEIGIIGVGEGSTPTLKRFFEEMGIAEEAWMPRCKATYKTNIRFAGWSPATGIADYSHPFLTQIDLHTSEAFVLNCRNRRLGLDVPTAPEAFFLNGVLAAQGKAPLAPEHFPFAIEYGYHFDSGLLGEFLRDHATARGVVHRQAKVVDAQLAGDGSIAHVLTDQGEAIAGDLFIDCSGFSALLMRGKLGIGFKSFRDNLFNNAAVVLPTPAQDEPAPETVSTALSHGWCWSIPLTSRVGNGYVFSSDYLSPDAAEVELRAHLGMLDSAQEARHLRFNTGQLAQHWARNVLAVGLSQGFIEPLEATALHLVLGTVDMFMEEYQRGGFTNLYADAFNQKISERIERVRDYIVAHYKLNMREDSAYWQDNRENEHLSEALRHILDVWFKRGDLVAELERQNSLSHFGAESWHCLLAGYGAFPAVKQAGSLDVDFYAARGIGSFLDRCSLNFPPQSRVLAGWAGGGAV

SEQ ID NO: 82755 - protein, 508 aa, Asticcacaulis benevestitus
  REGION 1..508: note = tr|V4PHX1|V4PHX1_9CAUL Uncharacterized protein; OS = Asticcacaulis benevestitus DSM 16100 = ATCC BAA-896; OX = 1121022 GN=ABENE_17060 PE=4 SV=1
MPLPQPKRPIKTIAVIGGGTAGWMSAAAISKSFGRNIQVQLVESDEIGLIGVGEATVPHISAFNRLLNIDEAEFVRETQGTFKLGIQFKDWGKIGDSYIHGFGTIGRDLGLMPFHQYWLKARAAGKAKDIGLYSLNTVAAPLGKFMAPPRDAPAHSPLAEIAYAYHFDATLYARFLRKQAEAQGVTRTEGKVVAVTQNSESGFVESVTLESGAAIAADLFIDCTGFRALLIEDTLQAGFEDWTHWLPCDRALAVPCEKVEAPTPYTRSTARKAGWQWRIPLQHRTGNGHVYSSQFMSDSEAADVLLQSLDGRPLADPKAIRFTTGKRRKLWDKNVVAVGLAGGFIEPLESTAIFLIQSGISRLMSLFPHADFEPVLQETYNAQMQFEYERIRDFIILHYHATERSDSEFWNYVRTMPVPSSLKAYMDLFTADGQFFREGTELFGLTSWVQVMLGQGLSPRSYHPAVDWVKDDDMLSLIDHVEKVVASNVALMPRHEDFIARHCAARSV

SEQ ID NO: 82756 - protein, 499 aa, unidentified
  source 1..499: note = Asticcacaulis biprosthecum
  REGION 1..499: note = tr|F4QI87|F4QI87_9CAUL Tryptophan halogenase PrnA; OS = Asticcacaulis biprosthecum C19 OX=715226 GN=ABI_01550; PE = 4 SV=1
MVRKVVVVGGGTAGWMAAAALGKALGTRLDITLIESDDIGTVGVGEATIPSIQEFNQMLGIDENEFLRAVNGTFKLGIRFIDWKAPGSEYFHPFGVYGIDMGVNFTHHWMRYRKAGGNADFGLFNPQTMAARSHRFGRMAEINPKAPRVNYAFHFDATLYARFLRRFCEGLGVVRHEGKITHVNQDPNSGDITSVALEDGRVMAGDLFIDCSGFRGLLIEQTLKSGYEDWSKWLPCNRAAAVPCDKVGPATPYTTSTAREAGWQWRIPLQHRTGNGYVFSSDYISEDDASTLLLQRLDGKAQAEPRIIRFLTGHRKQMWNRNVIAMGLASGFLEPLESTSIFLVQEAIVTLIKYFPKDGILPSQRACFNRDLLAAYDNVKDFLIAHYKVTTRDDTPFWAYVKNMDIPESLKFRLEAFAQNNQCLVQGDELFKEASWFAVLVGQGMEPDSYNPLADVMAEDEFRWRIDRLREGTAGLASTMPSHESYIARTCPSLQRVAV

SEQ ID NO: 82757 - protein, 503 aa, Sphingomonas sp.
  REGION 1..503: note = tr|A0A4R2XMB3|A0A4R2XMB3_9SPHN Tryptophan halogenase; OS = Sphingomonas sp. JUb134 OX=2485112 GN=EDF69_1285 PE=4; SV = 1
MTAKPLDRVVIVGGGAAGWMTAAVLARLTAAGTSVTLVESEEIGTVGVGEATIPPLLDFNRFLGIDEDAFVRATGATFKLGIEFVDWARRGERYLHPFGTFGRDVQGIKFHQLWLRQARVDPPIADTGSLHDYCLASVAARMARFTRPSGDPAAVLSSLRYAFHFDAALYARFLRGIAERGGVVRVEGRVAQIDLAPEDGFIRAVQLADGRRIEGDLFVDCSGFRSLLLGEALGVPFTSWQRWLPCDRALAVPSASAGPLLPYTRATAERAGWRWRIPLQHRTGNGHVYASAFASDAEAADTLLQGLDGAPAAEPRPLRFVAGMRERLWERNCIAIGLAGGFLEPLESTSIHLIQSGITRLISLFPDNGHAPVEREAYNRLARAEYEQVRDFLILHYHATERDDSDFWRHCRTTPPPDSLAYKLELWRARGRVLPEAGSLFTEDSWIAVLMGQAGAPASVDPLVATLPVQETRRFLHHLRTVIGQTAAAMPAHDQFIARHCAA

SEQ ID NO: 82758 - protein, 517 aa, Pseudoalteromonas sp.
  REGION 1..517: note = tr|A0A1Y5K1H7|A0A1Y5K1H7_9GAMM Uncharacterized protein OS=Pseudoalteromonas sp. A601 OX=1967839; GN = B5G52_09525 PE=4 SV=1
MATSTINHIVIIGGGSAGWLSAGLIAAQPHLTHNAKVTLIESPNVPTLGVGEGTWPTMRQTLKTIGISETQFIRQCDASFKQGSRFDGWCHDAKNGESNEYYYHPFSLPVAYQSLNIAPYWFAQHNAVSFSHAVSSQTYFCDQNKAPKTHMHADYQTHANYGYHLDAGKFAQLLQQHCVDKLRVNHIISHVDEVISDEDDYISAVQTSDHGLITGDLFIDCSGHHGRLIDKYYKVPLQTQDHILFNDSAVAVQVPYADDEQEILSYTKATAQDTGWVWDIGLQSRRGVGMVYSSKFESTQGAKDKLINYLNTTQSDLDLSKLTIRELKFTPGYREQFWHKNCIAIGMSAGFIEPLEASALVMVELSLNTLLANFPTNRKAMPQLAKRFDQQTHYRWQRIIEFLKLHYVLSTRTSEYWQAHKAPRSIPSALIDNLALWRYQSPWLNDFDRAQEVFSAASYQYILYGMKQLPQFPQMKMPAAIIEHFTNSQQDAKQGLAKLPTNRQLLNHIKKFGLQPI

SEQ ID NO: 82759 - protein, 510 aa, Hyphomonas sp.
  REGION 1..510: note = tr|A0A1Z9XTE8|A0A1Z9XTE8_9RHOB Uncharacterized protein OS=Hyphomonas sp. TMED17 OX=1986605 GN=CBB77_10100; PE = 4 SV=1
  VARIANT 374: note = Xaa can be any naturally occurring amino acid
  VARIANT 449: note = Xaa can be any naturally occurring amino acid
  VARIANT 454: note = Xaa can be any naturally occurring amino acid
MCGAIKHIVIVGGGTAGWITAGVLAASHSDRSPAGLRISLIESPDIPTIGVGEGTWPTIRNTLARIGISEAEFLHTCNASFKQGSRFNRWVNGEAGDSYVHPFELPISSDGADALNAWKALAPDKPFAEAVCVQSAPGQEGLAPRQRTMPDYNGAMNYAYHLDAGKLVELLRNHAVSKLGVERITDNVVEIVGAQDSDIEAVRCEARGLIAGDLFIDCTGRQSLLLGGHYDVGFVDKSNILFNNRAVVTHVPVAADSTIASETVSTAHEAGWIWDIGLPTRRGVGCVYASDYMDDERAEATLRAYLGDAEHTPPRRISFKSGHREIFWHQNCVAVGLSAGFLEPLEASAIVLLELSAAMIADNMPVSRAAMSVXARKFNQLFLYRWGRIIDFLKLHYVLSQRDEPYWQDNRRAESIPERLQDYLEVWKTRPPNTYDFEQAREVFPVASXLFVTXGMGMTPATHPTLDARAANALKDDMQKMLKKRRKFTEALPTNRALLTGSGASLKLAI

SEQ ID NO: 82760 - protein, 497 aa, unidentified
  source 1..497: note = Chromatiales bacterium
  REGION 1..497: note = tr|A0A520X1K8|A0A520X1K8_9GAMM Tryptophan 7-halogenase OS=Chromatiales bacterium OX=2026725; GN = EX272_11370 PE=4 SV=1
MQDTIKKLVIVGGGTAGWMTAALLKRVLAHAVDIELVESSDIGIIGVGEATIPPIELFNKVLGLDEAEFLRETKASIKLAIRFENWRAQGERYYHTFGAPGRSQAFCHFHHFWTRAQQLGDTSSLWDYDLNYLCAEAGKFAKLEVNDPVWEMQYAYHFDASLYGQYLRKYAEKLGVRRTEGMIEDVALDAQSGFVETLTLKDGRQISGDFFVDCSGSRGLLIGQALKTGYEDWGHWLLCDRAIAVPSERFEKTLPFTRSIAHPGGWQWRIPLQHRNGNGLVYSSKQYSDDEAADVLLGNLESEALSDPKVIPFRTGRTKKQWHKNVVAVGLSSGFLEPLESTSIHLIQSAIVRLITFFPHAGVRDELVDEYNRQSRLEFEYIRDFIILHYKLTERDDSEFWRYTKSMDVPERITEKIELFRSTGALTKENFDIFLESSWLQVMLGQGIMPGDYHPLADTLSEKQLRDKLTNTRQTKMQPMDQIPAHDEFLEMFTRSR

SEQ ID NO: 82761 - protein, 507 aa, Asticcacaulis sp.
  REGION 1..507: note = tr|V4PZE2|V4PZE2_9CAUL Tryptophan halogenase; OS = Asticcacaulis sp. AC460 OX=1282360 GN=ABAC460_02875; PE = 4 SV=1
MHANPMIKSITIVGGGTAGWMTAALLSKLLLGRFDITLVESEEIGTIGVGEATIPAIKVFNQFLDLNETEFIQATQGTFKLGIEFVNWRDKGHSYIHGFGKIGSDLMWLHTHQFWLKMHEKGEVKDFDHYALNTLACRMNRFRPRQPNEPPPMADFDYAYHFDASLYARFLRKQAEGRGVKRIEGRITRVELRPNDGYIDHVVLQSGQTVGGDLFIDCSGMRGLLIGDALGVGYEDWSHWLLNDRAWAVPCENAPVLTPYTRSTAHGSGWQWRIPLQHRTGNGHVFSSSQMGDDEAAAILLKNLDGKALADPRMVKFRPGKRHRAFEKNCVAIGLAGGFLEPLESTSIHLIQTGILRLLALFPGQSFDPRDIAEYNAQTDFEYRDVRDFIIAHYKVTDREDTPYWAYLKHMEIPESLADRLDLCRSSARFFKHSAAELFHEESWVQVLLGQGLRPRYDPMVDMIPEDDIRAHLKDIEEVIAEYAAKLPTHGEYIERYCKAPPLMEMA

SEQ ID NO: 82762 - protein, 505 aa, Maricaulis maris
  REGION 1..505: note = tr|A0A495CXT9|A0A495CXT9_9RHOB Tryptophan halogenase; OS = Maricaulis maris OX=74318 GN=C7435_3089 PE=4 SV=1
MSSQSFEQESGLPRIAIIGGGSAGWMAAAAIIKATKGAASVTLVESEQIGVVGVGEATIPPIKLFNQMLGIDENEFVRETQGSFKLGIEFVDWSRRGQRYFHPFGTHGRDFDSLPLYQYWLRERRRGDETSLDAYSMAWVVARENRFSPPARDPRLVQSTFDYAYHFDTILYGQFLRRYSEARGVDREEGRVVETRLSETGDVAAVVMEDGRAIEADFFIDCTGFFGLLIEQALKTGYEDWTHWLPCDRAMAVPSETAGDFTPYTRSTAREAGWQWRIPLQQRTGNGHVYASQFITDDEASDTLLANLDGKPLADPRPLRFTTGRRRKFWNRNVVALGLSAGFMEPLESTSLHLIQTGINRLLALFPGTGDNRLEAAEFNRLTGEEYERIRDFLILHYHATTRDDAPLWRYTANMDIPDSLAWRMEHFRATGRLVSPGTELFLNPSWMAVYAGQEIEPAGLDPLVVGRQVDGVERLAGLRRVMAEAVAPVPDHRAYIERFCKADA

SEQ ID NO: 82763 - protein, 554 aa, Nostoc sp.
  REGION 1..554: note = tr|A0A235HXS6|A0A235HXS6_9NOSO Tryptophan halogenase; OS = Nostoc sp. 'Peltigera membranacea cyanobiont' 210A; OX = 2014529 GN=CDG76_32755 PE=4 SV=1
MSQHVQNVVIVGGGSAGWMTAAYLSKALKKNIQITLVESSNITKIGVGEATFSSIKSFFDFLGLQEYEWMPKCNATYKMGIKFVDWNSDRRHFYHPFERFDFIDGFSISEWWLKLKSANEPFDYSCFMAPTLCDHQRSPRYLNGKIFDDRVEHLFSEKHFSEKNLITLADAEGQYPYAYHFDANLIARFLKDYSRQRGVKQIVDDVVNVNLTEDGSIDSLNTKEHGILSGDLFIDCTGFRGLLINQALGEPFISYSESLLCDRAIAMQIPTDIQKNGINPYTTATALSSGWVWNIPLYGRNGTGYVYSSAFISADEAEQEFRQHLGNVADNCKASHIQMRIGRNRNSWVKNCVAIGLSSGFVEPLESTGIFFIQHGIEELVNHFPGKSFNEELIRNYNRAIANCLDGVRDFLVLHYRASDRADTKFWQATKQEIKVPAELQEKLKLWRSRLPNKKNINPYFHGFETYSYSVMLLGLNHKPEGSLPLLEHLDDEKALAKFKTIKEKANYLSTNLPSQYEYLTYVIKSQEQSEYLSDNHFPTSSVNDSAYQIPVPI

SEQ ID NO: 82764 - protein, 502 aa, Shewanella psychrophila
  REGION 1..502: note = tr|A0A1S6HPS9|A0A1S6HPS9_9GAMM Tryptophan halogenase; OS = Shewanella psychrophila OX=225848 GN=Sps_02369 PE=4 SV=1
MAKEAIKNITIVGGGSSGWMTAMYLQRLYNQSGGTVKIRLVESKDVGTIGVGEATVHSIRFFFAAMGLDENELLRETNATLKNGIMFRNWMKPKDGQTHEYFHPFEQQRPAGPLDNATAWVQSPKHVSYAQATSISSELISNANSPKTATSPQYQGIVPYGYHLDAILMGKYLRKKACGAGVEHIEANVKHVKTDGETITSIITNKGEFTSDIFIDCTGFKGLLIESLRDNNWQSFEQELPCNKAVAIQRKPLLGQSPKPYTLATALTNGWAWEIDLSNRQGTGYVYDGNRLTRKEAEAELLEHLGDSQEILKTVHLDMKIGCRKEFWIGNCISIGLSGGFIEPLESTGLHIVNVGARLLATHLSSNAPTQPVRDSYNKTLNGIYQDLRQFIILHYCLSDRDDTEFWKQAAKTAAYAKGLPEMLELWRNKTCEFMDLAGGYGTIFNDENYRFILYGMDHTPDLSQPASEYEIQNILQRLAQQQEQADKSAMLHSEFLKLVSK

SEQ ID NO: 82765 - protein, 500 aa, Asticcacaulis sp.
  REGION 1..500: note = tr|V4PRV4|V4PRV4_9CAUL Tryptophan halogenase; OS = Asticcacaulis sp. AC460 OX=1282360 GN=ABAC460_07385; PE = 4 SV=1
MSTIRRIVILGGGTAGWMAAACIARNLGTQHHTIEVIESPEIGTVGVGEATIPMINLFNKILGVSPTDMVRETEATFKLGIEFVDWGGLGQSYIHPFGTYGADMGGISFIHYFLRQSQLTGTWTPEIYNLETTAARAGKFGVLPNNDPSRPSLNHAYHFDAALYADFLRRYSLKRGVVRHEATVTQVHQDTESGFVTALDLKDGGRVEGDFFIDCSGFRGVLIEQTLKAGYEDWSHWLPCNRAWAVPCERVEDPIPYTRSTAREAGWQWRIPLQHRTGNGYVFCSEFIDEQDAADKLMTRLDGKPLADPRKLSFVTGHRRRMWSKNVVALGLASGFLEPLESTSIHLVQSALAKLMAFFPKTGFDPHVEDHFNTVMCGEYIAVRDFLIAHYKVTEREDTPFWAYCKHMAIPDSLTQRLEMFGRSGAYIEPPYELFREASWFAVLSGQGIRPRGWHPVADMMTDAELAHHTGQIRDLVASTAARLPPHETFIRHCQQRQAS

SEQ ID NO: 82766 - protein, 448 aa, Asticcacaulis sp.
  REGION 1..448: note = tr|V4RDD0|V4RDD0_9CAUL Tryptophan halogenase; OS = Asticcacaulis sp. AC460 OX=1282360 GN=ABAC460_12950; PE = 4 SV=1
MSDADTDVFYGNLTSPAAYDFNLSLGVSEPDLILDSDTTFSYGTHFTNWGARRLDWVQAFHLPLPVLEGATFQHYLTQQGQAALEPFLVSAVAARRGVFAHPPEDPGHPLSRAEYGYQFDASAYGSLFERAATRSGVRKIAADISAIDAADGVINAIHLSDGQTLTADLWIDATGAQATLLSHIAGERHSARRLHAYLTRTETETPGQAVTTISGMPYGWQAKTALRSSNLMLTITSPDSDTEVQAAFATGPERSAIVDIGWRDMAWVGNCVGIGHAACVAEPVTIAPMLLLQRDIERLLPLLPVSDDLSVERREYNRQALADYVHADLFTRALFETQPVDGAPYWGAALTPADERLIRKIEQFESRGLHVAYDLEPFGPEDWLILHYGMGRRPLRYDRIVDGADNARIRQYLEALRNNIDSAIRSMPPHGAYLNGLTKYLRQQKGEA

SEQ ID NO: 82767 - protein, 456 aa, Zymomonas sp.
  REGION 1..456: note = tr|A0A519E5W9|A0A519E5W9_9SPHN Tryptophan 7-halogenase (Fragment) OS=Zymomonas sp. OX=2068624; GN = EOP94_03015 PE=4 SV=1
FPTIRSTLQFLGIDEAQFIREASATFKQGIRFADWLHTPTVGRHEHFFHPFEAPFYAEEANLVAYWLLQDPKTRPPFAQAVTIQSRVAEAQRAPKRPHEEEFSGPLSYAYHFDAARLAEVLKKRAAELGVAHLQGRVEHVEMTAEGAVDHVVTDAHGRLDADLYVDCSGFRAEIIGQAMKAPFKSAKRQLFTDRAVTCKISYDAPNRPIESYTIATAHEAGWIWDIGLSGARGVGCVYSSAYIDDAGAERILRDYVGATDADFSPRQIAFEAGYREKQWVKNCVAVGLSAGFLEPLEATGLVLIEAAVGMIAELFPRSGPIDAPAKRFNALMTARYDNIINFLKLHYCLSRRTEPFWRDNVEQASIPDALLDLLEQWKYRPPARFDFILDLESFAFFNYQYILYGMDFRTDLSAGRESLTNADGADKIFAKIQKFGERATQDLPTHRDLIRQINGN

SEQ ID NO: 82768 - protein, 501 aa, unidentified
  source 1..501: note = Asticcacaulis biprosthecum
  REGION 1..501: note = tr|F4QM55|F4QM55_9CAUL Tryptophan halogenase; OS = Asticcacaulis biprosthecum C19 OX=715226 GN=ABI_20680; PE = 4 SV=1
MTGRVEHIVIVGGGSAGWMAAAGLSRYMRNMPVRITVVESDEIGTIGVGEASVPLLAVFNSLVGLHERDFIQATQGTFKLGIEFAGWNRPGESYLHPFSPYGQSLGVCDFHQYWLKARAAGYAAPLEDFNLNAALARDSRFNLRSSDGQSPMSILSYAYHFDAGLYARNLRTLAQSYGVNRVEGRIVEVEQQPETGFITGVKLASGQRVEGDFFVDCSGFRALLIEGALEAGFNDWTGLLPCDSAVAVPSARTEPLLPFTRATAREAGWQWRIPLQHRTGNGYVYSSRHISDDAAAATLMANLDGRPLGDPRIIRFRTGRRSKAWVKNCVAVGLSAGFLEPLESTSIHLIQKGVMKLLTFMPSASWSHALADEFNRQTAFDYEEVRDFLVLHYKANGREGQPFWDALRNNPVSDTLQARIDLFRDSGRVFIDDRELFKLPSWVTVLTKQGIFPRDYDPMAEAVSTAEITGRLEQIRMILNRTAQAQPTHADFIARNCKTFS

SEQ ID NO: 82769 - protein, 535 aa, unidentified
  source 1..535: note = Asticcacaulis biprosthecum
  REGION 1..535: note = tr|F4QJM7|F4QJM7_9CAUL Tryptophan halogenase PrnA; OS = Asticcacaulis biprosthecum C19 OX=715226 GN=ABI_04100; PE = 4 SV=1
METKASDASDRSVLIVGGGAAGWLTACYLATHLGQERQGGPRITLLESPDIGIIGVGEGTFPTTRNILRTLGIEEAEFMRESQAAFKQGIRFDDWEVTPRNDVHSHYFHPFEAPYLGKEELELLPYWLIQDPATRPPYAEAVTFQKRIADARLAPKRLYQGHYSGPLNYAYHFDAARFANVLARRAKALGVHHLQGLLGEVVLDDTGAISHAISPDHGRLSADLYVDCTGFRSELLGKALNVPFRPVSGTLFADRAVVCQVSYPNANAPLESYTIATAHEAGWTWDIGLANRRGIGYVHSSHHTSESRAEEVLAAYVARSGGKTAAVEMRHISFDAGYRTQHWVKNCVAVGLSAGFLEPLESTGMVLIEAAVNKIAEFFPHSGPIDASAGLFNDLMVKRYDAIINFIKLHYCLSKREEPFWRDNTAAESIPERLRMLLDIWQHRPPSRYDFVIDHETFAHFNYQYILYGMNFHTDYQAAGRALPMKDKAEQIFSRIHSFGEQAAKDLSAHRATIKAIYDNGFVERAPSPAPALAR

SEQ ID NO: 82770 - protein, 500 aa, Asticcacaulis benevestitus
  REGION 1..500: note = tr|V4PFF2|V4PFF2_9CAUL Uncharacterized protein; OS = Asticcacaulis benevestitus DSM 16100 = ATCC BAA-896; OX = 1121022 GN=ABENE_07605 PE=4 SV=1
MHNPSTSTQASYAQQRIVIVGGGTAGWMSAALISKVTGGALGSLTLVESEQIGTIGVGEATIPYILDFNRLLGIDEADFMRETKATFKLGIEFRDWTRLDHSYIHPFGTIGAPIGRTAFQHHLTRRRLAGHNETFEDYSLTCMAARHNRFAHPKRDGSVLSTLGYAYHFDAGLYAAYLRRFAEARGVVRSEGKIKHIEQNPDTGFITRLELENGASIEGDLFIDCSGLSALLIEKTLKSGFIDWSAFLPCDSAAFVPSARSEPFTPYTRSTARSAGWQWRIPLAHRTGNGHVFASPFMSDDEAAGTLLANLDGEALAEPRFVRFKTGRRKTFWNKNVIAIGLSGGFLEPLESTSIHLIHSGLIKLLDLWPDTHFNPLTAEQYNRAVAAEYDAIRDFLILHYKATERDDSAFWRYCRTMEIPDSLTYKLDQFRATSRIVLTRGDLFQASSWLAVMLGQNIIPTDYDPMARLVSEAVADQHFNTMRDTIRGAVLEIPPYTPA

SEQ ID NO: 82771 - protein, 517 aa, Asticcacaulis benevestitus
  REGION 1..517: note = tr|V4PPS8|V4PPS8_9CAUL Uncharacterized protein; OS = Asticcacaulis benevestitus DSM 16100 = ATCC BAA-896; OX = 1121022 GN=ABENE_12950 PE=4 SV=1
MTANTVIWKAMEMLMPAAPIKKIVILGGGTAGWLSAAMMARVLGRTVDITLVESDEIGIVGVGEATIPPLVNLLVFLGINEDDLLKHVQGTFKLGIEFHDWYEKGHSYGHMFGAPGNPLGVLPFHQYWLRQHQAGKAGSLWDYSLNALAAQQNRFGRLRTIPNTPNMEGMNYALHFDASLLARYVRGHCEKQGVIRREGKVSGVNLRGTDGFIESLTLQSGEVISGDFFLDCSGFQGLLIEGALKSGYEAWTEFLPCDRAWAVPCKAAGPLRPITRTRAHTAGWQWRIPLQHRTGNGHVFSSAFMEADAARDILMNNLDGEALAEPRLISFVTGRRKASWVKNCVSLGLASGFLEPLESTSIHLVQSALQRLAHMFPDTGFNQPEIDEYNRKTKREYELIRDFLVLHYKATKRDDSPFWNHCRTMAVPDSLATKIDYFRQHGRVMVEGDDLFKEANWVQVLIGQGVMPESFSPLALTVPDDSLADYMAHVRQIYDTLLPKIPSHADYIAQYCQAPKG

SEQ ID NO: 82772 - protein, 499 aa, Asticcacaulis sp.
  REGION 1..499: note = tr|V4PL28|V4PL28_9CAUL Uncharacterized protein; OS = Asticcacaulis sp. AC460 OX=1282360 GN=ABAC460_14260; PE = 4 SV=1
MVVGGGTAGWMCAAALSAAVPRTCEIVLIESEDIGTIGVGEATVPAIRFFNDQIGLDEAEMIRACEATFKLGIDFRGWGHKDNRYFHGFGDFGDHHEGISGYQIWRRLRDLGDDTPLDAYSLPTQMAYAGRFFPPNPDPRSPMHNYRYAFHFDASLYAAHLRKHCEARGVKRINARIGEVRLRPEDGFIDGVVLDDGRLETADFFIDCSGFRGLLIEGALKTGYTDWSHWLPVDRAWAVPTERTGSILPYTISQAHESGWQWRIPLQHRTGNGYVYSSRFVDDDAARDILTRNLDAPTLKDPFQVRFTTGHRNRFWSKNCVCVGLASGFIEPLESTSINFIQNVIVRFLEFYPTLNHAPVVEDQFNSLILSEYERVRDFIILHYRLNSRTDGELWRYCADMAIPDDLAARIALFRYGGRTIEHERDSFKSPSWISIFHGQGVVPQTYDHLADRIDADALKALAAKRRREIADIVPRLPAHDQFIAAHCASPAFLKRQPA

SEQ ID NO: 82773 - protein, 494 aa, Asticcacaulis sp.
  REGION 1..494: note = tr|V4PMC1|V4PMC1_9CAUL Tryptophan halogenase; OS = Asticcacaulis sp. AC460 OX=1282360 GN=ABAC460_12940; PE = 4 SV=1
MAAAGMSKLLPANQVAFRVVESEAIGTVGVGEATIPHILYFNRLLGIDENEFVRKTNATFKTGIEFVNWGRLGQSYIHPFGPYGGPMDGIHFHHFWLRYAALGKAPPLERYSLMIQAARAGKFQRPDPSKVNSALSLIAYAFHFDASLYARLMREQAEARGVIRTEGRITNVVQDPQSGHVQSVVLETGEVIEGDLFIDCSGFRGLLIEQTLKAGYDDWSRYLPCDRAVARACERVADPIPYTRATAKSSGWQWRIPLQSRTGNGHVYSSAHISDDAALDSLNADLDGAPLTEPNFLRFTAGIRKSPWKKNVVSLGLASGFLEPLESTSIHLIQTAIARLMTNFPDKTFNQPDIDYYNRRTRLEYEQVRDFIILHYNATARDDSPFWNYCRTMAIPQTLEDRLAIFKENARQYRHDNELFNEVSWLAVMHGQNIEPKRYHPIADMISEEELVRRMAHFEDDVTRSLATMPGHQAFIDRNCRSAGGLYLSASQKA

SEQ ID NO: 82774 - protein, 380 aa, Zymomonas sp.
  REGION 1..380: note = tr|A0A519DWX5|A0A519DWX5_9SPHN Tryptophan 7-halogenase (Fragment) OS=Zymomonas sp. OX=2068624; GN = EOP94_04655 PE=4 SV=1
TFKLGIEFENWKEQGHRYFHSFGTTGRDHWSAGFQHFWMHGLTQGHQAPYDDYCIEVLAAYEGKFAHLPDKRINYAYQLDAGRYAAFLRKLAEADGCVRVEGKIASVEQSGESGDIAALVLEDGQRIEGDLFLDCTGFRALLIEGALKVGFDDWTHWLPCDAAIAVQTTSVRPAIPYTRAIAHDSGWQWRIPLQHRQGNGIVYCSRFLDQEAALQRLLDTIEGERLIEPNKLRFTTGVRRKQWHKNCIAVGLSGGFLEPLESTSIHLIQRAVLRLIRMLPLGQVSERDVAEFNDQQMTDFDQVRDFLILHYKATERRDSEFWRYCADMTIPDTLTQKIELFRETGRVFRKNEELFAENSWIQVMMGQGIMPASYHPVATK

SEQ ID NO: 82775 - protein, 503 aa, unidentified
  source 1..503: note = Ahniella affigens
  REGION 1..503: note = tr|A0A2P1PTC3|A0A2P1PTC3_9GAMM Tryptophan halogenase; OS = Ahniella affigens OX=2021234 GN=C7S18_13195 PE=4 SV=1
MSESAIQRVVIVGGGTAGWMTAATLSKLFPRGLELILIESDEIGTVGVGEATIPQIRLFNATLGLDENDFIRKTQGSFKLGIEFVDWTRLGHRYMHAFGPVGGRDLGLVQFYQYWLKLKQQGKAGELGDYTFNTVASRLNRFMRPINKPNSPLSQIYYAFHFDASLYARYLRGLSEARGVQRLEGKITDTVLRPDDGFIQSVRLNDGREVTGDLFIDCSGFRGLLIEQALKTGYDDWSDWLPCNRALAVPCSSVSPFTPYTRSTARTAGWQWRIPLQHRIGNGYVYCSDYISDDEATATLLANLDGKALAEPRPLRFVTGMRKRFWNKNCVAIGLSSGFLEPLESTSIHFIQSSIAKLVAFFPTRAFSEVDIAEYNRQVQFEFERARDFILLHYKANERDDSPFWIRCREHGVPDTLAHKIDLFKSHGRIFRDQEELFTEVSWIQVLLGQNVIPKGWHPMVDLLDQRELEQFVGGIQGVMQRAAEVMPDHAAFIQQHCRAPDL

SEQ ID NO: 82776 - protein, 484 aa, Asticcacaulis benevestitus
  REGION 1..484: note = tr|V4PK46|V4PK46_9CAUL Uncharacterized protein; OS = Asticcacaulis benevestitus DSM 16100 = ATCC BAA-896; OX = 1121022 GN=ABENE_17205 PE=4 SV=1
MTAAALSSLLAPKDVTITLIESDEIGIVGVGEATIPDILNFNQMLGIDEADFIRATNATFKLGIEFIDWGRQGDRYIHPFSGHGVDMNGFDFHQFWLHSQTAGNSHPIDDYSLCAVAARHGKFVHPDPNPRSIRSHIRYAYHFDASLYARYLRTYAEKRGVRRIEGKIKAVVQAPETGHITELKLEDGQSVAGEFFFDCSGFRSLLLGQTLGIGYVDWSHWLPCNTAQAVPSSHTGPLIPYTRATAKTSGWQWRIPTQTRTGNGHIYCRDFMSDDEAASVLLSGLDGEALASPRVIRFTTGHRQAFWDKNCIAIGLSAGFLEPLESTSIYLIQEGVSRFISLFPNASLPNVFRDEYNRHMRTEFEQVRDFIILHYAATERADSPFWNYCRNMSIPDTLKHKIALFREGGRAFRHEDELFSRPSWVAVFLGQNINPRAYDPVVANLPPADVMASVESMREAMIDAVRQMPTHEAYLAKYRIPRAG

SEQ ID NO: 82777 - protein, 501 aa, Maricaulis maris
  REGION 1..501: note = tr|A0A495D551|A0A495D551_9RHOB Tryptophan halogenase; OS = Maricaulis maris OX=74318 GN=C7435_1880 PE=4 SV=1
MAESRSKRVVIAGGGTAGWIAAAALVRQLGPLLDITLVESDAIGTVGVGEATIPTHRTFHHLLGIDERAFMRETQASFKLGIAFENWAREGDRYFHSFGQLGKSTWMADFHHLWLEARAAGLAGELGAYCLELQAAEAEKFATGPNARINYAYHLDASRYAGFLRKIAEDQGVKRVEGRIADVETEGVRTDGARGDITALRLDDGTRIAGDFFIDCTGFRALLIGDALGTGFEDWSHWLPMDRAIALQTGSTGPARPYTRSIAHGAGWQWQIPLQHRVGNGLVYCSAHLDDGAAQDLLLENVSGAPLTEPRVIRFRTGRREQVWTRNCLALGLSSGFLEPLESTSIHLIQAGVMRLIQMFPFGDQCDALRDRYNALSRDELERIRDFIILHYKATQRDETAFWRQCRDMSIPDSLAARIELFRQSGMAYQDGADLFRVDSWLQVLLGQRIEPQSHHAMGRLMTYDQMRQALDAVKSNIAASVSKLPQHQDFLDQYCAAETA

SEQ ID NO: 82778 - protein, 518 aa, unidentified
  source 1..518: note = Ahniella affigens
  REGION 1..518: note = tr|A0A2P1PZ93|A0A2P1PZ93_9GAMM Tryptophan halogenase; OS = Ahniella affigens OX=2021234 GN=C7S18_17415 PE=4 SV=1
MLRKILISGGGTAGWLCACYLARTLNVKAAGTVAIELIESPDIGILGVGEGTFPSIRGTLAHIGISEARFIAATGATFKQGIRFDHWVRAPGTAGADHYFHPFNVPSQRRMELLPYWLLGHAGDVPFASAVTMQKRVADAGRGPKRLRDPDYQGPMNYAYHFDASRFAALLAEVGRELGVTHRLGDITGVTRREDGAIATIQTREFGDLKADLYIDCTGLKGALLGEALGEPLHPLSDTLFVDRAVAIQIPYPAADTPIASYTISTAHAAGWTWDIGLQTRRGVGYVYSSRHCSDDDAEQVLRRYLGPAADALTARRLPFKTGYRKAQWRHNCVAVGLSAGFLEPLESTGIGLIEIASYLIAHLLPHDGDFARAARHFNAMMQARYERIVDFIKLHYCLSQRQDSAFWRDNQDTVGIPQSLQDRLAEWRHRPPHRLDFVTDLEMFMPASWQFILYGMEFKTTLPHPAQYPDAVAAAQEFQGLRQASNQALADLPPHRALIDSYLAGETSARAAFPARA

SEQ ID NO: 82779 - protein, 498 aa, Hyphomonas sp.
  REGION 1..498: note = tr|A0A1Z9XT22|A0A1Z9XT22_9RHOB Tryptophan halogenase; OS = Hyphomonas sp. TMED17 OX=1986605 GN=CBB77_10085 PE=4; SV = 1
MMAPRKIRNYVIAGGGTAGWMAAAMLAKVMGEEISVTLVESEEIGTVGVGEATIPPLLRYNTLIGVDEAEFMRRTRATFKLGIMFENWKDVDQDYFHSFGHTGRDHWTSGFHHFWMCGKERGMSDSFDDYCLEVVAAFQNRFAQLPNNGLNYAYHLDSSQFARFLREIAEENGAKRQEGKIVDVNLCPETGNIADLKLDSGQVIEGDFFIDCTGFRSLLMGQALHVGYDDWSHYLPCDRAIAVQTKSVGPARPYTRAIAHDAGWRWQIPLQHRTGNGLVYCSRYLDDDQALDRIMSSIDGEAITEPRPIRFQTGARRKQWEKNCMVLGLAGGFMEPLESTSIHLIQKSILRFMTMLPQDELNSVDMKEFNDQTFEDMLSIRDFLILHYYVTERRDSEFWRYVAQMDIPDTLRQKVDMFHKSGRIFRKNNELFAENSWIQVMMGQGIMPQSYHPIADKMSDDELSYFLGQIKRDVENTAARLPAHEDFVKSFCGIGDQP

SEQ ID NO: 82780 - protein, 481 aa, Maricaulis maris
  REGION 1..481: note = tr|A0A495D5R3|A0A495D5R3_9RHOB Tryptophan halogenase; OS = Maricaulis maris OX=74318 GN=C7435_1828 PE=4 SV=1
MTGSAANPLSILIIGGGPDGWLTALAAHQAVAGLPGASVRIVHEEGPVCAPALSAPPDLRMLHGRLGLNDGDILARTGGAARLGRLFSGWRGDGQPDFIQPHGAIGANWGPLHFHQQVAAHGPGTDDYANYALAAQAIKQARFAPPSPNPRDFLSTLDFGFHLDCAAYTALLRDTARQRGIEACPGRVTAIETDETGLAGVTLDKSRYLKADLYIDATGPEMKLAAAINAACEDWSDDTPFLFEATRLETPRSPLTPATRIIADPAGWHMAIALPDATVTRRFTATADDGDTARLTPGRLRTPWSGNCLAIGGAACRPDPLADADLPLLARTLLRLPGLLPTGPDMRAEADVHNRAFTRESDAARDFSALVLGSQTRSEPVWRACRDAAPSDRLAHATALFKARGRLATREHDIYRPGDWVTAWLGLGVKPRRHDPLADRLDPAVASARLTQIRTLAEQTAAAMPDHQAALSRLKAGVPPA

SEQ ID NO: 82781 - protein, 507 aa, Pelomonas sp.
  REGION 1..507: note = tr|A0A397QRU5|A0A397QRU5_9BURK Tryptophan halogenase; OS = Pelomonas sp. BT06 OX=2135721 GN=C8K28_4841 PE=4 SV=1
MTDSRIRKIVIVGGGTAGWMAAAPLAQRFAQAGQGACEIVLVESPDIGTIGVGEATLPPIRAYNRTLGLDGADFVKRTQGSFKLGIEFRDWGRVGHRFFHGFGDFGPAIENRSAWQHWLRLSRIADGLPGYEDWSTSTVMARQNRFTPPEGGAPSAANAYSFAYHFDAGLYAAYLREYAMARGAQRIEGLIVDVELRPEDGFVAAVKLADGRRVDGDLFIDCSGFRALLIGGAMQSPFEDWSVLLPCNSAQAVPSERVEPLTPYTTSTAKAAGWQWRIPLQHRTGNGHVYCSHFISDDEAAATLLAGLDSKALDTPRQLRFTTGRRQQGWVKNVVAIGLASGFLEPLESTSIQLIMDGVGRLIQFFPDRRFKPHLAAEFNHLMARQYESIRDFIVLHYKLTERTDSELWRYCAAMPIPDTLAHQIELFRSAGRVAIYDPDGFAEPSWVALFFGLGLQPESHDPFVDHIDPQALLQHFARLRQAIHQTVDGMPGHADYIARHVKAPPL

SEQ ID NO: 82782 - protein, 529 aa, Asticcacaulis benevestitus
  REGION 1..529: note = tr|V4Q130|V4Q130_9CAUL Uncharacterized protein; OS = Asticcacaulis benevestitus DSM 16100 = ATCC BAA-896; OX = 1121022 GN=ABENE_05720 PE=4 SV=1
MIHSTARDVLIIGGGAAGWMTAAYLAKHLGTDRNGGPKITVMESAEIGIIGVGEGTFPTIRNILRALGIDEAEFMRESHATFKQGIRFDDWEVTPSDGRHSHYFHPFESPYWSREELNLVPYWLLQDKATRLPFAEAVTFQKKVADAKMAPKRIHQGNYQGPLNYAYHFDAHRFAGVLAKYAKGLGVHHLTGTLSDVPLTADGAIDCVVSKEHGEMRADLYVDCTGFRAELIGKALKAPFKPIDDILFTDRAITTQVPYTQPDGPLESYTISTAHEAGWTWDIALSNRRGIGYVYASSYTSDERAEEVLRAYVAKSGSEAGETRRISFEAGYRTQQWVKNCVAVGLSAGFLEPLESTGMVLIESAVNKIVEFFPYHGPIDASAAIFNDLMVRRYDTIIGFIKLHYALSKRTEPFWVDNARPDSIPQHLRDLLDIWKHRPPSRFDFVLDHESFAFFSYQYILYGMNFDTRFDAARGSLQQQALADQLFARIAHFGEQAQKDLVTHRHLINAVYKNGFVERPPASPLAMAK

SEQ ID NO: 82783 - protein, 528 aa, Asticcacaulis benevestitus
  REGION 1..528: note = tr|V4PQ38|V4PQ38_9CAUL Uncharacterized protein; OS = Asticcacaulis benevestitus DSM 16100 = ATCC BAA-896; OX = 1121022 GN=ABENE_17110 PE=4 SV=1
MSAIKKIVIVGGGTAGWMSAAMLAKLSKTSLAIELVESEEIGTIGVGEATIPAIKKFNHLLELDETDFIRNTQATFKLGIEFTDWGRVGSSYVHGFGKIGQNLGWLRLHQYWLKLRGTGKVSDVFADYSINTAAAYANRFLRARPDMKASPLNDIAYAYHFDAGLYAQYLRRYAEKLGVKRTEGRIVRVNQRATDGFIEGVVLESGAVVDGDLFIDCSGMRALLIEQTLGAGFEDWSHWLPCDRAVAVPCSFERSDAAQATSPRLGPALRTPEAGEPFTGKSALLTPYTRSIARQAGWQWRIPLQHRIGNGHVFASRFMSDDEATAILMDHLDGEALADPRIIRFRTGKRRKVWDKNVVAVGLSSGFMEPLESTSIQLVQSVVMRLIAFFPDAGFAPAQRDSFNALVDEEYRDIRDFLITHYKITQRDDTPMWRQCRDMDIPEPLRERLALWQAAGRFFKKGEELFADESWIQVLIGQGLIPESYDPFVNLRSEDEIIKYLNDISRVIDKCVAAMPSHADYIEAGCKA

SEQ ID NO: 82784 - protein, 498 aa, Maricaulis maris
  REGION 1..498: note = tr|A0A495D3L1|A0A495D3L1_9RHOB Tryptophan halogenase; OS = Maricaulis maris OX=74318 GN=C7435_1827 PE=4 SV=1
MSDNKVDHILIIGGGTAGWMCAAALSHRLPTGRVRIELVESEAIGTVGVGESTIPHIRHFNASLGIDEADFMARTHATYKLAIEFRDWGRIGDSYMHPFGAFGVPGAAVDFHHDWLRSGGETALGPIDDYSLPIAMARGQRFARPASDPRDLASTYAYAFQFDAAAYARYLRDFAEARGVIRTEGRVTDVQVDGETGHVRNVSLESGQRIEADLFIDCSGFRGLITEQALATGYEDWSHWLPCDRAIALPSAATGELPPYTRATALEAGWAWRIPLQHRVGNGHVYASAFMDDERAETLLRDQLEGEALAEPNRLRFLAGKRKRQWNRNCVAIGLSSGFLEPLESTSIHLIQSAIGHLLDLFPTGEWDPAEADEFNRVMDQEYARIRDFLILHYKATQRDDTEFWRHCREMDIPDSLAGKIEHFRERGLIADYEHGVFLKPSWQAVFLGQHITPQRLDPRAVNAAAGIRPLAAELTRIATAMPGHAEVLSAHARAAAD

SEQ ID NO: 82785 - protein, 538 aa, Burkholderia sp.
  REGION 1..538: note = tr|A0A3N8BCC8|A0A3N8BCC8_9BURK Tryptophan 7-halogenase OS=Burkholderia sp. Bp9126 OX=2184570; GN = DIE19_29850 PE=4 SV=1
MSNPIKNIVIVGGGTAGWMAASYLVRALQQQANITLVESAAIPRIGVGEATIPSLQKVFFDFLGIPEREWMPQVNGAFKAAIKFVNWRKSPDRSRDDHFYHLFGSVPNCDGVPLTHYWLRKREQGFQQPMEYACYPQPEALDGKLAPCLPDGTRQMSHAWHFDAHLVADFLQRWAIERGVNRVVDEVLEVRLDERGYISSLSTKAGRTLEADLFIDCSGMRGLLINQALKEPFIDMSDYLLCDSAVASAVPNADARVGIEPYTSAIAMNSGWTWKIPMLGRFGSGYVFSSKFTSRDQATADFLDLWGLPDNQPLNQIKFRVGRNGRAWVNNCVAIGLSSCFLEPLESTGIYFIYAALYQLVKHFPDTSFDPRLTDAFNAEIVHMFDDCRDFVQAHYFASSRDDTPFWLANRHDLRLSDAIKEKVQRYKAGLPLTTTSFDDSTYYETFDYEFKNFWLNGNYYCIFAGLGMLPDRSLPLLRHRPESIDKAEAMFARIRREAERLRTSLPTNYDYLRSLREGDAGRSRSQPGPTLAAPEIL

SEQ ID NO: 82786 - protein, 499 aa, Thalassomonas viridans
  REGION 1..499: note = tr|A0A0D8D361|A0A0D8D361_9GAMM Tryptophan halogenase; OS = Thalassomonas viridans OX=137584 GN=SG34_26655 PE=4 SV=1
MQTVSNNNKKIQRVVIAGGGSAGWMTAASLSKLLGKSLDVTLIESEAIGRIGVGEATIPPLRTFNELLGINEQHFMKTVRGTFKLGIEFKNWGRLNDSYIHSFGDTGRICWAGEFQHFWLAGLKKGIADEFGAYCPEHAAAKAGKFLGSRDSKLDYAYHIDAGLYADYLKQLALGKGVKRLEGKIEDVGIDPQSGYITTLSLDNGAVVEGDLFIDCTGFAARLIEGALNTGFESYGHLIPCDTAVAVQTEKAGEPRPYTQAIAHEWGWQWRIPLQHRVGNGLVFCSRYTSEEEAIAALMNNLESPAITEPKVFRYKTGRRLKGWNKNCIAIGLASGFVEPVESTAIHLVMASILRLMKLFPHHEICQANIDEYNNQTREEMERIRDFIILHYKATERDDSPFWRYCKNMEVPSTLAHRMELFKNTARVCITQSELFRLDSWTQVMMGQGIMPENYHQIVDQMSEAELAKFLGGIKGQVDARVASMPSHQEFINHYCRAL

SEQ ID NO: 82787 - protein, 495 aa, Sphingomonas sp.
  REGION 1..495: note = tr|A0A4R2XWL3|A0A4R2XWL3_9SPHN Tryptophan halogenase; OS = Sphingomonas sp. JUb134 OX=2485112 GN=EDF69_12031 PE=4; SV = 1
MLDEPVRSVAVVGGGIVGWSAAVALKRRVPGVSVTIVPVAPPANALADRMPQTLPSAIGFHDDVGLREEDAVLRTGSGWRLGTLFEGWAEGQPAYVHAYGSYGQSFGTASFHHHWTRAAHAGSAAPYDAHSPAAMLARAGRMLPPNPEPGSPFADIQAGLVLDIGRYRAMLEAFARHLGVVVRAGEVVEVRLRGGDGFIERVALADGGSVEADLFVDASGPDSVVRGAIDTAWEDWRPWLACDRLMQASSAAATPSTLDDVVALSGGWRWQSALPGATSHGLCYASGFLRDEDAHRLLAEVSGVEPRPAIGFRQGTRPEPWLRNCVAIGDAAVVIEPLEWTNLHLAHSAIDRIISAMPGRACHPLEIADYNRQAVAEVTRVRDFVLCHYATARRPEPFWQPRAALPESLARTLRLFAERGRLPFFEEETFTRDSWLAILLGQGLIPRRIDPLIGATPAHQSDAAMAGYRAAIARALPQFPTAAQHHAAQHARITR

SEQ ID NO: 82788 - protein, 507 aa, Asticcacaulis sp.
  REGION 1..507: note = tr|V4RC07|V4RC07_9CAUL Tryptophan halogenase; OS = Asticcacaulis sp. AC460 OX=1282360 GN=ABAC460_14375; PE = 4 SV=1
MPNPIENIVIVGGGTAGWMAAAMLAKLIVAKAPKPPTVTLIESDDISTVGVGEATIPAIKKYMSLLGMNEADFLRFTQGTFKLGIEFVDWDRLGESYIHGFGKIGQDLGWIRPHQYWLKMRNSGRVSPRFDDYAINPTACRNNRFNKRKGDDRKTPLNDIGYAYHFDAGLMAQYLRRIAEPLGVKRIEGTIIDVRLKAQNGHVESVALKDGQVIRGDFFMDCSGFRSLLIGGALGVGYESWSQWLPCDRALAVPCASVTPTTPYTRSTARTAGWQWRIPLQHRIGNGHVYSSQFTSDDEAARVLMDNLDGKALADPRPIRFETGKRKKLWEKNVLAVGLSGGFIEPLESTSIHLIQTTVLRLLNLFPDKDFDPATAAEYNAQADFEIERIRDFVIAHYKLTSRDDSEMWRYCRNMTVPDTLARKLDGFAASGRVFKENDELFAEDSWIQVLMGQGLMPRGYDPIVDNYPEETIVAYLNNISGVVAKCVAAMPTHDEFVAAYCPAQTP

SEQ ID NO: 82789 - protein, 522 aa, Pseudoalteromonas sp.
  REGION 1..522: note = tr|A0A1Y5JS70|A0A1Y5JS70_9GAMM Tryptophan halogenase; OS = Pseudoalteromonas sp. A601 OX=1967839 GN=B5G52_17485; PE = 4 SV=1
MNDILKSIVIVGGGTAGWLSAGIIAAYLKNHHSLNYHITLVESSDIATVGVGEGTWPTMRRTLQNMGVDEAQFINQCNVSFKQGAKFANWHSTKENDFYYHPLMMPQGFADNDLTAAWLNQDTDSAIPNNHFANFVCSQHALCEYNLAPKALTTPQYSGVANYAYHLDAGLFARFLKNHCINHLNVTHVVASVLSVNNNTNGDIHSLSLDNNTTLCGDLFIDCSGFKSLLLGENLNVGFKSCKDILFADSALAVHMPYEDEAQAISSHTISTAQTAGWIWDIGLQTRRGVGHVYSSRHISEQEAKEQLFNYLNILPAKRADFNVKKISFEPGHREKFWHKNCVAIGLSAGFLEPLEASALLLVEISANFIAEQLPANRQVMDITAARFNRTFSYRWQRIIDFLKLHYMLSERTDSLFWQQHCAEKSITQSLQDNLALWRTHIPNDNHFDYSVEVFPAASYQYVLYGMGFKTATTHYGNHSSTIKKAQNLATKNTKDTAELVSKLPDNRTLLKQIKQYGLQKL

SEQ ID NO: 82790 - protein, 514 aa, unidentified
  source 1..514: note = Oleiagrimonas soli
  REGION 1..514: note = tr|A0A099CZS0|A0A099CZS0_9GAMM Tryptophan halogenase; OS = Oleiagrimonas soli OX=1543381 GN=LF63_0100720 PE=4 SV=1
MSEAITRIVVVGGGSAGWLTAAVLAAEHGATGAVAITVIESPDVPTVGVGEGTWPTMRDTLRRIGVTETDFIRACDATFKQGSRFIGWVDGGDDDAYLHPFVLPQGFLDANLVAGWLQSDAPYADLVSFQPHLCAAGKAPKQFATPEYAAVANYAYHLDAGKFGIFLRTHCTERLGVRHLADHVLAVNAADNGDIASLQTRDHGALEGDLFIDCSGGRALLLGQHYGIESIGVRDVLFNDRAIAVQVPYASADAPIACQTISTAQRHGWTWDIGLSARRGVGLVYASEHSDDDAAEAALFDYIEASGGPSAAQLPTPARIAFAPGYRRVSWHRNCVAVGMAAGFVEPLEASSLALVELAATALADQLPATRADMDLIARRFNDAFAYRWQRVIDFLKLHYALSQRDDSDYWRRHRNDDTLPDSLRDLLQLWRTQPPSRHDLVRVEEVFPSASYHYILYGMGFRPQLRAGRASDHVRRAATHFREAADLARRMLPALPTHRELIDHVHAHGLPKI

SEQ ID NO: 82791 - protein, 460 aa, Asticcacaulis sp.
  REGION 1..460: note = tr|V4P069|V4P069_9CAUL Uncharacterized protein; OS = Asticcacaulis sp. AC460 OX=1282360 GN=ABAC460_18980; PE = 4 SV=1
MIRNIVIVGGGTAGWMAAAMLSKSLAKSLAKPYTITLVESDDIGTVGVGEATIPPIQLFNRILGLDEAEFMRETQATYKLGIEFVDWRARGHSYVHPFGSFGGQDVHHEWLRWSHLTRDEDFGRFNAETLAMRARRVTPGLNYAFQFDAGLYAAYLRRYAEARGVVRIEGLIQSADQHPDSGFITAVRLKSGDSVPGDLFIDCSGFRGLLIQEVLKCGFVEWTQFLPCDRAVAVPCESPSGPITPYTRSTARDAGWQWRIPLQHRVGNGHVFCSGFTSETSAIDTLMTNLDGKPLKDPKVLRFVTGHRRKVWEKNVVAIGLASGFLEPLESTSIHLAQLGITRLLTLLPGNGFVPAMIERYNLEMLEDYEATRDFLIAHYHVTDRDDTPFWRHCRNMTIPDSLLNRLDIFRHTGHVHIRGGDLFRDASWFSVLVGQGLRPDRWHPAADRLSEAELRRRMA

SEQ ID NO: 82792 - protein, 501 aa, unidentified
  source 1..501: note = Asticcacaulis biprosthecum
  REGION 1..501: note = tr|F4QTE4|F4QTE4_9CAUL Tryptophan halogenase PrnA; OS = Asticcacaulis biprosthecum C19 OX=715226 GN=ABI_44410; PE = 4 SV=1
MTSYIKKIVILGGGSAGWMTAAALSSQLDPKFVSITLVESDQIGTIGVGEATIPEIINFNRHLGIREDEFMKATHATFKLGIEFVDWGRKGDAYIHPFGGHGVDMNGYEFHQYWLRSRADGNTHPIDAYSMSAVASRQNRFDLPGTTNSPRGHIRYAYHFDATLYARFLRTYAEARGVRRVEGKVEEVLQAPESGDITALRLDTGETINGELFFDCTGFSALLIGKTLGVGYNDWSHWLPCDTAQAVPCAHAGPLLPYTRSTARTAGWQWRIPTQTRTGNGHIYSSAFMEDDEATAILLANLDGEAMASPRQIRFKAGHRHAFWKKNCVAIGLSAGFLEPLESTSIYLIQEGISRFIALFPDASLPEVVRKEYNQHMQTEFEQVRDFIILHYSATERDDTPFWNYCRNMSIPDSLNHKIELFRTAGRTYAYREELFGRPSWIAVFLGQGIMPRSFDPVIAMLPSDAVRDSLDSMRQAMHAEAGRMPTHAAFLQSYCPAVRA

SEQ ID NO: 82793 - protein, 492 aa, unidentified
  source 1..492: note = Asticcacaulis biprosthecum
  REGION 1..492: note = tr|F4QLP2|F4QLP2_9CAUL Tryptophan halogenase PrnA; OS = Asticcacaulis biprosthecum C19 OX=715226 GN=ABI_19800; PE = 4 SV=1
MDGQQVRRVVIAGGGTAGWCAAAALSRMLGPLLDITLVESDDIGIVGVGEATIPTVRTFHNFLNINERDFLRATNGTFKLGIAFENWGRPGDRYMHSFGTVGRSTWVAPFHHVWMQAKSEGYGGKLGDYCLELQAAEAGKFQTSDQGGLNYAYHFDAGLYGQFLRKISEQSGVRRIEGKISRVEQHPESGFIHALHLESGEVVEGDLFIDCTGFRGLLIEETLKTGYEDWTHWLPMNRAVAVQTQAQGPIQPYTRAITHDAGWRWRIPLQNRVGNGLVYSSEYLSDDAARDQLLGSLDAPRLTEPRLIRFVTGRRLKTWNKNCLTLGLSSGFIEPLESTSIHLFQIGVTRLIQLFPFNGISDALANHFNKLASDELDMVRDFVILHYKATQRDDSPFWRDRRAMSIPDSLAHRIQVFEENAVAWQASGELFRIDSWLQVMLGQGLQPRGWHHLGRMIKRAQAEKFLSDMSSGIDRAVAGMATHESFLRQYLG

SEQ ID NO: 82794 - protein, 513 aa, Devosia soli
  REGION 1..513: note = tr|A0A0F5L4T5|A0A0F5L4T5_9RHIZ Uncharacterized protein OS=Devosia soli OX=361041 GN=VW35_14820 PE=4 SV=1
MGKPAHFVIVGGGTAGWIAAFIIQDEARRRGFDFKISVVESSKVPTVGVGEATTAAFRVLLKHFGIDEFEFFRKTDASFKLGIRHEDWRRKGFTYYGPIDDPHQVIQAPPGAPSDYLNVYAVAAGRAVQEMHMFQPLLEQKKAPYARKADGSLIPLGPFHYAFHFDQALVGKFFASKSKGVDKVDALVAGVERDGETGHITALVLDDNSRLEGDFFIDATGFRKQIIVKALEAPWKSYAHELPVNRALPFWIELKDGEELANYTRAWAQSSGWMWQIPTRQRYGCGYVYSDEFLTPEQAKDEIERVLGHEIEVRSDIRFQIGRLEKAWIGNCVAVGLSSSFLEPLESTSIHGTIVQMMLFAQRYMDEPGKITDNARDDYNARIGRQVDDFRTFVNTHYMTERDDTPFWREVRANRIHPETKERLARWQKRMPRQEDFPNYLGGLPHIETQLHYPVLNGLGLLDQNLARKEMEADPKLRRFAQQTFDSLVKEYRAAASQALGHREFLDIVQGIA

SEQ ID NO: 82795 - protein, 501 aa, unidentified
  source 1..501: note = Asticcacaulis biprosthecum
  REGION 1..501: note = tr|F4QJ76|F4QJ76_9CAUL Tryptophan halogenase PrnA; OS = Asticcacaulis biprosthecum C19 OX=715226 GN=ABI_03390; PE = 4 SV=1
MSEHLIKNVVVLGGGTAGWLSAAMLAKTWGRSINLTVVESDDIGTVGVGEATIPPLTKLLMYLGIDENQFLSRVQGTFKLGIEFIDWYEKGQSYMHAFGAPGQALGILPFYQYWLVQKLRGHDINLWDYSLNTLAARQNRFARLKQVPNTSMEGIDYAFQFDAGLMAQFLRMGCENSGVKRIEGKVSGVNLRSEDGFIESLTLESGQVVEGEMFIDCSGFRGVLIEDALKAGYVNWQHWLPCDRAVAMPTTSVGPLKPYTQARAHGCGWQWRIPLQHRVGNGHVFCSQYLSDDDATKTLLDHVTGDALAEPRVLKFVTGRRKQSWVKNCLSLGLASGFMEPLESTSIHLVQSGMTRFLRLFPDRRFNPLEIAEYNRQTAHEYELIRDFLVLHYKSTTRNDTPFWDYCRTMEIPDTLAHKIEYFRQHGRLLIEDEDLFKETNWAQVLIGQGVMPGASAPLTGAIGEDDLSEFMTNLRIILDRTVSGMPDHAAFVKQNCPAVV

SEQ ID NO: 82796 - protein, 518 aa, Sphingomonas sp.
  REGION 1..518: note = tr|A0A4R2XRN9|A0A4R2XRN9_9SPHN Tryptophan halogenase; OS = Sphingomonas sp. JUb134 OX=2485112 GN=EDF69_1284 PE=4; SV = 1
MRKRLLIVGGGTAGWLTAGYLAKRLSTDLPGGAAITLVESPEIGILGVGEGTFPTIRRTLKTIGISEVDLVRKCGASFKQGAKFAHWRFTPGAPGPDHYTHPFQLAQADNGLDLLPYWLLGHGGEANWDEVCSPQKKAADAHRAPKLPSHPDYVAPLNYAFHFDAVALAGLLRDKAVENGVTHLMDRVTQVHVGEDGAIAGVDTEANGRLDADLYIDCTGFRAELIGKALGQPYRSRRDVLFCDSALAIQVPYRDEREPIVSYTLATAQEAGWMWDIGLDRRRGIGHVFSSAHTDDTRAEELLRAYVGDVGGDQEVRKIRFEAGYRETNWHKNCVAIGLSSGFFEPLEATGIVFSEVAAGLVANLFPWGGDHETSARQFNANMLQRYERARDFIKLHYCISERRDSEFWRDNVAASSIPDSLHDLLDRWRFRPPTEIDIDTNVDIFTEASWQYVLYGMGWKTDLSARAGAYRYVEDARRAFAEVERQAAFAIANLPSNRQLIDYARTRSFGPPQGVAR

SEQ ID NO: 82797 - protein, 487 aa, Asticcacaulis sp.
  REGION 1..487: note = tr|V4PPJ1|V4PPJ1_9CAUL Uncharacterized protein; OS = Asticcacaulis sp. AC460 OX=1282360 GN=ABAC460_18995; PE = 4 SV=1
MCAAAFARRLDRDRYDITLIESADIGTVGVGEATLPHIKTFNDMLGIDEARFMRNCKATFKLGIEFVDWGRKGNRYIHPFGTFGEAWRGLGFHHYWTRARRLNQHPAPLNEYSYAVMAAQQGRFEFPNEDQKSIRSTYAYAYHFDAGLYGEFLREWATARGVKRIEGRIDHVTQTATGDIATLTLASGAIISGDLFVDCSGFRALLLDGALNSPWENWTHWLPCDRALAMPVTRSGDLASATRSTAQAAGWTWRIPLQHRTGTGYVFSSSHITETEAHDTLNTNAQGLADPRLLRFRAGRRPKAWTGNCVGIGLASGFLEPLESTSIYLIQVGALSLAELIPTTPGPTDPRLAAEFNRRSDIEYERIRDFLILHYHANGRTGEAFWDDVRHMAIPDSLAHKIELFRRRGHIPAYKDGLFSPDSWLSVLAGQDILPGNYDRLADALDPDQTARLMADLRERIAGQVAAMPAHGDFVSYFAEAREEMPA

SEQ ID NO: 82798 - protein, 500 aa, unidentified
  source 1..500: note = Asticcacaulis biprosthecum
  REGION 1..500: note = tr|F4QTE2|F4QTE2_9CAUL Tryptophan halogenase PrnA; OS = Asticcacaulis biprosthecum C19 OX=715226 GN=ABI_44390; PE = 4 SV=1
MGGGTAGWMAASALAHEFKRLPISITLVESDEIGTVGVGEATLPHIRNFNTALNIDEVTFMKATEATFKLGIEFCNWGRIGDRYIHPFGDYGEKIDGIPFYQHWLRLQKLGLASRLDDYAFPTSIAEANRFRHPSTDPTRIESTYGYAYQFDATRYAAFLRQFAEARGVVRRQGKVVDTRLDAETGHVAALTLDSGEVVAADLYVDCSGFRGLLIEQALKTGYDDWSQWLPCNRALAVPCESRGTLTPFTRATALEAGWQWRIPLQHRTGNGYVYCSSFISDEDASRRLLGNLDAPALADPRQLYFTTGRRKKLWNRNVVAIGLAAGFLEPLESTSIHLIQEGISELLHIFPDKRFLQSDIDEYNRRMGVNFERVRDFLLLHYAATQRDDTEMWRHFRNLKLPDSLEEKIQIWLTRGQLIRYEFGVFLPPSWVAVMLGQNLLPRHYDPRVDRMAHDTLVQNAEGLRQRVNAAVSATPDHKDYIRQMGAASDTGPLIAQAV

SEQ ID NO: 82799 - protein, 505 aa, unidentified
  source 1..505: note = Oleiagrimonas soli
  REGION 1..505: note = tr|A0A099CYY4|A0A099CYY4_9GAMM Tryptophan halogenase; OS = Oleiagrimonas soli OX=1543381 GN=LF63_0100705 PE=4 SV=1
MNHASDATAARKPVRRVVIAGGGTAGWMAAAALSRTLGKVLDITLVESDAIGTVGVGEATIPTLVTFHRLLNINEQAFMAATHATIKLGIAFENWRDVGKDYIHSFGLTGKDHWTAGFQHFWLKGRERGLARDYGDYCMELRAAQERKFAHLPDNGINYAFHLDATQYAQFLRRFSEEFGVQREEGRIAEVRMADNGDIAALAMEDGRLIEGDLFIDCTGFRALLIGQALGVPYEDWSHWLFADSALAVQTESVRDAIPYTRSIAGDAGWQWRIPLQHRCGNGIVFASRYTDEATAHDTLMGSIEGAPRTEPRLIRFKPGQRARAWERNCVALGLSSGFLEPLESTNIHLIQRGITRLLQSFPHVIEQVDIDEYNQQVANEITHIRDFVILHYKVTDRRDTPFWRDCAAMDIPDTLRHRIELFAETGRVFRVPNELFAENSWIQVMLGQGIVPRQRHPAPDMMGDEELQHFLEGIRRHVEHTVQRLPTHMDYIRSYCAMQRVASD

SEQ ID NO: 82800 - protein, 505 aa, unidentified
  source 1..505: note = Asticcacaulis biprosthecum
  REGION 1..505: note = tr|F4QGE7|F4QGE7_9CAUL Tryptophan halogenase; OS = Asticcacaulis biprosthecum C19 OX=715226 GN=ABI_20690; PE = 4 SV=1
MPEPIRKIVIAGGGTAGWMCAAALRTGVPAEVEITLVESEDIGIIGVGEATIPTIRDFNELIGLEEGDFVRRTEATFKLGIDFVGWGTKENRYFHGFGDFGAVHQGLEPHQMWRRLKAAGDPASLFDWSMPTQLAYAGKFFPPNPNPKSALRDYTYAFHFDASLYAAYLRELCEKRGVKRINARIANVGTNAETGFLTGLALDDGRFVDGDFFIDCTGFRGLLIEGALKAGYTDWSHWLPVDRAWAVPCARSGTLTPYTSAMAHEAGWQWRIPLQHRTGNGHVFSSRFMDEQAAADVLLQNLDGKALKDPMLVRFLTGHRNRFWAKNCICAGLASGFLEPLESTSINLIQTAVVRFLEHYPDKGPSPVLEAEYNRKMQLSYERVRDFIILHYVLQSRDDGELWRYTRNMAMPDTLAYKIELFRARGIPLLYDYDHFHQPSWISVFVGQGLIPESYDPLVDRLPLDQVQSLMRQRREQIAAVAAKLPAHEDFIRAHCPSPSFLKAS

SEQ ID NO: 82801 - protein, 584 aa, Salinispora arenicola
  REGION 1..584: note = tr|A8LUX4|A8LUX4_SALAI Tryptophan halogenase; OS = Salinispora arenicola (strain CNS-205) OX=391037; GN = Sare_3158 PE=4 SV=1
MGREIGSEYDVVVMGGGPAGSTLGALLARRTTLSVAIFEKEEMPREHIGESFAHQMIPAIEQSGALEKVLASKCWVKKYGGVFNWGEVPMVAFFDHRNYLNDGVPRFAMHVNRAEFDHILLQHAADSGVKVFEDTPVKQFESHADGCTITLGDGTVVRSKYFVDASGRRNSIAAKQRREWLSTYRNIAIWQHFLGGERVQDLPGDWNIFREGNQSPIGCFAFQDGWCWYIPVPKIIDGKRRLTYSVGIVTIPEILKQTGSDFTDQKTFIDTIRRVPYLKDLIADAEPIADKMLTATNYSMVNGRFSDYDERWLLVGDSAYFVDPLFSSGVAFATNQAVNAAMLLEHTLTGELNEQGCRDLWRDYDEGWHGMAETFALSIDQWYHALGGQDPESIYWRHRSSSPDLDIQERTFDVLLNTSVTPNLMQLITGAPMQGEGPLTRANERAEPAAIDVDATLTLAPGVVVRETVGLDVPGFKGHLPPPPFDDEVSEATKAGIATYWADPVTNRDVIESPSALPVPAHRIGFADGAIDVEIRGLAREGTAELLGYLAAGVTMRKLDGQLTMSQHQLLKRLVRAGLVVAAG

SEQ ID NO: 82802 - protein, 523 aa, unidentified
  source 1..523: note = Phenylobacterium hankyongense
  REGION 1..523: note = tr|A0A328B9B4|A0A328B9B4_9CAUL Tryptophan halogenase; OS = Phenylobacterium hankyongense OX=1813876 GN=DJ021_00120; PE = 4 SV=1
MERNPADSAALRVVIVGGGTAGWMCASGLSRLLDPSAYSLTLIESDEIGAVGVGEATLPHIKIFNDMLGIREAEFLSETKGTFKLGIEFRGWGAPGDSYVHPFGTFGEPWGGVHFQHHWLRARAAGVPVAPLEAYSYAVAACRAGAFEFPSEDSKSIRSTYAYAYHFDASLYASFLRRWATARGVQRIEGQVVEVACGGESGLIEAVTLKSGARVEGDLFIDCSGFRALLIGDALKVGWQDWTPWLPCDRALAVPCERTADFTPYTRSTAQEAGWTWRIPLQHRTGNGYVFSSRFTDEGRAREVLLRALDGPALAEPKLLRFSPGRRELAWSGNCVAVGLASGFLEPLESTSIFLIQGAVTDLANLMPKPGEGARMDPRLANEFNRLFAIQYDRVRDFLILHYRANARRGEALWDYVRTMPIPDSLVQKMSLFEARAWTPDYKYGLFARDSWLSVLMGQGVVPRGYDRLAEGLSLADAEAHLARLKTRIDANVAAMSSHSDFIANYCDPAGAGAGPQPLATVR

SEQ ID NO: 82803 - protein, 501 aa, Asticcacaulis sp.
  REGION 1..501: note = tr|V4RHE2|V4RHE2_9CAUL Tryptophan halogenase; OS = Asticcacaulis sp. AC460 OX=1282360 GN=ABAC460_07920; PE = 4 SV=1
MSEHLIKKVVILGGGTAGWLSAAMLAKTWGRNIAITVVESDEIGTVGVGEATIPPLTKLLTFLGIDENQFLSRVHGTFKLGIEFIDWYAKDHSYIHAFGAPGQPLGILPFYQYWLAQRLRGHNVHLWDYSLTALAAKQNRFGRLKQVPNTSMDGMDYAFHFDAGLMAQFLRIGCENSGVTRIEGKVSGVNLRAEDGFIESLTLQSGQVVEGEMFIDCSGFRGVLIEDALKAGYNNWQHWLPCDRAVALPTTSVGPLKPYTQARAHSAGWQWRIPLQHRVGNGHVFCSQYMSDDEATQILLANVTGENLAEPRILKFVTGRRKESWVKNCLSLGLASGFMEPLESTSIHLVQSGMTRFLRLFPDKRFNPLEIAEYNRQTAHEYELIRDFLVLHYKATTRSDTPFWEYCRTMDIPDTLAHKIDYFRQHGRLLIEEDDLFRDTNWAQVLIGQGIMPGAAAPLAHAIGEDDLTDFMKNLRVILDRTVAGLPDHAAFVQQNCPAVA

SEQ ID NO: 82804 - protein, 501 aa, Asticcacaulis sp.
  REGION 1..501: note = tr|V4PF49|V4PF49_9CAUL Uncharacterized protein; OS = Asticcacaulis sp. AC460 OX=1282360 GN=ABAC460_22105; PE = 4 SV=1
MGGGTAGWMLAASLVRTFGPHHATVRLIESGDIAIVGVGESTLPQVRDFNEFLGVDEVEFMRETNATFKLAIEFRDWARLGDRYFHPFGSHGHAIAGVPFFQCFLRAKAHGHDFNIDDFCYPSVASREQKFELPSEDLSSIRSTYSYAYHFDAYLYAAYLRRWSEKRGLRRTEGTVVDVTLRPDDGFIQSLTLASGEVVEGDIFIDCSGFRGVLINQALKMGWEDWSSWLPCDRAWAISSDLDDDGTATTRCTAREAGWQWRIPLQKRIGTGYVFSSRFTTEERAREVLLQNLDGAAQGDPRLIKFQSGRRKNSWYKNCIALGLASGFLEPLESTSIYMSQIAVNFLMRLFPGHPVDPALAEEYNRLVDIEYTRVRDFLVLHYHASAERKGDLWHHVQTMQLPDSLAEKMDIFKRRGHIHRYKDGLFSPASWIAVYTGQRIEPGGYDPQADNIDLDSMLGTMNDLRDRIASNVATMPGHYDFVRRHCRLSTKSAKSGKSHA

SEQ ID NO: 82805 - protein, 504 aa, Sphingomonas sp.
  REGION 1..504: note = tr|A0A4V2TIC3|A0A4V2TIC3_9SPHN Tryptophan halogenase; OS = Sphingomonas sp. JUb134 OX=2485112 GN=EDF69_12032 PE=4; SV = 1
MTGPDRQRVVVVGGGTSGWMTAAALVKLLPDRCQVHLVESEAIGIIGVGEATLPHIRAFNERLGIPEAEFMATTRATFKLGIEFRDWARIGDSYIHPFGTFGRGAGDVQFHHYYARLLHAGVQLPPIEAFSMACTLARANRFAPPSTDPRQIASTFGYAYQFDAVAFAPYLRRLAEGLGAERTEGRIVHVERDGESGDVTAVLLEGGRRIEGDLFVDCSGFASLLIGKTLGEPFQDWSRWLPADRAVALPCRTVTEVTPYTSAVAMPAGWRWRIPLQHRTGNGYVYSSAFLSDEHAADALTSAVEGMPMASPRVLRFTAGRRERSWAHNVVAIGLSGGFLEPLESTSIYLVQQAITALLELFPEPRISPVDRDEFNRVVDMEYDRVRDFLILHYHATQRADSEFWNYVRTMAIPDSLAEKMELFRRRGRIVKYREGAFLDASWVSVYLGQRVMPAGFDPRASGPTLESLVAGMKQMQGEIHAAAAAMPDHLSYLGRYCPMAAAA

SEQ ID NO: 82806 - protein, 496 aa, Asticcacaulis sp.
  REGION 1..496: note = tr|V4PPI8|V4PPI8_9CAUL Tryptophan halogenase; OS = Asticcacaulis sp. AC460 OX=1282360 GN=ABAC460_18970; PE = 4 SV=1
MTRPVKKVVIAGGGTAGWCAAVALSRILGPLLDITLVESDDIGIVGVGEATIPTVRTFHQIVGIDEREFLRATNGTFKLAIAFENWAKQGDRYLHAFGSVGKSTWLAPFHHVWLQAKSEGYGGSLMDYCLEHQAAEAGKFQLSQGGGLNYAYHFDAGLYGQFLRKLSEKQGVKRIEGRITQVDQDAESGFVTALRLESGKVIEGDLFIDCTGFRGLLIEETLKTGYEDWTQWLPMDRAVAVQTQAHGPLNPYTRAIAHDAGWRWRIPLQNRVGNGLVYSSAYISDDAARAQLLGALDAPTLVEPRVIRFVTGRRRKTWNKNVITLGLSSGFVEPLESTSIHLFQIGVTRLTQMFPFNGITDTLVNHFNKLALDELEMVRDFVILHYKANRRDDSPFWRDRQAMTVPDSLTHRIKVFEENAIVWQASGELFRLDSWLQVMLGQRINPTGWHRLGKLMKRQQAEGVFQDMKVHIDRTVAGMLSHEAFLRQHLGLTNRT

SEQ ID NO: 82807 - protein, 506 aa, Pseudoalteromonas sp.
  REGION 1..506: note = tr|A0A1Y5K5R6|A0A1Y5K5R6_9GAMM Uncharacterized protein OS=Pseudoalteromonas sp. A601 OX=1967839; GN = B5G52_05005 PE=4 SV=1
MNNIAPITHYAIIGGGSAGWISAAILCRVTAHLPCKITLIESPTISSVGVGEATIPSIIDLLRFLNIPQTEFIQATQATFKLGIKFTNWLTKGHSYWHPFGNIGKTIDGLSFYQHWLAAKQRGNKYQYCDFSPNVVLAEQNKFAQAQQHQKNILSHSTYALHLDATLMADYLKKYCLVRGVIHRTAHINEVTVCEKQQITNVILDNKEQLDADFYIDCSGQSAILIDKTLKVGYQNWQHYLPVDSAVVVQSKNPSQRQPYTHAVAHQHGWQWQIPLNHRTGNGYVYCSKYCSDEEALATLTNNITEPLENTPRAIKFTTGKRDVFWYKNCLSIGLSAGFLEPLESTGLYLIMKGMLNFVAMLPDSQFQQARCDEYNRQMDIEFENIRDFIIIHYSLTQRSDSAFWRDWHNRALPKSLEHKLAVFKSNGILMKNPQDLFSNDSWYAVLEGMKMRPTNLNPLIYNSDHQQVDAILHKHTYLLAQMIKQAPSHEAFANALHNNMLKANS

SEQ ID NO: 82808 - protein, 503 aa, Asticcacaulis sp.
  REGION 1..503: note = tr|V4PSM0|V4PSM0_9CAUL Tryptophan halogenase; OS = Asticcacaulis sp. AC460 OX=1282360 GN=ABAC460_07095; PE = 4 SV=1
MQSPDPIRSIVIVGGGTAGWMAAAAFARNLGRHLSITLVESEDIGTVGVGEATIPPIKLFNAMLGLDEAEFMRETRATYKLGIRFHDWLNLGHEYFHPFGVYGLKPELGHFLQFWLRVQAQGHDIGPVSDYSLCTLAALQGKMGRQTDDGVMATFGSAYHFDAGLYARYLRRYSERLGVIRIEGLIADVEQHPETGNVKSVRLKDGREIEGDLFIDCSGFRGLLIKQALKTGYDDWSHWLPCDRAMAMPCAHAGADINPYTSSTAREGGWQWHIPLQHRVGNGYVYSSRFTDDDSAETTLRANVEGEALAEPNRLRFVTGRRKKFWNRNVVALGLASGFIEPLESTSIHLIQSGINKLLLHFPDRSFAPANIEAYNRRQHLDYERIRDFIILHYHATARDDSALWRYTRTMEIPDTLAHKIEVFRERGAFANAAEEMFTPTSWMAVLMGQGVIPQSHDPLVAYEDIATLRTGFARMKDHLTRLAADLPSQRDYLRQNGMLAMS

SEQ ID NO: 82809 - protein, 508 aa, Asticcacaulis sp.
  REGION 1..508: note = tr|V4RIT5|V4RIT5_9CAUL Uncharacterized protein; OS = Asticcacaulis sp. AC460 OX=1282360 GN=ABAC460_06600; PE = 4 SV=1
MQHNVKKIVIVGGGTAGWMAAAAFAKALGTLDYDITLVESEEIGTVGVGEATIPAILQYNSFLGLDENDFIRNTNATFKLGIEFVDWRRKDHSYFHPFGLFGHDIDGFSFQHFYMRHYHQRGGGMFDISKYNAETEAALQGRFGRVKSEPGKPNINYAFQFDAGMYARYLRRYSENLGVVRKEGKIIQVNQDPESGFVTSVAMDNGMTIEGDLFIDCSGFRGLLIEQTLKTGYVDWSHWLPMNRAWAVPCERTETLTPYTRATAREAGWQWRIPLQHRTGNGYVFCNDFISEDEAREKLLSRLDGKVLKDPMMLKFVTGRRRLAWNKNVVALGLASGFLEPLESTSIHLVQSGAFKLLALFPRHGINPHIVDEYNRQVEIDYEGVKDFIIAHYKVTERDDTPFWRHVQQMSIPDSLQARFDVFRATSQTLAREPELFREVSWVAVMTGQGIVPEDYHPAADTMDADDLRLQLGRWRTAVVERVKSLPMHEDFINRTCASDAPRMVANG

SEQ ID NO: 82810 - protein, 497 aa, Brevundimonas nasdae
  REGION 1..497: note = tr|A0A0B4CH38|A0A0B4CH38_9CAUL Tryptophan halogenase; OS = Brevundimonas nasdae OX=172043 GN=RM53_15175 PE=4 SV=1
MIDRIVVVGGGTAGWMAAAALAQAFEGAGKTVTLVESEAIGIIGVGEATIPEILKFNARLGIDEADFLRETKATFKLGIEFDGWRREGERYFHPFGAFGLDMEGIAFHHFWLKGCAEGRSEPLETYSMAWQAARRGRFVHPQGGPQSPLSSLGYAYHFDAALYAAFLRRLAEGLGVVRYEGRVVEVQQAADGDIAGVRLDDGRIVEGDFFIDCTGFVGLLIEQALKSGYEDWTNWLPCDSAVAVPCERGEPLSPYTRSTAREAGWQWRIPLQHRVGNGYVYSSAHISHQAAEDALMSRLEGKALAEPRRLRFATGRRKDCWKRNCVAVGLSSGFLEPLESTSIHLIQSAITKLITLFPSQKNSEGLRSEFNALMQEEFVTVRDFLILHYKVNQRAGSFWSQVRDMPIPGRLAAKIALFEETGRIVRRDHDIFSESSWLAVAVGQGLTPRGRHPISDVISHDANLGRLSAIRDSIWRTADALPTHEDVLATTMNRKAF

SEQ ID NO: 82811 - protein, 502 aa, unidentified
  source 1..502: note = Asticcacaulis biprosthecum
  REGION 1..502: note = tr|F4QJG0|F4QJG0_9CAUL Tryptophan halogenase PrnA; OS = Asticcacaulis biprosthecum C19 OX=715226 GN=ABI_15830; PE = 4 SV=1
MTAIETIVIVGGGTAGWMAAAALSRLRSGRPVNIVLIESEEIGTVGVGEATIPPFLDFNRLLDIDEREMLAAVQGSFKLGIQFVNWGKLGDSYIHPFGNYGYQVDGVSFHHIWHRYKMAGDKRPIQIFNIETMAAQFGRFARTDDYKHEDLPPINYAYHIDAGRYARYLRGYAEKRGVVRLEGKVTDVICNAQTGFVESLSLNNGDSLKGDFFIDCSGFRGLLIEQALKTGYDDWSHFLPCNRAVALPCERGDGSGPLPYTRATAHTAGWQWQVPLQHRNGNGHVYCSAYMEDEEALDILVNNIAGKPGASPNFLRFVTGRRKKFWNKNVVALGLASGFMEPLESTSIHLVNTGINKLISLISLDGVTQAQEDAFNRLTGKEYERIRDFLILHYKATSRDDSDFWNYCRTMPVPPSLTEKIELFQHNGQIFREDDELFTETSWAAVMMGQGIVMKGHNVMADSLEDAKTRKELDGIEKSIQHVVQHMPSHGDYLKNYCPSKM

SEQ ID NO: 82812 - protein, 507 aa, unidentified
  source 1..507: note = Oleiagrimonas soli
  REGION 1..507: note = tr|A0A099CZ85|A0A099CZ85_9GAMM Tryptophan halogenase; OS = Oleiagrimonas soli OX=1543381 GN=LF63_0102950 PE=4 SV=1
MVVAGGGTAGWMTALLLAHSAYGPRLQITLLESPQVGAIGVGEGSTPWLRGFFDELDIEEAEWMPACNATYKSGITFEGWSTRPGFESYFHSFASMLDNLTMPQFVDNVHARLNRADVHAHPDRFFISTKLARDCLAPKPQRSFPFDVWYGYHFDSVLLGRFLHDKGVQRGVRHRVGHVTAVQQHDNGDIALLRLDDDTTLAADFFVDCTGFASLLIGKTLQTPFVSYAENLFNDAAVALPVPHDGPIMSQTVSTALRNGWSWKIPLTHRHGHGYVYSSAFCSAEDAETELRAHLGLLDADVPVRHLKMRVGRMQKHWHRNCVANGLAQGFIEPLEATALLFVQRTATLLVRALEKGDLGERAQTDFNTTVNDLFEGTRDYIVAHYKTNTRTDTDYWRENAANTRLSPSLERLLRTWLASEPIIPGLNGGAFGKGYPIMSWYSLLAGMGLFPNAGQMRPATKEEARHDLAQIDNLIERSATNFPDHRELLQNIPLRSRENSLQAYFW

SEQ ID NO: 82813 - protein, 522 aa, Asticcacaulis sp.
  REGION 1..522: note = tr|V4PAC4|V4PAC4_9CAUL Tryptophan halogenase; OS = Asticcacaulis sp. AC460 OX=1282360 GN=ABAC460_08465; PE = 4 SV=1
MLIVGGGAAGWLTASYLASHLGQERHGGPRITLLESPDIGIIGVGEGTFPTTRNILRTLGIEEAEFMRESQAAFKQGIRFDDWEVAPKNDVHSHYFHPFEAPYIGKDELDLLPYWLIQDPATRPPYAEAVTFQKRIADARLAPKRLFQGHYSGPLNYAYHFDAARFAGVLARRSKALGVHHLQGLLGEVVLDDTGAISHAISPDHGRLEADLYIDCTGFRSELLGKALNVPFRPVSDMLFADRAVVCQVPYPNPNAPLESYTIATAHEAGWTWDIGLANRRGIGYVHSSHHSSEARAEGVLAAYVARSGGKEEVEMRHIKFDAGYRTQHWVKNCVAVGLSAGFLEPLESTGMVLIEAAVNKIAEFFPHSGRIDASAGLFNDLMVKRYEAIITFIKLHYCLSKRDEPFWRDNAAPDSIPERLRMLLDIWQHRPPSRYDFVIDHETFAHFNYQYILYGMNFQTDYRLAGQALPMKDKAEQIFARIHSFGEQAAKDLSAHRATIKAIYDNGFVERAPSPAPALAR

SEQ ID NO: 82814 - protein, 520 aa, Asticcacaulis benevestitus
  REGION 1..520: note = tr|V4PLZ9|V4PLZ9_9CAUL Uncharacterized protein; OS = Asticcacaulis benevestitus DSM 16100 = ATCC BAA-896; OX = 1121022 GN=ABENE_18400 PE=4 SV=1
MVSGDAAFDRGGDNTRIERVVIVGGGTAGWMTAAALAKTVPAHVKIVLIESEEIGTVGVGEATIPSIRTFNNILGLDEFDFIRYTHATYKLGIEFVDWNRLGERYFHPFGDHGRHTQEFKFLQLWLRLKSGYARGMCPDPGPISDYNLCSVAAARGRFLTTNGATSTPGPSLRYAFHFDASLYAKYLRRYAEGRGVTRIEGRIAGTDLRSDDGFISSVTLDDGRTIAADLFVDCSGFRGLLIEGHLNAGFESWSQFLPCDRAVAVGSEPLSDFPPYTRATADSAGWRWRIPLQHRVGNGYVFSSDHISQDEATARLLSQIEGKPINDPHLITFTAGHRRSMWVKNCVAIGLSGGFIEPLESTGIHLIQTGIAKLLLFFPDKRFAQANIDEFNVATLLEYEAVRDFIILHYCATERSDSSFWRERGAMVIPERLKARMSLFCSTGRIFRYQDELFTDDSWLAVMLGQGVTPKSYDPLVDKIPLPEIAKNVARLRQITAQVVDSMPSHRDFIRQYCGAATVD

SEQ ID NO: 82815 - protein, 503 aa, unidentified
  source 1..503: note = Asticcacaulis biprosthecum
  REGION 1..503: note = tr|F4QP47|F4QP47_9CAUL Tryptophan halogenase; OS = Asticcacaulis biprosthecum C19 OX=715226 GN=ABI_25190; PE = 4 SV=1
MTAGPVRRIVILGGGTAGWAAAAAMAKFGDGRDFDITVIDSSEIGTVGVGEASVPNIRNFNAWLGLGELDFIASTRGTFKLGIEFVDWRTTGTRFFHPFGRYGVDLEDVDFHQCLARARAAGFDAPLEAFSLPIAMARQDRFSQPVSDPRSPLSDYGYAYHFDAGLYAKRLRRYAVERNVKHLDRRVAGAAMKDNGHVDALLFDDGNRFEADLFIDCSGFRGLLIEGALKTGYDDWTHWLPCDRAVALPCRRAGSALEPYTHATAREAGWTWRIPLQHRVGNGYVYCSAFLDDQAAIDRLTGAMESDPLAEPNLLRFVTGTRKQFWNGNCVALGLAGGFIEPLESTSINLVHRALSTLMEYFPDTGFDPRLQAVANRRMRLETEHIRDFIILHYKASQRRDTAFWRQCADMTIPDSLALKMDAYRAAGHLLQFEAESFKPESWLTLFEGLGLLPETVEPLAGQIDACELTGPLNAMRASVVQAAQQAMPHAAFIERFCPAPAE

SEQ ID NO: 82816 - protein, 500 aa, unidentified
  source 1..500: note = Oleiagrimonas soli
  REGION 1..500: note = tr|A0A099CXY7|A0A099CXY7_9GAMM Tryptophan halogenase; OS = Oleiagrimonas soli OX=1543381 GN=LF63_0102710 PE=4 SV=1
MNDRRIRRIVIVGGGTAGWMTAAALGQALQGNCRIDLVESEHIGSVGVGEATIPPIKLFNQRLGIDENDFIAATQGTFKLGIEFVNWTRTGQRYFHPFGQFGAEFDKVPLHHYWLRERARGDDTPLEEYALAWVAARANKFMPPSSDPRQVLSTLDYAYQFDASLYAAFLRTYAERHGVRRSEGKVTEVNLREDGFIADVALENGTRLEGDLFIDCSGFRGLLIEGALHAGYEDWRHWLPCDRAIAVPCAHGEAFAPYTRSTAHAAGWQWHIPLQHRVGNGHVYCSHYISDDEATATLMNHLEGEALGEPRLLRFVTGRRRRFWHRNCVAIGLSAGFLEPLESTSIHLIQTAVSRLLALFPDRDFDPVTTAEFNRLTATEYERVRDFLILHYHANQRSEPMWRHVARMDIPEPLAYKLAHFRGHGRLVAERLELFQNPNWLAVLVGQEVWPERYDPLADLRSEVDATRMLAGLRDAIRQTVDAMPTQREYIDRYCRARPI

SEQ ID NO: 82817 - protein, 488 aa, unidentified
  source 1..488: note = Asticcacaulis biprosthecum
  REGION 1..488: note = tr|F4QGJ2|F4QGJ2_9CAUL Tryptophan halogenase PrnA; OS = Asticcacaulis biprosthecum C19 OX=715226 GN=ABI_21140; PE = 4 SV=1
MLPVKSIVIAGGGTAGWMTAAALARVFGPSLNITLVESDEIGTIGVGEATIPAIARFNSMLRLDEDAFLRETQGTFKLGIEFRGWRERGHSYMHSFGAVGRDLAYLPFHHYWYQDRMQGGDAGELGDYDLNQAAAYAGRFARSDDLVHAFHFDAGLYAAFLRRYAEAGGVTRIEGRIADVAVEEDIRALRLADGRAIAGDFFIDCTGFRALLIEGALKTGYEDWRHWLPCDRALAVPSARTCPLLPYTRATAQTAGWTWRIPLQHRTGNGHVYCSDHISDEEAHAALMVQLDSEALADARPIRFTTGRRKKLWNKNCLAIGLSAGFIEPLESTSIHLIQSAIERFIMLFPRGPDHDRLAQDFNDSSIHEMENIRDFIILHYHVNGRYDETFWNSCRNMTIPDSLHHRIELFRDTAALHIPPADIFRLPSWLQVLHGQGVEPQAVHPFTERVARDDRARFLRGLRFECHERLELLPAHDAFVWRHCYHR

SEQ ID NO: 82818 - protein, 517 aa, Shewanella psychrophila
  REGION 1..517: note = tr|A0A1S6HPV0|A0A1S6HPV0_9GAMM 2-polyprenyl-6-methoxyphenol hydroxylase-like oxidoreductase OS=Shewanella psychrophila OX=225848; GN = Sps_02370 PE=4 SV=1
MPEKNKITKVLIVGGGTAGWLAANHLGKRFSDLDGPNIEVTLIESPNIPNIGVGEGTVPMMRETLRYLGIDEGYFVQSCDATFKQSIKFVDWVYNPKEKNHSYHHLFDYPMSHDSAFYWHKTSASSRDSFANSVSVQSVLADAGLGPKLVTQPQFQGVTSYAYHLDARKFSEVLRLNALSKFGLSHILDDVLEVTLSDSGDISTVSTSQNGELEADLFIDCTGFSARLIEKACKVPFVDKGDVLFVDSALAVQVPYEKSHDAIPCFTLSTAKEAGWIWDIGLTERRGVGYVYSSRHSSRQDAEKVLSEYLGGKVSEAEFRHIPMRIGYREKAWHRNCVAIGLSGGFVEPLEATGLLVFDVTSRMLAECIPNKLSSMHLVAERFNQRTVDTWNKVIDFIKLHYVASKRNDTEFWSDNRKEASIPDSLKQKLALWSSELPNRYDFTSTLEIFNLENYQYVLYGMDFDTDLGYSEVSKDGLDKFLSEQNKIAEFIHQAKTQLEPHRELIEKIHKFGIQKV

SEQ ID NO: 82819 - protein, 478 aa, unidentified
  source 1..478: note = Asticcacaulis biprosthecum
  REGION 1..478: note = tr|F4QTE3|F4QTE3_9CAUL Tryptophan halogenase family protein OS=Asticcacaulis biprosthecum C19 OX=715226; GN = ABI_44400 PE=4 SV=1
MVCGSGLAAQQVCAALAPYLCDALSVTWITGMSGADSDIVYGNLAPPTAYDFNLSLGVSEPDLILNSDTTFSYGTHVTNWGARRLNWVQAFHQPLPVLEGATFQHYLTQQGQSALEPFLVSAMAARRGVFAHPPEDLAHPLSRAEYGYHFDAAAYGALFELAAARGGVRKVAADISAIDAVDGVINAVHLSNGQTLTAGLWIDATGPQAMLLSQIAGVRQGTRRLCFHLTRMETETPGPAVTTINGTPYGWQAKTALRTSTLMLTTSDPDSDLEAQAALETAPLRSATVDICWRDMAWVGNCVGIGHAACVAEPLTIAPMRLLQRDIERLLPLLPVSDDLSVERREYNRQALADYVHADLFTRALFETQPMDGAPYWRAATRTPADERLVRKIEQFESRGLHVAFDLEPFGPEDWLTLHYGMGRSPLRYDRTVDGADSARIRQYLETLRGNIENAVRSMPPHASYLNGLTNYLRQTKG

SEQ ID NO: 82820 - protein, 509 aa, unidentified
  source 1..509: note = Sphingobium algorifonticola
  REGION 1..509: note = tr|A0A437JCC2|A0A437JCC2_9SPHN Tryptophan 7-halogenase OS=Sphingobium algorifonticola OX=2008318; GN = ENE74_02870 PE=4 SV=1
MEAENGRGRRIGQVVILGGGTAGWMTATALARTLGRSVAITLLESEEIGTVGVGEATIPTIHWFNDLIGLDEAAFVAATQASFKLGIEFVDWARPGHRYFHPFGQYGVAFPGVPFHHRWLKAQRDGLDLPLDAFSLASQLAKDNRFAKPVSEARSILSTLGYAYHFDAGLYARHLRGLAEAMGVRRVEGKLGAIAQDPQNGFITAITTQAGERLDGDLFIDCSGFRALLIEGVMQAGFEDWSHWLPCDRAVAVPCARVADTTPYTRSTARSAGWQWRIPLQHRTGNGYVYASAFLSDDEAAATLLAGLDGEALADPRFLRFTAGRRRRAWVKNVVAIGLSSGFLEPLESTSIHLIQSGIAKLLTLFPDADCDPGLADRFNLLLDRDMDNIKDFLILHYHATADKPEPLWQHCRAMVLPDTLVAREAHYRATGRIMIETDELFREASWLAVLNGQGILARDYSPIADTLEAPANRTQLEQIAALIARAVPTLPRHDAAIAALTGGGRAAA

SEQ ID NO: 82821 - protein, 503 aa, Asticcacaulis sp.
  REGION 1..503: note = tr|V4PTQ6|V4PTQ6_9CAUL Tryptophan halogenase; OS = Asticcacaulis sp. AC460 OX=1282360 GN=ABAC460_14255; PE = 4 SV=1
MTAPRTIVIAGGGSAGWMTAAALSRFMKNFPADRAVKIILVESDEIGTIGVGEASIPLLGVFNALIGVEERDFIQRTQGTFKLGIEFHGWTRDGESYLHPFGNYGQSLDMTDFHHYWLRARAAGYSAPLDDFNLNTLLARSNRFALRDANPASPLSSIAYAYHFDAGLYARYLRSLAQGNGVERIEGRIVEVQQHAETGFLTGLKLASGQVVEGDFFVDCSGFRGLLIEETLKAGFTDWTGLLPCDSAVAVPSARTEPLLPYTRATARTAGWQWRIPLQHRTGNGYVYATSHISDDEAAATLLANLDGPALTDPRVIRFRTGRRTKAWVKNCVAIGLSAGFLEPLESTSIHLIQKGVTKLLTFMPSGTWSQTLVDEFNRQTTFDYEDVRDFLVLHYKANSREGQPFWDALRHNPVSDSLQARMDLFRDSGRVPVSDHELFKLTSWVAVMLNQGIVPRDYDPMADAIPLSTITGRLDQMRGVLARAALAQPTQAEFIARNCAAF

SEQ ID NO: 82822 - protein, 507 aa, Brevundimonas nasdae
  REGION 1..507: note = tr|A0A0B4CMX6|A0A0B4CMX6_9CAUL Tryptophan halogenase; OS = Brevundimonas nasdae OX=172043 GN=RM53_15160 PE=4 SV=1
MTQNDAGSIRKIVILGGGTAGWMTAAALSYRLAGSAVSIELVESDEIGIVGVGEATLPHIRAFNTAMGIDEQTLIDQTQATFKLGIQFVDWGRPGDSYIHPFGAYGEPIEGIDFHHVWAAHRAMGDAADISDYSYPVRAAEANRFQRPISDPGSMLSTFSYAFQFDASLYAAFLRQVSCGRGVVRTEGKVVDHVLDDATGDVDAIVLSDGRRIRGDLFVDCSGFRGRLINQALETTFEDWSHWLPCDSAFAVPCQTTAPVGPYTRATARAAGWQWRIPLQHRTGNGHVFSSAHISDADAVATLMSNLEGPALAEPRRLGFKTGRRQRLWSRNVVAIGLSGGFLEPLESTSIYLIQLGITTLLDLFPDRAGMAADAEEYNRIMALEFDRIRDFLVLHYVANQRDEPFWREMRTMAWPDSLSAKVEAFKSRGLLPDYDIGVFLPPSWLAVLVGQNIVPNGWDPRVDRLEPHVLSDKLAALRDAVRSTVDRTPDHMTFIRQAAQRAGGVR

SEQ ID NO: 82823 - protein, 514 aa, Asticcacaulis sp.
  REGION 1..514: note = tr|V4Q082|V4Q082_9CAUL Uncharacterized protein; OS = Asticcacaulis sp. AC460 OX=1282360 GN=ABAC460_06610; PE = 4 SV=1
MTISPTRVVILGGGTAGWMTAASLIKAFQPHFCTVRLIESDEIGIVGVGEATLPQVHDFNDFLGLDEPEFMRETNATFKLGIDFSNWARNGDSYIHPFGIHGQAINGVPLFQYWLRARLNGHNTDLESYSFPIVACRNNRFDFPSDDDRSVRSTFAYAYHFDAVLYSRYLRKWATARGVQRTEGKVVDVTLRPEDGFIQSLTMQSGEIIEGDLFIDCSGFRGVLISQALKMGWEDWTQWLPCDRALAVPSDRSEAFTPYTRATAREAGWTWRIPLQHRTGNGYVYSSRFTTDERAAEVLLGALDARAQAEPRMLKFQAGRRQQSWYKNCLVIGLASGFLEPLESTSIYLAQIASNFLMRLFPGKTIDPKLAQEYNRLVDIEYERVRDFLILHYHANEKPAEEDPTGLWRYVREMAVPDSLLTKMETWRHRGHIHRYKDGLFAPPSWVAVYTGQRIFPQNYDRQVDTMSLEMVLQKMAEMKERVAVNVEAMPTHADFVRDYCFDPSAKVMMEDAQ

SEQ ID NO: 82824 - protein, 520 aa, unidentified
  source 1..520: note = Asticcacaulis biprosthecum
  REGION 1..520: note = tr|F4QLY4|F4QLY4_9CAUL FAD dependent oxidoreductase family protein OS=Asticcacaulis biprosthecum C19 OX=715226; GN = ABI_19960 PE=4 SV=1
MTSARKVLIAGGGTAGWLTAAYLARVLGHGKLTCPQITLIESPDIGTIGVGEGSFATIRTTLQTLGLDEETFLREATATFKQGIRFADWEKKDSWYFHPFDPPYPVEGAGLLPYWLLQDEAARLPFAQAVALQKKVAETQRAPKRLFENRFGGALNYAYHFDAGKFAKLLSRHAVSMGVTHLQGRINDVKLAQDGSIAGVVTADHGELNADLYIDCTGFAAVLIGKALGSPYKSVRKHLLTDRAIACQVPYPRPDAPIESYTVSTGHEAGWTWDIGLDVRRGVGYVYSSDHSSDERAEEVLRTYVGPTATDFSTRVIKFDTGYREQQWIKNCVAIGLSGGFFEPLEATGIMLIEVAIGMLTEYFPHAGPIDANAAVFNRLMTLRNEKLVNFLKLHYCVSKRHEPFWRENCDPATIPEELNELLDMWKYRMPSRFDVLDDIDTFAFFNYQYILYGMGFSTDLSAQRDSHPKVAEAKAIFDKIALIGDQAARDLPTHRALIDQVYSYGYAEPPAQRFMSVKR

SEQ ID NO: 82825 - protein, 507 aa, unidentified
  source 1..507: note = Asticcacaulis biprosthecum
  REGION 1..507: note = tr|F4QKK1|F4QKK1_9CAUL Tryptophan halogenase PrnA; OS = Asticcacaulis biprosthecum C19 OX=715226 GN=ABI_05860; PE = 4 SV=1
MHANPMIKSVTIVGGGTAGWMTAALLSKLLLGRFDITLIESEEIGTIGVGEATIPAIKVFNQFLDLNETEFIRATQGTFKLGIEFVNWRDKGHSYIHGFGKIGSDLMWLHTHQFWLKMHEKGEVRDFDHYALNTLACRMNRFRPRQPNEPPPMADFDYAYHFDASLYARYLSKQAQGRGVKRIEGRITKVELRAEDGYIDHVVLQSGETVGGDLFIDCSGMRGLLIGDALGVGYEDWNHWLLNDRAWAVPCERATVLTPYTRSMAHGCGWQWRIPLQHRTGNGHVFSSSHMGDDEAASILLKNLDGKALADPRLVKFRPGKRHRAFEKNCVAIGLAGGFLEPLESTSIHLIQTGILRLLALFPGQSFDPRDIAEYNAQTDFEYRDVRDFIIAHYKVTDREDTPYWAYLKHMDIPESLTQRLDLCRSSARFFKHSAAELFHEESWVQVLLGQGLRPRYDPMVDMIPEDDIRAHLKDIEEVIAEYAAKLPTHGDYIERYCKAPPLLEMA

SEQ ID NO: 82826 - protein, 507 aa, Salinispora arenicola
  REGION 1..507: note = tr|A8M0H4|A8M0H4_SALAI Tryptophan halogenase; OS = Salinispora arenicola (strain CNS-205) OX=391037; GN = Sare_2119 PE=4 SV=1
MLGVLLVKGEIYVTTRTDRSVDVVVVGGGPAGSTAATLVAMQGHRVLLLERERFPRYQIGESLLPSTVHGICRLIGADEALERAAFTIKRGGTFRWGANPQPWTFSFGISPRFAGEAATAYQVERMKFDQILLDNARSRGVEVREECDVRDVVAEHGRVVGVRYADASGHEREVRAAYVVDASGHASRLRAHAGTRHYSKFFRNLALFGYFTGGKRLPPPNEGNILAAAFDSGWFWYIPLGPELTSVGAVLLPEALDRIQGDRERALLDLIEECPLIAEQLADAERVRTGPYGEIRIRKDYSYLQDRFWRPGLVLAGDAACFIDPVFSSGVHLATYSAMMAARSINTVLRGEADEAAAFEEFEARYRREYSRFHDFLVAFYDMHQDENSYFWSAKKLTSNAGTELESFVELVGGGGWQEDALLAPGVKGGGRDAAMRQLADIVDQPVRAAGEDRNLLQASLARSVVREGSRLQVQAVMGGNVDEVRPIREGGLIPSADGMHWVRPDS

SEQ ID NO: 82827 - protein, 506 aa, unidentified
  source 1..506: note = Phenylobacterium hankyongense
  REGION 1..506: note = tr|A0A328AX95|A0A328AX95_9CAUL Tryptophan halogenase; OS = Phenylobacterium hankyongense OX=1813876 GN=DJ021_00115; PE = 4 SV=1
MSAPLTEVVVVGRDAALWLAASVIQAALRPGVRVTAVELPSRLCPADVYASLPALEAFHNLLQLDEAQLLRLAGGSFSLGQNFQSSGGAGPSFFHAYGSYGAAIDHKDFFAYWLKARSLGLSVALEDFSLTAAAAKQGRMLLPDETTERFGRTDYGYHLPALAYASVLKTLAVRHGVTALQTDAAHAVLDPDSGDILALDLAGGRRVEGQFFLDASGAEGCLIAGVLGVGREDWRSHFVADRTLVARAAPYAAAPVYAELRAWEAGWVGLFPTQAATHIVQAYSSAYCDDGAALVGAAKVAQLDLDDAVVRRADPGRRLVAWARNCVALGEAACLFDATHAVELHAVQLGLVHLLELFPLGGAFAVERQEYNRITQSAFERIRDFQSAFYVLNRYGDSEFWSAARRAPASPELTHKIETFAARGEATLLEDETFLIDSWRALFVGQGLMPGSHIPIIDQTSPEEVKREFRRILGFIKEQVLKQPSHQQYLDRLCRREKVPEIASGS

SEQ ID NO: 82828 - protein, 508 aa, Asticcacaulis sp.
  REGION 1..508: note = tr|V4PU96|V4PU96_9CAUL Uncharacterized protein; OS = Asticcacaulis sp. AC460 OX=1282360 GN=ABAC460_03295; PE = 4 SV=1
MAQHPGKAVRKVVIAGGGTAGWMCAAWFSKILRDDIDEIILVESEEIGTVGVGEATTPYIRVFNHHLGIDEDAFIRATQGTFKLGIEFVDWGRRGHTYHHPFGATGREFGSLPFHAIWLRDVLERGGSDDLGLYNLQAMAARRGRFMRPQGQNSPLAGIDYAFHFDAGLYAQTLRQFAEARGVRRIEGRIETVELTDMGNIRALQLNEGRRVEGDLFIDCTGFRSLLLGEALQTGFEDWSHWLPCDRAYAAPTRRAGAPAPFTRSTAMTAGWQWRIPLQHRDGNGLVFASPFLSEAEALDGFLARLPDGRLSDPKLIRFRTGRRKVFWHKNCVAIGLAAGFLEPLESTSIMLIQNGIARLQYYFPDTGFDPADIAAYNRAMSREYDDIRDFLILHYHVGERDDSEFWRYCTGMPVPDSLAHRLELFRSRGRIPEERGEQFRLNSWLAVMWGQGLRPRSPDPLTLSLDGDGLSQWLGDVREVIARCCDIMPAHEDFILRNCRAAVIQRQ

SEQ ID NO: 82829 - protein, 589 aa, Microcystis aeruginosa
  REGION 1..589: note = tr|L7EAA2|L7EAA2_MICAE Tryptophan halogenase family protein OS=Microcystis aeruginosa TAIHU98 OX=1134457; GN = O53_553 PE=4 SV=1
MQMTQDKEYDVVIMGAGFAGLCQARHLMLKIPNIKVALVDPRPEQRTDKDLKIGESTIEIAALFLAKELGLHDYLIENHAPKQGLNFHWPKNPAKTETIDDYYHAGSNRQVPIPSFQINRSKFEQDLLKMDKAMGINFYNGQVVDVDLTPGDAIKTVKIKVGDERMELQAKHVIDAAGRKFIIGRKTDNLLFGPENLMGLNTGSAWVRVKNVDRTIFHSGYDPLNASTSHYYSTNHYFGEGHWLWMIPIDTQTMELSIGVIHHHDVINSTQVNSWEKFHDFLRNNHQILANIIDSGEAVDFHYWPRISHTSKTLFSPDNWYVLGDAAYIFDAFYSYGTTTIALAIEGITEIVRAKLAGEADAEQKRAAYNEFNLAYSRSVNCLYRGHAKQLGQASVMSWRIYFEYMWWFGVQVPMYVGKWHLDLTYIPIFLKTLNSNIDGLFADLNEQFTELADKDVNIGLMDCYRGDQLFKGYHTLKHFDDFLENTKFEPRRCNVFAGLKATCFYAALWYALFQWKGFGIQGCLNPRHIYHFLRLLGLSGQATIGELIYKFKTKGLPANSEIEAMRQEFKTYQYQPKLQPWLAEATNS

SEQ ID NO: 82830 - protein, 480 aa, Sphingomonas sp.
  REGION 1..480: note = tr|A0A4R2XM37|A0A4R2XM37_9SPHN Tryptophan halogenase; OS = Sphingomonas sp. JUb134 OX=2485112 GN=EDF69_1302 PE=4; SV = 1
MTATGVNRAPALRSVVVVGHGVVARTAALALARGTPGASVTLVPAPIAPGALADWFPTLLASGRDAPQLWGTTGDALLRAGVATPRLAAAFDAWPRNGRWLHPEGSPTRMAGPGATHARWMNAEPHADVPTFEAMFPATAMLDAGTFAIEPSAPLAEADHALCLDPRRLVEWLSPRLRAAGVVTASAPFARVTLDGRGRVDAIQLHDGCAITGDLIVDASGPPALIAGASRTDWLDWSDPLPEDRMLIAAATDQTPSMVDRYRLLPFGWDASWPFPVRPLRAVAYRGGSCTDDDARAALGADLDSGAIPIAPGRRAEAWRGNCVAIGEASVQPGPLRLAGFTLAQAQLSLLLDLLPARDMPRSIVTAYNVRAAARADRLRDWLAAHRCEGAGATPNDLPALAATLTRFRRNGGLPHFDEETASEAAWHAVLIGQGVRAARAVPPVIGDDTRLFAMAARAAAARMVEAAGALPSLSELRNR

SEQ ID NO: 82831 - protein, 514 aa, Sphingobium ummariense
  REGION 1..514: note = tr|T0J7G3|T0J7G3_9SPHN Tryptophan halogenase; OS = Sphingobium ummariense RL-3 OX=1346791 GN=M529_08005; PE = 4 SV=1
MATDNPPSLGRIVILGGGTAGWLAAATFSRAWKMPRVTLVESSDIGIIGVGEGTFPTIRTTLAGLGVAEAEFLSRADATFKQGVLFDGWATDADSYFHPFNMPVGGEGEPLLPHWIAAGEQRASWADSVTVQERVIRAGRAPKRPQDPDFSGPMNYAYHFDAARFADYLRTISVAAGVERIEGTVAEVERAPDGDIAALLLAGGKRVEGDIFLDCSGFGALLIGQTLGSSFTGCGDTLFNDRALAMQVPYDRPDAPIRPYTLATAHEAGWTWDIGLSERRGIGYVYSSRHCSDEDAEATLRRYVGPAGDALAARQLRFQTGYRERQWIGNCIAVGLSAGFFEPLESTGIMLIETALRMIGDLLVPGTRATREAAARRFNDLMRARFERIVRFLKLHYCITRRTDTAYWRDNADPASIPEDLRDLLAQWRHRPPSRFDFTVDLETFLPPSYHYILYGMGFRTEPARPMPGAAEARAAFAQVAAASRAAVANLPDHRTLLHHYRRQSAPTLAQGIR

SEQ ID NO: 82832 - protein, 502 aa, Massilia sp.
  REGION 1..502: note = tr|A0A1G7P4M7|A0A1G7P4M7_9BURK Tryptophan halogenase; OS = Massilia sp. PDC64 OX=1881046 GN=SAMN05428966_12321; PE = 4 SV=1
MSDKAIRKIVIVGGGTAGWMTAAPLALKLGGSCEIVLVESPEIGTVGVGESTLPTIRYYNHALGIDGADFVRRTKATFKLGIDFRDWGHLGNRFFHGFSDFGPTIENRPAFMYWLRLARDNPNMPSYEEWSISTVMAHENRFVPPYGDQPGPTNAYTYAFQFDAGLYALYLREYATARGVRRVEGTVGNVEQHPETGFITALQLQDGRRIQGDLFVDCTGFRGLLIEGVYKAGYEDWSAMLPCNSAQAVPSALADRLTPYTRSTAKPAGWQWRIPLQHRNGNGHVYCDAFMSDEEAGRVLLDGVDTEPLESPRQLRFTTGRRRKSWIKNCVAVGLSSGFLEPLESTSINIIELAVGWLLQYFPDRDCSPELADEFNRLAAQRYEFVRDFIILHYKLTNRTDSEFWRYCANMKVPDTLQHQIELFRATGRVTIYDREGFQADSFAAIMLGHGIRPGRNDPLIDRMDQAALADHFRKVRATIRQVVGTMPDHAALVAQVAGAAM

SEQ ID NO: 82833 - protein, 503 aa, unidentified
  source 1..503: note = Sphingomonas spermidinifaciens
  REGION 1..503: note = tr|A0A2A4B420|A0A2A4B420_9SPHN Tryptophan halogenase; OS = Sphingomonas spermidinifaciens OX=1141889; GN = COC42_15070 PE=4 SV=1
MTDGHAQRVVIVGGGTSGWMAAAALARLLPRRCSIHLVESEAIGIVGVGEATLPHIRHFNERLGIAEADFMRWTRATFKLGIEFRNWGRIGDSYVHPFGTFGRGQGDVDFHHYWTRARLAGHDVPPLEQFSIACMMARLGKFTTPGDPQSLAGTFGYAYQFDAVLFAPYLRALAEGLGVRRTEGRVVDVELDGERGDIRAIVLDGGLRIEGDLFVDCSGFRSLLLGEALGEPFQDWSRWLPADRAAAMPCRTRTDVTPYTSAIAMPAGWRWRIPLQHRTGNGYVYSSAFVSDDEAASAIEAAVEGEPMASPRLLRFRAGRRERSWVRNCVAVGLASGFLEPLESTSIYLVQQAITALVELWPERDIADADRDEFNRIIDLEYDRIRDFLILHYHATERDDSAFWNYVRTMPIPDSLAEKIELFRRRGRIVKYREGVFLDASWVAVYLGQRVIPKGFDPRADLPASADLLRSMKALHQEVAETAAAMPAHLDFIHRYCPMAEAA

SEQ ID NO: 82834 - protein, 502 aa, Pelomonas sp.
  REGION 1..502: note = tr|A0A397RZG8|A0A397RZG8_9BURK Tryptophan halogenase; OS = Pelomonas sp. BT06 OX=2135721 GN=C8K28_1574 PE=4 SV=1
MPASLVRRIVIVGGGTAGWMAAAAFSRLLGPGHDIRLVESDEIGTVGVGEASIPYLADFNVALGIDENEFLRATQGTFKLGIEFVDWARLGDRYTHAFGQVAMDIGALSFHHYWLRLRSQGDSRPLGTYSLNALAASQGRFMRSRQDLPNSPLGNIAHAFHFDAGLYARFLRGFAEQRGVQRVEGKVVEVRQREDGGIAGVRLESGSVVEGDFFLDCSGLRGLLIEQTLKAGYHDWREWLPCDRAVAVPCASVQPLLPYTRATARPAGWQWRIPLQHRIGNGHVFSSRFMSEDEATALLLSRLDGERLAEPRCIPFVPGQRKRFWIKNCVALGLAAGFFEPIESTNIHLIQTAIMRILALLPRADMDPVDIDEYNAQTQAEYERIRDFVILHYHATERDDTPFWTQCRTMAVPDTLRRKMELFRGNGRLFHDGKELFADSSWLQVLVGQRVEPRGYHPLADGMALDQVQGMADSIEQLMRRCVESMPTHDAFIRAECAASRP

SEQ ID NO: 82835 - protein, 517 aa, unidentified
  source 1..517: note = Sphingobium algorifonticola
  REGION 1..517: note = tr|A0A437J9U3|A0A437J9U3_9SPHN Tryptophan 7-halogenase OS=Sphingobium algorifonticola OX=2008318; GN = ENE74_08600 PE=4 SV=1
MEEEQTKRVVILGGGTAGWLSACVLAAENIRRGLGLSITIVEAPDIPTVGVGEGTWPTMRGTLQTIGLDEATFLAACGGAFKQGSRFDGWVSGAADDSYLHPFTPPAGDDLAALLAAWDRDSGQSFAAAANAQQAVVDMRLAPRQTAMPDFAGALNYGYHLDAVRFAALLREHATTRLGVIHIADRIGEVIPDERGGIAALHGVSHGTISGDFFIDCSGHAALLIGGTLNVPFMDRSDMLLNDRAMAVQVPVLPDSAIASATIATAHAAGWLWDIGLPERRGIGCIYASRFMADDEAEAVLRDYVLANVPGATGQSLSPRRILFPTGHRERFWQGNCIAIGLSAGFLEPLEASAIVMIELSLRALTENFPRSRAAMPFLADRFNTLFRYRWDRVVEFLKLHYVLSQRPEPYWQAQRATDSLPPRLAALIALWRDQPPSAWDFPHVDEIFSAASHAYILYGMDFPLPRYLPPPAPAARRAIADVAQRSRAMLAALPDHRLCLAATAQQAPGAGVRSAS

SEQ ID NO: 82836 - protein, 600 aa, Legionella spiritensis
  REGION 1..600: note = tr|A0A0W0Z440|A0A0W0Z440_LEGSP Tryptophan halogenase; OS = Legionella spiritensis OX=452 GN=Lspi_1432 PE=4 SV=1
MFQPKKHRIAIIGSGPVGLYTAILLKWKYGESIDVTLIDSHINDYERPGIIAKKAVQIINSSFQSRDIPEIDVPDSGGEPANSVFIGDLQKSLLKHAQKLGVNLVEDAFASLEENTITTKKGQSMTSDLVIDCSGEGRVVANFTNKRFGGDSVFNVETIAENPIKQHFIAYVHMDVENSNLCRMEDLKKRDPVVHAKTMEELRKTFGWKEFADPEMVVSKWDQKTEGARYCFYFEVPSQVAQAGMKEQEAYLKALLLLKTGKFIAFEREEGKFKFIPFDVDPKRVLQPVNTTNYSIPVVVCGDALVSAEYRFGTGVANGVTCASGLVNSIEVTPKEVVISKDRFEIETRATVESHVDEIKKSYQSKRSQLSGRNLVEAFEMYTKALKILATSEESESDLLKIEGGLFDLAAKFKESAREKFLQGVDSRKKEQHFIPFFQEAEALYKHALDIYENYCPNRQETKDLHSERAKIYSNLSRVFYQTGRIDEAIQFAEQSLNIAIKYDIKDMFESAFVSLEGSCKKALSDYNKDFPNSKWGEKIELNEKMAKMASQIGKDVKPYQEELERLKQKLLEAQSTMKSEMSTMRPDNDEKEKHFNLGN

SEQ ID NO: 82837 - protein, 504 aa, unidentified
  source 1..504: note = Sphingomonas spermidinifaciens
  REGION 1..504: note = tr|A0A2A4B8X6|A0A2A4B8X6_9SPHN Tryptophan halogenase; OS = Sphingomonas spermidinifaciens OX=1141889; GN = COC42_07220 PE=4 SV=1
MSADPAPIRRVVILGGGTAGWMTAKALSRSFGPTLSITLLESDAIGTVGVGEATIPTIHWFNQLAGIDEAAFLRETQASFKLGIEFVDWTRPGHRYFHPFGQYGVELPGPPFQHRWLKAKAAGLDLPLGAYSLATALAEAGRFARPSGGGRSILSTLGYAYHFDAGRYAAFLRRLSEGEGVVRVEGELAVVDRDAESGFVTALRTRRGEVLEGDLFIDCSGFRALLIEGEMQAGFEDWSNWLPCDRAVAVPCARVAATTPCTRSTARPAGWQWRIPLQHRTGNGYVYASAQISDDEAAGSLLAALDGEPLAEPRFLKFTAGRRRRAWVGNVVSIGLASGFLEPLESTSIHLIQSGIAKLVTLFPERDCDPALAARFNAVFDRDMLNIRDFLILHYHATEGHEGALWRHCRAMAVPDTLVERVHHYRRTGRVIVESDELFRETSWLAVLDGQGIVAEGWSPLADALDPATNRAQLEQIAEVIARAVPTLPSHDDAIAETIARAAA

SEQ ID NO: 82838 - protein, 509 aa, Xanthomonas sacchari
  REGION 1..509: note = tr|A0A2P5Z1V5|A0A2P5Z1V5_9XANT Tryptophan 7-halogenase OS=Xanthomonas sacchari OX=56458; GN = XsacCFBP4641_14685 PE=4 SV=1
MNLANTTDGRIRKVVIAGGGTAGWLAGCALAHQFRDRLDITLVESEQIGTVGVGESTVPPIRTFHRFLQIDEQEFLRAVAGTFKLSISFEHWRRPGDRFIHPFGTIGQGTWATPFHHFWLDSLRRGMPSDLGDFCLESVASRADRFSLETQPQVNYAYHFDAALYAKFLRRKAEGYGLRRVEGQIREVRQHAHDGSVASLLLADGQLIEGDLFIDCTGFRGLLTEQTLHTGYEDWREWLPSDRAVAVQTEAVAPPVPYTRAIAHEAGWRWHIALQHRVGCGLVFSSRHMSDDEAHAKLLRDVDGPPLRDPWLVPFRSGRRLQAWNKNVVALGLASGFIEPLESTSIHLTISAVVRLIQLFPHDGISPALVELYNTVSRQEMEHVRDFIILHYHATQRDEPMWKACREMALPESLAIRLRAWRERAHAWQDPGELFRVDSWTSVLLGQGIQPGPPHPLAAAIGDADLRTLLTRIRQPLQQASAAMPSQAEFIERYCKATPDVWQRSVSLA

SEQ ID NO: 82839 - protein, 515 aa, Asticcacaulis benevestitus
  REGION 1..515: note = tr|V4PH04|V4PH04_9CAUL Uncharacterized protein; OS = Asticcacaulis benevestitus DSM 16100 = ATCC BAA-896; OX = 1121022 GN=ABENE_18395 PE=4 SV=1
MAKSIIIVGGGTAGWMTAAYLARMLATSTPGGARITVVESEDFGIIGVGEGTFPSIRKTLGRIGLAEADLIRSANATFKQGIAFVNWRSTGSAGPDRYFHPFQIADQGSGLDLLPYWLAGAASGQDWASASNVQMRVADAYRAPKLITHPEYAGPLNYAYHFDAVAFAGLLRSRAIEQGVTHVFDTIDNVTMAPTGEIESLVGRKTGRLTADLYVDCTGFRAQLIGQAMGVPFKSFKSQLFTNRAVAIQVPYDDPAAPIPSYTKAVAQTNGWIWDIGLQERRGTGYVYSSDHTSDEAAEACLRTYIGHAADDLPSRILKFEAGYREVQWKKNCVAVGLSAGFIEPLEATGIGFAEIAGVILAALFPWSDQCDSGAEQFNAQMRERYAHVIDFIKLHYCVSNRRDTDFWLDNINPGSISDGLRDRLEQWKYRAPSFIDVDLKHDIFTEHNWQYVLYGMGYKTILGDRIAALRYFDEARAEFQEIQKQAEYALTIMPEHRSLVELVRRQGFTPKRAA

SEQ ID NO: 82840 - protein, 504 aa, Maricaulis maris
  REGION 1..504: note = tr|A0A495CXW5|A0A495CXW5_9RHOB Tryptophan halogenase; OS = Maricaulis maris OX=74318 GN=C7435_3090 PE=4 SV=1
MTPNRIKSVLIVGGGTAGWMAAAALSRFLGETIKIQLVESEQIGTVGVGEATIPQIKHLNSALSIDEREFVARTNGSFKLGIEFINWRRQGEAYLHNFGSIGLNLQQVPFHHYWLRARAGGASESLWDYCLNTAAARQMRFAPLEKVGNSPLSGIAYAYHFDASLYGKFLRDYAEQRDVIRVEGLIDDTIMAPESGHVTAVRLRDGRTLEADLFIDCSGFRGLLIEQALKTGYEDWAHWLPCDRAIPVPSSNAQAPIRPYTQAIAHNAGWQWRIPLQHRTGNGHVFSSAHMSEAAATETLLANLEGEALAEPRVIRFVTGRRKQFWNRNVVALGLASGFLEPLESTSIHLVQSGISRLIALFPDGDLAAADRDEYNRQMALEYERVRDFIILHYHLNERTDSDFWQDCAAMSVPDTLSAKLDLFRANGRLYHREEDLFTDSSWLQVMLGQGVNPKGYHPMADALAAGQLSDFLGNIQKIVGQAAATLPTHSDFLAKHCPAAMDS

SEQ ID NO: 82841 - protein, 512 aa, Pelomonas sp.
  REGION 1..512: note = tr|A0A397R132|A0A397R132_9BURK Tryptophan halogenase; OS = Pelomonas sp. BT06 OX=2135721 GN=C8K28_3284 PE=4 SV=1
MENHKPLQKVVIVGGGAAGWMSAAALSAVLRPPYEIRLIESDEIGIIGVGEATIPPIRVFNDLAKLDEAEFLKATQGSFKLGIEFVNWGRQGERYFHGFGNIGREPLWPVDFWQYWLRMRALGRALPLDAYAISNMAAQAHRFMLPRPEMRNSPLGNIGYAYHFDASLYARFLRRISESRGVRRTEGKVVQVLLNEQAGPNQGHVRAVRMESGVLVEGDLFLDCSGFFGLLIDKAMGTGFEDWSHWLPCDRAVAVPSESSGPLLPYTRSTAHRAGWQWRIPLQHRVGNGHVYSSAHVSDDEAAATLLKHLDGKPLAEPRLIKFRTGMRDHAWKHNVVAIGLAAGFVEPLESTALHLIQMGIGKLIEHFPHSGFVPEEIAEYNRQSRARFEDVRDFIILHYHLNQRDHGEGIDFWKACAAMSVPERLRRRMDLYAASGRILYEDGELFRTPSWLEVMEGQNLRPRGWLALAELQGVDDTANYMKGISDTIAACVAAMPEHAEFLRRYCPAAPV

SEQ ID NO: 82842 - protein, 379 aa, unidentified
  source 1..379: note = Vitiosangium sp.
  REGION 1..379: note = tr|A0A2T4VER0|A0A2T4VER0_9DELT Tryptophan halogenase; OS = Vitiosangium sp. GDMCC 1.1324 OX=2138576 GN=DAT35_30225; PE = 4 SV=1
MDRARHDVAVLGGGPAGTAVALALRRHTGHSVALIERSTYQEPRLGETLPPDSRTLLARLGVWEAFLQQGHLRSGGTCSNWGSETLGYNDHLLSPWGPGWHLDRRRFDLMLAEEAARRGVDLYTSAALAGWEHLEEGGYRLHVRRPGEGGPTTCLHARFVVDATGRRAAFATARGARRLTLDRAFSLYGFFHVRPGQMFDAYTLVEAREEGWWYSALLPGGRVVVGLVGDGESLRGLKPGHPEPWLALLERAPATRRKLDACAFTGETLLSLPANIARLDRMRGEDWLAVGDAACTYDPLSSQGISQALRSALLAAEALRRHFRGEPGALNSYEDTLQRQFQAHLHTRARYYRMERRWPTAPFWSHREQVPGQGFARAR

SEQ ID NO: 82843 - protein, 527 aa, unidentified
  source 1..527: note = Sphingomonas spermidinifaciens
  REGION 1..527: note = tr|A0A2A4B6G5|A0A2A4B6G5_9SPHN Tryptophan halogenase; OS = Sphingomonas spermidinifaciens OX=1141889; GN = COC42_04685 PE=4 SV=1
MATEERAATSSENAVRKVVIAGGGTAGWMTAAALAADLADAGLEIELVESPEIGTIGVGEATVPFIHTFNRMLGLDQADFMRRCNATFKLGIEFVGWRDVGESYFHSFAQFGPNFKDVSFYHMYLRYAALMAAKGADVPIEASNVGAVAARHSRFRHPHTVEKSGLPPHHYAFHFDAALYADYLRTYATARGVRHISGRIVEVAQVPETGFIKSLRLEDGRVLAGDLFVDCTGLAGLLIEKTLGSGYEEWKHWLPCDRAVAVPCAKAASPIPYTQASAEASGWRWRIPLQHRTGNGMVYSGAFADSDDAVEARLMEAIDGEPLAAPRRIRFTPGRRREVWVKNCVSVGLASGFLEPLESTNIHLVQSIAFKLLSYFPDRHFDQREIDAFNAEMQLEIEHIRDFIILHYKVTEREDTPFWAYCKHMSVPDSLQARIDMFRPHGRLFVKPGEFFTYNSWLSVMHGQGLRADRLVRQIDRLTDEEVIAYFEAFNGRVASVVASMPAHDAYLQAFVSARDTVTALRGAAGR

SEQ ID NO: 82844 - protein, 492 aa, Asticcacaulis benevestitus
  REGION 1..492: note = tr|V4PHG1|V4PHG1_9CAUL Uncharacterized protein; OS = Asticcacaulis benevestitus DSM 16100 = ATCC BAA-896; OX = 1121022 GN=ABENE_17215 PE=4 SV=1
MTAAALAHKLRGLPVRIELVESEEIGTVGVGEATLPLIRKFNEALNIDEATFMKETEATFKLGIEFCDWGRPGDRYIHPFGDYGRPVDNIPFYQAWLRLRQLGETARLDDYSYPIIAAEMGRFQRPGGDPDAIQAGFGYAYQFDSSRYAQFLRRYAEASGVIRTEGKVATTVCDPETGFVRSLVLDNGKTAMAELFVDCSGFRGVLIEQTLKTGYDDWSNWLPCNRAIAVPCESRGPLMPFTRATAREAGWQWRIPLQHRVGNGHVYCSSFISDDEATTQLLGHLEGPALASPRQLFFTTGRRRKFWNRNVVAIGLAAGFLEPLESTSIHLIQEGITELLQLFPDTGFHSADADEYNERMGLAFERVRDFLLLHYVANQRDDGELWLHFQNLALPASLEEKISAWMTRGHIIKYEFGTFLPPSWLAVLLGQNLIPRGYDPRTLKIPEDRLRAESRRLREAVLAAAQRTPDHAAFLRQVGGASHQAPLTAGVG

SEQ ID NO: 82845 - protein, 500 aa, unidentified
  source 1..500: note = Sphingobium algorifonticola
  REGION 1..500: note = tr|A0A437JAC2|A0A437JAC2_9SPHN Tryptophan 7-halogenase OS=Sphingobium algorifonticola OX=2008318; GN = ENE74_08585 PE=4 SV=1
MTQPHLPRRIVIAGGGTAGWMTAAAIARTLGPVAQVTLIESDQIGTIGVGESTIPPLVAYNRILGIDEAAFMRATQATFKLGINFENWRVAGESYFHSFGGTGKDHWSAGFQHFWLHGRDQGMAHAYGDYCLELKAAEAGRFAHLPDDRTNYAYQLDSALYARFLRGMAESDGTVRVEGRIAHVELDSETGDIAALLLEGDRRIEGDLFIDCTGFRALLIEGALHAGYDDWTHWLPCDGAVAIQTASVRPPVPYTRAIAHEAGWQWRIPLQHRQGNGIVYCSAFMEPDAALERLLATIEGEALVRPNPIRFQTGARRRQWHRNCVAVGLSAGFLEPLESTSIHLIQRAVLRILRMLPAGPVSVRDIDEFNDQQMTDMVQIRDFLILHYKVTDRRDSPFWRHCAAMAVPDSLTHRLALFRETGRVFRKNEELFAENSWVQVMMGQGILPQSYHPVAAKLRPEELAHLLQSLRDQVARTVDAMPSHADYIARYCNAQAPIAA

SEQ ID NO: 82846 - protein, 507 aa, Maricaulis maris
  REGION 1..507: note = tr|A0A495D699|A0A495D699_9RHOB Tryptophan halogenase; OS = Maricaulis maris OX=74318 GN=C7435_1830 PE=4 SV=1
MTDQRIRKIVIVGGGTAGWMTAAALAKVLGKDYADITLVESDAIGIVGVGEATIPQIKIFNAMLGLDEDRFMRDTKGSFKLGIQFRDWGRKGDSYFHPFGPFGVDMEGVSFHAFWLRMNQLGEPYPITDYSVQSVAGENGKFMRPIANAGTSPLGQIAYAFHFDAHLYAKFLRGFAEERGVKRIEGKIDQVHQRGEDGFIEAVELENGTRIEGELFIDCSGFRGLLIEQTLKAGYEDWTNWLPCDRALAVPCEGSDEITPYTRATAREAGWQWRIPLQHRVGNGYVYSSNHISDDEAAAALLANLDGKPLADPRLLRFVTGRRKQAWVKNCVALGLSSGFLEPLESTSIHLIQSGIAKLLQMFPRTSFEPADIDRFNARTREEFERVRDFIILHYNATTRDDTPFWDHCRTMQVPPGLAEKYRIFEGYGRVFRENEELFNDTSWFAVMIGQGLKPRSFDPVAECLSVEETRRRLAQIRQAMRASSDHMPTHADFIAKTCAAEMEPMT

SEQ ID NO: 82847 - protein, 527 aa, Pseudoxanthomonas suwonensis
  REGION 1..527: note = tr|E6WQL7|E6WQL7_PSEUU Tryptophan halogenase; OS = Pseudoxanthomonas suwonensis (strain 11-1) OX=743721; GN = Psesu_0608 PE=4 SV=1
MDKNRIRKVVIAGGGTAGWVTACALTHQFRDLLDITLVESEEIGTVGVGESTIPTIRTFHRLLQIDEREFMKAVAGSFKLAISFENWKRPGERYFHPFGTTGVNTWSCDFHQFWLESRARGVQSELGDYCLETAAARLDRFALFDASEATQQWSMRWTKQATKLERSDVSYAYHFDAALYAVFMRNKCEGRGLKRIEGKIAQVRQDPDSGFVQSLVLEDGQVVEGDLFIDCTGFRGLLIEQTLKTGYEDWNNWLPCNRAVAMQVETSTPPVPYTRAIAHEAGWRWHIALQHRVGCGWVFSSDHMSDDEAAAKLRACYPDDNLVREPWIVPFRTGRRKQAWNKNVVALGLASSFIEPLESTSIHLTLSAVTRLVQMFPFEGISQAVADRYNKVSRDELEHIRNFIILHYHLNQRDEPMWKQCREMELPPELAQRIQVFRDTAYAWQGEDELFRLDSWTHCMLGQGVVPANHHPLTRGLSDADMRTLLEGVRRPIDRVVAQMPQHQEFLNRYCPADPSVWQMRRRSTVG

SEQ ID NO: 82848 - protein, 510 aa, unidentified
  source 1..510: note = Sphingomonas spermidinifaciens
  REGION 1..510: note = tr|A0A2A4B7B3|A0A2A4B7B3_9SPHN Tryptophan halogenase; OS = Sphingomonas spermidinifaciens OX=1141889; GN = COC42_06515 PE=4 SV=1
MAGSVTRIVIVGGGTAGWLAAARLAAAVEPGRVQVTLIEAPDIPTIGVGEGTWPTMRCTLSRIGISETEFLSACDASFKQGSRFFGWRDGRDAYHHPFTPPVEGSAAALVAGWGGAGAFADAVCAQPAVAERGLAPRQPAMPDYAGALNYAYHLDAGKFAALLRAHATERLGVAHIADHVESVVPGEGGTIAAVATRANGEVAGDLFIDCTGHAALLLGGYCRVPFVDRSDALFNDRALAVQVPVAPGSTIAAVTDATAHEAGWIWDIGLPTRRGIGCVYASAHMDDDRAAAVLTDYLRRSAPDCDPRAISFRKLQFRSGHRERFWAGNCLAIGLSAGFLEPLEASAIVLIELSLDALVEDFPADPGAMAGAAGRFNARFRQRWDRIVAFLKLHYVLSERDEPYWQAHRDPATIPAELGVMLDRWRHRAPMPSDFDAVDELFPAASHQYVLYGMGAPMPPPPAMRIEDAAPVADRMGQLRQRARALAASLPTNRTYLDTLAARPLLKEAR

SEQ ID NO: 82849 - protein, 495 aa, unidentified
  source 1..495: note = Alteromonadales bacterium
  REGION 1..495: note = tr|A0XZU4|A0XZU4_9GAMM Putative tryptophan halogenase OS=Alteromonadales bacterium TW-7 OX=156578; GN = ATW7_07984 PE=4 SV=1
MTKTNAVKNVVIAGGGTAGWMAAAALAKLIGKNIHVTLVESDDIGTVGVGEATIPPIRTFHKLLGINEQAFMKATQASFKLGISFENWGDENTRYIHSFGVTGKECWAGEFHHFWLQGKVLGINNPFGDYCYELQAAKAGKFAFNQQNPINYAYHMDATRYAQFLREFSEPLGVKRVEGKIQKVVKSAKTGHIESLLLHSGEQINGDFFIDCTGFRGLLIEQALHTGYEDWSHLLPCNSAIAVQTKSTSDTVLPLTRSIAHKSGWQWRIPLQNRVGNGLVYCSQYMDDEQAKALLLNNIEGEALTEPRVIKFKTGRRLKGWNKNCLALGLASGFVEPLESTSIHLIVSGIIRFMRLFPFNGITNYAIDEYNKQLKSEIENIRDFIVLHYKVTNRDDSEFWQHCSAMEVPTTLQHKIDLFKQTGRVFLDDGDIFRVDSWVQVMLGQGIVPEQHHLIASMMSDEELARFLHGIKQQIEQRVSQLPPHHEFLKHYCPA

SEQ ID NO: 82850 - protein, 512 aa, unidentified
  source 1..512: note = Sphingomonas spermidinifaciens
  REGION 1..512: note = tr|A0A2A4B7J6|A0A2A4B7J6_9SPHN Tryptophan halogenase; OS = Sphingomonas spermidinifaciens OX=1141889; GN = COC42_04425 PE=4 SV=1
MRGGETIGRVVIVGGGSAGWMTAAALSRLCAAGVEVTLVESDAIGTVGVGEATIPPLLDFNAALGIDEPAFVKATRATFKLGIEFVDWARRGERYLHPFGRIGRAQMGVPFHQIWLRQRQLRRPDLDPGPLGAYSIAEAAAVRGRFAKPVANPEAVLSGLSYAYHFDAGHYARFLRDFAEARGVRRVEGRIAAVERRGEDGFITGVTLDDGRRVEGELFADCSGFRSLLLGEALGVPYRSWQHWLPCDRALAVQSEPTAPLLPYTRATADVAGWRWRIPLQHRTGNGHVYSSAHLGDEAAREALLAGLDAPALSQPRMLRFVAGRRERLWDRNCVAIGLSGGFIEPLESTSIHLIQQGITRLLSLFPDTGFAEGEVAAYDRLMVEEYEHIRDFIILHYHATARRDSAFWRDVAAAELPDSLAERIELWRGKGRLLPIPNGLFTEESWLAVLIGQGILPTGSDPFAAILPAGETARFMAHLRHVVARTAEAMPFHEDFLGGDARIEPQERLRA

SEQ ID NO: 82851 - protein, 144 aa, Shewanella psychrophila
  REGION 1..144: note = tr|A0A1S6HTF7|A0A1S6HTF7_9GAMM Tryptophan halogenase; OS = Shewanella psychrophila OX=225848 GN=Sps_03681 PE=4 SV=1
MARDSGWQWRISLQHRVGNGLVYCSRFISDEDAIASLMDNLESAVITEPRVFKYKTGSHRIELFKDTACVFLTETELFRIDFWTQVMLGQGIMPKHYHRIVDNMNDTELKRFLASLKQMVDKQVTQMPSHQDFIDQYCKSPQLA

SEQ ID NO: 82852 - protein, 527 aa, Maricaulis maris
  REGION 1..527: note = tr|A0A495DDJ5|A0A495DDJ5_9RHOB Flavin-dependent dehydrogenase OS=Maricaulis maris OX=74318 GN=C7435_1538; PE = 4 SV=1
MNQTCNSILILGGGSAGWLTAAYLARRLGSGRPDGPTITLVESPNVPSVGVGEGTLPSLRLTLATLGVDEAAFMRASEATFKQGIHFSGWSQSPDGSPASYFHPFNSPRQLGGIDLAPYWSLGAAGKGDSYTRAITPQHDVYTAMKAPKRLEDAPFSGPLNYAYHLDVHRFGEFLKAYALGLGVKHVSDHITAVERAETGDIAGLDGEASGRLTADLYVDCSGFKARLIGDALGEPLVPVGDSLFCDRAVAIQVPWERPDAPLPSATISTAHEAGWTWDIGLRQRRGVGYVWSSAHSDADAAETILRRYVGQDADDHPVRHLTMTTGFRRRQWVGNCVAVGLSAGFLEPLESTGILLIEAAAHLIADNLPRRGDFAPAARHFNSAMGQRFTCAVDFLKLHYALSNRRDTAFWRDNADPASWPLSLRDKLDRWQVRLPNAHDLDSAHDSFRHINYAYVLIGMGAAPDLAGDRARYPFMSEASAEFARIQDATGRAMAALPDHRTLVESLQTHRFGAAAPRTASMGGAR

SEQ ID NO: 82853 - protein, 499 aa, Rheinheimera sp.
  REGION 1..499: note = tr|A0A3S2UHI1|A0A3S2UHI1_9GAMM Tryptophan 7-halogenase OS=Rheinheimera sp. YQF-1 OX=2499626; GN = EMM73_15775 PE=4 SV=1
MPTPIRHLVIAGGGAAGWMTAAMLSKLFPHHLQITLVESEEIGIVGVGEATIPPILLFNQALGITEADFIRATQGTFKLGIQFENWGQQGDKYMHAFGDIGKDLGLTSFHHFWLRAQQQGVTDSYWDYSPCYQAARRNKFAPLHQLPGTPFKQLSYAYHFDASLYAATLRRLSEQQGVTRIEGKIASVTQHQTSGDIQTLVMENGQVIQGDLFIDCSGFKALLAEQTLKTGYEDWSRWLPCNRALAVPSANCSAAVPYTRAIAHQTGWQWRIPLQHRTGNGVVYCSDFLSDESAQQHLLSNLEGKALAVPRPIRFTTGRRKQQWHKNCISLGLASGFLEPLESTSLHLIQSGIIRLAKLFPSTTDYASQRDQYNRQSVTEFEQIRDFIILHYHQTQRDDSEFWRYCRTMSIPDSLSHKMELFRQSAVVQREQDDLFSEVAWQQVMLGQNLKPQYYHPLANQVPAEKLQQFMTDLKLIVADIVGKLPSHQASIEQLLARA

SEQ ID NO: 82854 - protein, 506 aa, Pelomonas sp.
  REGION 1..506: note = tr|A0A397QT69|A0A397QT69_9BURK Tryptophan halogenase; OS = Pelomonas sp. BT06 OX=2135721 GN=C8K28_4702 PE=4 SV=1
MKTRRIAIIGGGTAGWLAANHLGYELCADAEVEITVIESPDVPIIGVGEGTVPAIKTSLRKFGISEADLLVACDTTFKNGIKFQGWLDAAKHGEGHFYYHPFASPFPDGLDITPAWLEQQQRPFSDVSISTRVAEAQRCPKQISSPPYAGEVEYAYHVNAHKFAALLAENAQKRFRVRHLFATVVDAERAADGSIAALRMASGEIAPFDFYVDCSGFASLLTQRVLKVPFVDKSHQILTDTALVQQVPTNPDEEIPPYTLAVAHEAGWIWDIPVTHRRGTGFVYASSHMSESRAIECYARHLGVSPDTLAPRRIPMKIGYRQQFWFQNCVALGLAQGFVEPLEATSILVTDFSANLLSRNFPRMRDDAQALRHGYNEAVTYTWERVIDFVQLHYHLSDRGDSSFWLENRHEAHLSDLLRERLARWAIRHPQKNDFSSRFDLFDVDNHLYVLYGMRFATRPLPISDFERRESLEQFEHVTRAVEQAVRTLPSHRDWLVGLRAAYQRP

SEQ ID NO: 82855 - protein, 481 aa, Asticcacaulis benevestitus
  REGION 1..481: note = tr|V4NC16|V4NC16_9CAUL Uncharacterized protein; OS = Asticcacaulis benevestitus DSM 16100 = ATCC BAA-896; OX = 1121022 GN=ABENE_22660 PE=4 SV=1
MLAKTLGTEIFNITLVESEEIGTVGVGEATIPPIQLFNEILGINEDEFVRETNATFKLGIHFLDWRKPGVRYFHPFGQYGVDMDGIGFNAFWLRMAQMGGDGDYGRFNAETLAAGQNRFGRTQKSLTSILPDINYAFQFDASQYAAFLRRYSEARGVKRIEGKIATVTQHPENGFIKSVQTEDGRIIEGDFFLDCSGFRGLLIEQTLKSGYEDWSAWLPCNRAVAVPCEKAPGPIAPYTRATAREAGWQWRIPLQHRTGNGYVFCNEFIGEDEACDNLLACLDGKPLKDPKVLSFVTGHRKKIWNKNVLALGLASGFLEPLESTSIHLVQTCLTRFLAMMPKRDIDDATVDAYNQIVLAEYVNIKDFLIAHYNVTEREDTPFWKYCKHMSIPDSLKARLDIFARQGNANVRPTELFKESSWFAVLLGQGLVPRDYHPVADVISEADLKRRLDKIRANITERVKGLPTHNDFIARYCASRTS

SEQ ID NO: 82856 - protein, 504 aa, unidentified
  source 1..504: note = Sphingobium algorifonticola
  REGION 1..504: note = tr|A0A437J8T7|A0A437J8T7_9SPHN Tryptophan 7-halogenase OS=Sphingobium algorifonticola OX=2008318; GN = ENE74_06500 PE=4 SV=1
MREQTRQPAPLPRRIVIVGGGTSGWMAAAAFSRFLGEGWYVRLIESEDIGTVGVGEATIPQIQHFNAGLGIDEADFVRATQGSFKLGIVFADWLRPGHRYIHAFGGIGRPLGLIAFHHYWLRHCVQDGADDLWAFSATAQAAAQNRFGPAPAIAHAYHFDASLYAAYLRRYAEARGVERIEGKVVDVTQDSASGDIVSVTLDGGLSVEGDIFVDCSGFRGLLIEGALNSGYEDWRHWLPCDRALAVPCESVSPITPYTQSTARAAGWQWRIPLQHRIGNGHVYCSDHMSDDEAARILLDNLDGPALADPRPLRFVTGKRRQIWKNNCVSLGLASGFLEPLESTSIHLIQAGIARFLQYLPGETVDTADRDAFNAQMDFEFASIRDFIILHYHATEREGPMWQHCREMALPDSLAQKIALFRANGRIARFNEELFTETGWLQVLWGQGIRPRGWHPLADALSEADLAEFMMLAKAQASQQAAALPTHEAYIAAHCAAPIPQRIPA

SEQ ID NO: 82857 - protein, 488 aa, Pelomonas sp.
  REGION 1..488: note = tr|A0A397QW36|A0A397QW36_9BURK Tryptophan halogenase; OS = Pelomonas sp. BT06 OX=2135721 GN=C8K28_3303 PE=4 SV=1
MIPPKHIAIVGGGTAGWMTANLLRHRWAGLGVDVTLIESADIGTVGVGEGSTPFMRHFFRTLGIEERDWMPACDATFKSSIRFPGWSRVAGYESYVHPFFSEADRELGNLFFTNACLRRRGQAADANPQDFFLAAELARQRRAPLGTDYAYHFDAGKLGGFLREHAVGLGVRHVVDTVARVEQHENGDIAAVHLKSGARIAADLFVDCSGFKGLLITETLGEPFHPYRDNLFNDRAIAIPTPLVDNEDIPCETVSTALRHGWAWQIPLTTRYGNGYVYSSDFVSDDEAERELREHLGAAAEGATARRLRMRVGRVKQHWRQNCVAIGLAQGFIEPLEATALMLIQLSVEQFIAALEDDGFGRARQSAYNERVNAMFEGVRDYVVAHYQLNTRRDTDYWRANRANRNISDRLASLLDVWDRGGDFEAELERHGAGLMYLRPSWYCLFAGMGRFPAELRAAPQTITAAQAQERLNQMVRAFASHRAHLTA

SEQ ID NO: 82858 - protein, 515 aa, unidentified
  source 1..515: note = Thalassobius activus
  REGION 1..515: note = tr|A0A0P1IV03|A0A0P1IV03_9RHOB Flavin-dependent tryptophan halogenase RebH OS=Thalassobius activus; OX = 1715691 GN=rebH PE=4 SV=1
MTKSDPTHLVIVGGGTAGWLAAHLFKTESERQGIPMRITLVESSKVPTIGVGEGTTSVFGGVLQSLGFDEEDFLAHTDATIKYGIRHRDWRRLGHVYDGPIDDAYALTDRIPGAGSWIDTFCVAAGRSVSAPHIFAKLMETGKAPVAEMGGRRVPVSRFHHAYHFDQAKVGAYLRRKATDISKIDALVESAERDGKSGCVTKLRLDTGETIAGDFFIDCTGFRRTLIQGTMGASWVSYSDALPVNRAMPFWLDLAEDEEIPTFTHAWAQASGWMWQIPTQGRIGCGYVYSDRHSSPDIALAEIEGVLGRKIEPRADIPVDAGRISEVWRGNVLALGLASSFLEPLEATSIHGTIVAVLLFCRRHLLQISAPLQKNQQRYNAAIAKQVDDFRDFINLHYVSERDDSPFWRDVATDFILPQVRQKLINWQERMPGPEDFTNDLDGLPHVEELLHYPVLDGLGLLNRSVARERMAQDRKLRDFARATVDHLEKQAGNVASHAISHRAWLSSLSSNAIA

SEQ ID NO: 82859 - protein, 500 aa, unidentified
  source 1..500: note = Unknown
  REGION 1..500: note = tr|A0A0N0J8C9|A0A0N0J8C9_9PROT Tryptophan halogenase; OS = beta proteobacterium AAP51 OX=1523421 GN=D621_18585; PE = 4 SV=1
MTLEPVRNIVIVGGGTAGWMTAAMLSEVLEGRYAMRLVESDEIGIIGVGEATIPRIIEFNTALGIDEDEFLRATQGTFKLGIEFVNWGAIGDRYVHGFGFVGQATQALPFHHFWLRMAQLGRAQPLDAYSINTAAPRAGKFMRARKDMPGSPVADISHAFHFDAGLYARFLRGLAEGRGVRRTEGKIARVSQREPDGFIDAVVMESGERIEGDFFIDCSGMRGLLIEQTLKSGFDDWSHWLPVDRALAVPCASAGPLLPMTRATAHRAGWQWRIPLQHRTGNGHIYCSSFMGQDEATDILLQHLDGEPLADPRPLKFTTGRRRQFWNRNCVAVGLSSGFLEPLESTSIHLIHTAITRIIGFFPHAGFDAADIAEYNAQTHWEYERIRDFLVLHYKCTERDDSEFWNYCRTMPVPETLQRKMDLFRSNGRVQRDGLELFAESSWLQVMVGQRLMPKAHHPFADLRSEDEVAAYVQHIALVIDKCVKAMPTQAEFIAQHCRA

SEQ ID NO: 82860 - protein, 481 aa, Asticcacaulis benevestitus
  REGION 1..481: note = tr|V4Q205|V4Q205_9CAUL Uncharacterized protein; OS = Asticcacaulis benevestitus DSM 16100 = ATCC BAA-896; OX = 1121022 GN=ABENE_09560 PE=4 SV=1
MTAAFLTRFFSPLQMSITLIESTEIGTVGVGEATIPPIRAFNHSLGINEAEFMRATQATFKLGIEFRGWREPGHTYMHPFGYTGAKINGQSFHPFWIRARQMGQGHAFAEYSLNTLAAYAGKFDWPSADPSSPKSTLAYAYHFDAALYAAYMRRLSETRGVQRLEATITHAKRSAEDGGIDTLCLSDGREVAGDFFFDCSGFRALLIGEAMNVPFEDWSNHLPANRAVAIPSGVSQDILPYTQATAQSAGWHWRIPLQHRTGNGYVYASDFISDEAAAASLLQALDAPPMADPRVLKFTTGHRKAFWVKNCLAIGLSGGFLEPLESTSIHLIQNALTRLSSVFPTRRIDGVSARLYNRVMSEEFETIRDFLIFHYHVNGRQGEPMWDYLRHMSIPSSLAEKIDLFCERGLTSFPNQTVFQEENWMSVMLGQGLVPQTFDPLVGAVPDAGMLAALKQIHQTCLQTLSEMPAHTVALKKAQTP

SEQ ID NO: 82861 - protein, 514 aa, Xanthomonas gardneri
  REGION 1..514: note = tr|F0C4Y3|F0C4Y3_9XANT Pyridine nucleotide-disulfide oxidoreductase OS=Xanthomonas gardneri ATCC 19865; OX = 925777 GN=XGA_1944 PE=4 SV=1
MHVQERIDMIPAPLRNIVIVGGGTAGWMAAAAFARVLGPGFNVQLIESEQLGTVGVGEATVPHIKAFNNLLGINEAEFVRQTQGSFKLGIEFVDWQRPGTSYIHGFGTQIGHPLGLLPFHQYWIKQHLRGKAQPLGAYTLNTVAAVRGKFMTSAGDVPANSPLANIAYAYHFDASHYARFLRSYSEQRGVTRIEGMIEQVQLHPNTGHVQSLQLASGQVVSGDLFIDCSGFRGLLIEEALHTGYHDFTHWLPCDRALAVPCEKVGPPTPYTRSTARAAGWQWRIPLQHRTGNGYVYSSAHISDDEAAATLLANLDGKALADPRPLRFTTGRRKQFWNRNVVALGLASGFLEPLESTSIHLIQAGISRLLELFPREGISPVLVQRYNDRLAFEFDRIRDFLVLHYHATERDDSAFWRHCRTMPITPELQTTLDLFRDSGRFYRNAEEMFAEISWVQVMVGQGVLPQGYHPLVDQVPDRDAEGFLTSIAQTIGHCVDVMPTHQQFIDRYCRAAALP

SEQ ID NO: 82862 - protein, 506 aa, Pelomonas sp.
  REGION 1..506: note = tr|A0A397RUM2|A0A397RUM2_9BURK Tryptophan halogenase; OS = Pelomonas sp. BT06 OX=2135721 GN=C8K28_3102 PE=4 SV=1
MMPGRINTLVIVGGGTAGWMTAAALAKVTHGRVKITLVESEEIGAVGVGESTIPMIRLFNQMLGIAEDEFMRETQATFKLGIEFRDWGALGDCYLHAFGQIGHRSRILPFHHYWLRMHQAGKAADLWAHSINGAAMRAHRFMRADASLGHSPLAEIVHAFHIDAGLYARYLRRYAERLSVQRTEGRVLDAQLHENGHVRSVRMASGELIEGDLFIDCSGFRGLLIEQTLKTGYEHWNHWLPCDRAVVVPSRSDPDLLPFTRATARPAGWQWRIGLQHRVGNGHVYASQAMGDDEAAALLLRNLDGEALAEPRVLRFESGRRRKVWNRNVIAIGLASGFMEPLESTSIHLVHSAIARLIQFFPDAGFNPADIAEFNRQSDFETERIRDFLILHYHATSRSDTHFWNHVRTMDVPDTLQAKLDLWRASGRIVRHGDELFSEVGWLQVLHGQGLQPRGHHPLADALPESEINDYLEDTRAVIQRCVAQMPTHAGFISAHCAATKDLETC

SEQ ID NO: 82863 - protein, 518 aa, unidentified
  source 1..518: note = Alteromonadales bacterium
  REGION 1..518: note = tr|A0Y3N6|A0Y3N6_9GAMM Putative tryptophan halogenase OS=Alteromonadales bacterium TW-7 OX=156578; GN = ATW7_09116 PE=4 SV=1
MNQQNKKIKAVVVVGGGIAGWLTAGRLAAHHKSNTPDGLNVVLVESPNVPIIGVGEGTWPTMRSTLIALGISETDFIRECEASFKQGAKFAKWVDGSEDDFYYHPLVLPQGFSKTDMAGHWLNNTAESTSFSNAVCYQEAICEQGLAPKTIRTPEYAAIANYAYHLDSAKFAVFLQKHCTQQLGVKHILADVTQVNSADNGDIASVITKQQGEISGDLFVDCTGFSSLLLGEHYKVPFMPCDDVLFIDTALAVQVPYENDDENIASHTISTAQEAGWIWDIGLQHRRGVGYVYSSKYSSEAQAREKLKAYVGDKIESLTIRKIPIKSGHRSHFWQNNCVAVGLSAGFLEPLEASALVLVEMSAQMISEQLPQTRDIMDITAKRFNETFTYRWEKIIDFLKLHYILSTRDDNAFWRDNRDPKTIPQSLQDLMKLWQYRAPADHDFTSNNEVFPAASYQYVLYGMGFKSDYSTTTYMLKDTVFAKSQFDKNKSMINQAVTNLPSNRELLNKIKHHGFSAI

SEQ ID NO: 82864 - protein, 527 aa, Rheinheimera sp.
  REGION 1..527: note = tr|A0A3S2TIJ3|A0A3S2TIJ3_9GAMM Tryptophan 7-halogenase OS=Rheinheimera sp. YQF-1 OX=2499626; GN = EMM73_18885 PE=4 SV=1
MLDADKAADRTVQTVVIVGGGNAGWLTAGRIAAKHKAKAGGIKVVLVESPSVAPIGVGEGTWPTMRSTLIALGISETDFIRECDATFKQGAKFARWVTGAEEDFYYHPLVLPQGFSKADMAAYWLQAQSKPELAPQFSSFSNDLCYQEAICERSLAPKTIRHPEFGAVANYAYHLDSGKFGLFLQKHCTEQLGVEHILDDVTAIQSAANGDIAAVQTKNSGLIAGDLFVDCTGFSSLLLGKHYQVPFKACDDILFIDTALAVQVPYPNEDAPIASHTISTAQDAGWIWDIGLQHRRGVGYVYSSKHCSEEEARATLARYVGPAISDLKVRKIPIVSGHRTEFWKNNCVAVGLSAGFLEPLEASALVLVEMSAQMISEQLPANRQVMDIVAKRFNQTFLYRWDKIIDFLKLHYILSKRSDTAFWRDNRKPETIPQSLQELMQLWSHRAPCDLDFTSNNEVFPAASYQYVLFGMGFKPNLSAQQYLLDNWDFATQQFQQNRKMIEQAVSTLPTHRELISKIRHYGFSRI

SEQ ID NO: 82865 - protein, 536 aa, Pelomonas sp.
  REGION 1..536: note = tr|A0A397QST6|A0A397QST6_9BURK Tryptophan halogenase; OS = Pelomonas sp. BT06 OX=2135721 GN=C8K28_4708 PE=4 SV=1
MADTATIFNQQVAARPSSGSTDKPPPVQHVCVVGGGTAGWMTALMLATSAYGPRLKVTVLESPQVGIIGVGEGSTPWLRGFFDGLGIEESAWMPACNATYKSGITFEHWSTKPGFERYFHPFASMLDNMTMHQFVDNVHARLDGADVHAHPDRFFVAAALARQGRGPRPSHNFPFDLWYGYHFDATLLGQFLGRQAVARGVRHLERHVTQVQLTDNGDIGRLQLDGGETLAADFFVDCTGFASLLIGKALQTPFIPYAENLFNDSAIAMPTPLEGAIESQTTSTALRHGWAWKIPLTNRRGNGYVYSSAHCTADEAETELRRHLGLLDADVPARHLKMRVGRMEKQWRRNCVAVGLSQGFIEPLEATALLFVQRTAAALVEALELGDLGPAAQDRFNEGMRVRFENTRDYIVAHYKTNSRTDTDYWRANAENMHLSESLQGVLMTWMSRKPLAAGLKAGRFGQGYPIVSWYALLAGMGIFPDAADLQPPTPHQARHRLDAVDDFVTRSAMNFPDHRELLADIPPRVGDKTLQLYLW

SEQ ID NO: 82866 - protein, 497 aa, Pseudoalteromonas sp.
  REGION 1..497: note = tr|A0A0Q0FAF2|A0A0Q0FAF2_9GAMM Flavin-dependent tryptophan halogenase RebH OS=Pseudoalteromonas sp. P1-25; OX = 1723758 GN=rebH_2 PE=4 SV=1
MKPIKHVVIAGGGTAGWITAALLNKVLGKVIKITLIESSTIGTIGVGEATIPPIIQLNNALGINEQDFINTTHASIKLGIEFENWKNTSHSYMHAFGSFGKDFPFCDFYNFWIKGKITGSENSLWDFSLNYQAAKKHKFAPLNTIPNTQLPGLSYAYHFDATLYAEFLKNLAVARGVEHVDAKIEQVEQCPLSGNIKSLTLDNSQQINGDLFIDATGQRALLIEQTLNTGFVDWAHYLPCDSAVAVQSKGTDELKPYTRSIAHSAGWQWQIPLQSRIGNGLVYCSRYLSDDAATQLLLNNLSAELITAPRVIKFKTGRRLKQWHRNVVSVGLASGFLEPLESTSIHLIQSAVTRLIKLFPHNGISDALVTEFNRQSVTEIEHIRDFIILHYKLTEREDSPFWRQCKQMDIPDSLAHKLELFKETGKVVRENDELFAEVAWQQVFIGQGLIPEDYNSIVDSLSSEQLNDLFSTLNTLITSTVEQLPTHKEFLAKIKKA

SEQ ID NO: 82867 - protein, 498 aa, unidentified
  source 1..498: note = Planctomycetes bacterium
  REGION 1..498: note = tr|A0A5C5WB58|A0A5C5WB58_9BACT Tryptophan halogenase; OS = Planctomycetes bacterium KOR42 OX=1938619; GN = KOR42_41080 PE=4 SV=1
MTHWDVVILGASFSGSLIAAILAKNGLNVALVDSATHPRFAIGESSTPSADLILSSLVQDYELDELAPLCRYGSWTQTYPEIRCGCKRGFSYVWHGGDSGYQATANHNCELLVTASESNELADTQWYRTDIDQFIFEQAINLGASDWTSSTIETIQHVEPQSWSLAVTRAGQTERMRADFLIDTSGASGVLLSSLDIADVTQLLRTNTAAVFSHFDHVPSCEDWLAQSQARTKDFPYSIDHSAVHHVTEEGWLWQLRFRGGPTSVGFVTTPDSSEFREMKPIFETGQWDHPKNRFPASLFGGSQCSSIPGQVFSTGRLQRLRESGAGPDWAALPSTVGFIDPLHSTGIAHSLSGIQRLAKIILSGNSTSAREQLQAYSQSILTEHRLIDEMVSGCYRSLWSFELFSAWTMVYFAAATTFEKNYNSGRRDFLCSDDSSFLKTVSRLSQSLDQLNASGRCEKRIVEHLNFLRDQLAPYNHVGLFEPSIPGMYARTAAEKT

SEQ ID NO: 82868 - protein, 510 aa, Stenotrophomonas terrae
  REGION 1..510: note = tr|A0A0R0D0V7|A0A0R0D0V7_9GAMM Tryptophan halogenase; OS = Stenotrophomonas terrae OX=405446 GN=ABB27_00750 PE=4; SV = 1
MDAAKTHDGARIRKVVIAGGGTAGWLAGCALSHQFRDQLDITLVESEQIGTVGVGESTVPPIRTFHRFLQIDEQEFLRAVAGTFKLSISFENWRRPGEHFFHPFGTIGKGTWATPFHHFWLDSLRRGMPSDLGDFCLESVASRDDRFSLQTQPQASYAYHFDAGLYAKFLRRKAEGHGLRRVEGKIREVRQHAHDGSVQSLVLEDGQVIEGDLFIDCTGFRGLLTEQTLHTGYEDWHQWLPSDKAVAVQTEAVGPPVPYTRAIAHEAGWRWHIALQHRVGCGLVFSSKHMSDDEAHAKLLRDVGAPPLRDPWLVPFRSGRRLKAWNKNVVALGLASGFIEPLESTSIHLTISAVVRLIQLFPFDGISPSLVDLYNDVSRAEMEHVRDFIILHYHATQRDEPMWKACREMELPASLELRLRAWRERAHAWQDPGELFRVESWTSVLLGQGIQPGSPHPLARSLGDADLRTLLDGIRQPVWQAAAQMPSQADFIERYCKAEAEVWRPSVAMA

SEQ ID NO: 82869 - protein, 477 aa, Amycolatopsis lurida
  REGION 1..477: note = tr|A0A2P2FF85|A0A2P2FF85_9PSEU Tryptophan halogenase; OS = Amycolatopsis lurida NRRL 2430 OX=1460371 GN=BB31_41855; PE = 4 SV=1
MSSPQYDVIVVGGGPAGSTVSTLVSKAGHRVLLLEKEKFPRYQIGESLLPATVHGVIPILGVEKEVAEAGFTVKRGGTFKWGKRPEPWTFEFAVSSKMPGPTSFAYQVERMKFDDILLRNARKHGVEVREESSVVKAITDETGRVRGVHYKDSDGKVHEVFARYVVDSSGNTSRLFKASGAERHYSPFFRNLALFTYFEGAGRLPAPNAGNIFSVAFEHGWFWFIPLSPDLTSVGAVVHQDSAELVQGDPDEAMRRFIDACPRIKDILGDAKRITEGPYGSYRVRKDWSYCNSRFSGPGMVLVGDSACFVDPVFSSGVHLATYGGLLAARSINGCLAGTVDEDAAFAEFEKRYRREYGLFHEFLIGFYDMNKSEDSYFWQARKVSESASNDVEAFVELVGGVASNDLRLTADDLAATVESVEHKPGGAANGTVLTRMLKAGAGLQGRALLGSRSGEGAALEPGGLRASDDGLSWVRS

SEQ ID NO: 82870 - protein, 504 aa, Pelomonas sp.
  REGION 1..504: note = tr|A0A397S2G2|A0A397S2G2_9BURK Tryptophan halogenase; OS = Pelomonas sp. BT06 OX=2135721 GN=C8K28_0440 PE=4 SV=1
MDAPRRIVIVGGGSAGWMSAAALAARLGQGAWQITLVESDEIGIVGVGEATIPPIRGFNARIGLDEDEFLRETGGTFKLGIEFVNWGARGERYMHAFGDIGRPLDELPFHQHWLRLGSEVPLAEFSINNLAALAGRFMRPRPDMAGSPLAEIAYAFHFDASRYAALLRRHSEKLGVQRIEGRIARVEREGDHIHRLHLHNGAFVEGDFFLDCSGLHALLIGQTLGVAFEDWSNWLPCDRAWAVPTASHGPLLPFTRATAHDAGWQWRIPLQHRVGNGHVFASAFTDEAAARDTLMRNLDAEPLAAPRLIKFRTGRRQQAWVGNCVAIGLSSGFLEPLESTSLHLIQSAVLRLIDLFPSAGLEAADIAEYNRQTAAEMASVRDFIILHYKLTRRDDSPFWRHCRAMAVPESLQARMDLFASHGRLFRQGQELFSEPSWLQVLIGQGPRPRGHHPLADTRPREQVQAFVADVRHVVRRCVDVMPTHADFLADINAVNQRHPSPHET

SEQ ID NO: 82871 - protein, 510 aa, unidentified
  source 1..510: note = Sphingomonas spermidinifaciens
  REGION 1..510: note = tr|A0A2A4B436|A0A2A4B436_9SPHN Tryptophan halogenase; OS = Sphingomonas spermidinifaciens OX=1141889; GN = COC42_13455 PE=4 SV=1
MSGGAGPIRDVVIVGGGTAGWMIAAAAARFLDDGQRRITLIESDAIGTVGVGEATIPPILNFNALLGIDEAEFVAVTRASFKLGIEFVGWGRAEDRYIHPFGTYGRDIHGVAFHQLWRKFAGRPGVGRIDDYAMSIAAARAGRFAHPAADPRDPRSQLAYAYHFDAGLYAAFLRRRAEAGGVARIEGRIAGVDRDAASGNVLAVTLDDGRRVEGELWIDCSGFRSLLLGETMGVPFVDWSHWLPCDRAWAVPCVRVDPLLPYTRSTARPAGWQWRIPLQHRTGNGHVFSSAFMTEEAALDLLLTNLDTAPTAEPRLLRFTAGRRTDPWRGNVVALGLAAGFLEPLESTSIHLVQHGIQLLFALFPDRSFAGIERAEYNRLMTAQFDAIRDFVILHYHATQRTGSPFWDHVRTMPIPDTLAAKIALFREKGRVFRYDDELFAVPNWTAVMLGQGIVPRGHDPVADSLDDARILAMMASHRRACAAAAAAMPDHDAFIDRLIGSSRGVSAGG

SEQ ID NO: 82872 - protein, 505 aa, Xanthomonas sacchari
  REGION 1..505: note = tr|A0A0A8DX80|A0A0A8DX80_9XANT Tryptophan halogenase; OS = Xanthomonas sacchari OX=56458 GN=SB85_11965 PE=4 SV=1
MIAAPLRNLVIVGGGTAGWMAAAALARVLGSAYRITLIESEQIGIVGVGEATVPHIKAFNNLLGINEAEFVRHTQGSFKLGIEFADWQRPGTSYVHGFGTEIGHPLGLLPFQQYWFKQALAGKARPLGAYTLNTVAAKRDRFMTSASDVPPNSPLANIAYAYHFDAALYAGFLRRYAEQRGVTRREGIVEEVQLHPESGDVRAVRLASGEAIAGDLFIDCSGFRGLLIEQALHTGYHDFSHWLPCDRALAVPCAKVGPPTPYTRATARAVGWQWRIPLQHRTGNGYVYCSAHISDDEAASTLLANLDGPALADPRPLRFVTGRRKQVWNRNVVALGLASGFMEPLESTSIHLVQSGISKLLELFPREGISPVLVRRYNERIAFEFDRIRDFLLLHYHATERDDSAFWRHCRTMPITPELQETLELFRDSGRFYRNGDEMFAEISWVQVMVGQGILPRAYHPLVDQVPQADLERFMASVEQTIGHCADAMPPHQAFIHRYCAAKPV

SEQ ID NO: 82873 - protein, 508 aa, Pseudoalteromonas sp.
  REGION 1..508: note = tr|A0A0N8TTN2|A0A0N8TTN2_9GAMM Flavin-dependent tryptophan halogenase RebH OS=Pseudoalteromonas sp. P1-25; OX = 1723758 GN=rebH_1 PE=4 SV=1
MNKAIKTIAVIGGGTAGWLSAAIIASYHQGNKGDGLKVMLVESSDIPTIGVGEGTWPTMKNTLQQIGLREVDVFKACNATFKQGGKFVNWTHGNNDFYYHPFTVPLGYGRIDLAPYLDNVENFAQQTNFQHDICEANLAPRGIAQGEYQANCNYAYHLDAGAFAELLKQHCKSKLGIEHIIGTVEQVKLDESGAINTLTLKDQTRTINADLYIDCTGFSSLLLGQALNVPFKKMDHVLFNDSALAMQVPYEEGDESLASHTIATAQNAGWIWDIGLTHRRGVGHVYSSKFLSDEEAEQNLRNYLGDAAKGLTARKINFESGYREKFWHKNCVAVGMSAGFVEPLEATAIMLVEISSRFVAEHMPADTQVMPIVAKRFNEQMDYRWQRIIDFLKLHYMLTKRPEPYWQAHVQPQSIPQSLQEDLLLWGARGPLIQDFHGALELFPAASYQYVLYGMGFKPDFTKQAYLYSNDAQANQIIERNSQLTQQMLQTLPPHRAYIEQWLAANPV

SEQ ID NO: 82874 - protein, 501 aa, Rheinheimera sp.
  REGION 1..501: note = tr|A0A437J828|A0A437J828_9GAMM Tryptophan 7-halogenase OS=Rheinheimera sp. YQF-1 OX=2499626; GN = EMM73_18735 PE=4 SV=1
MAFMHRIAIVGGGTAGWMTACLMAKAWPDADIRVIESPDIGIIGVGEGSTPSLKRFFQTLNIPDSEWMSACNATYKTNIEFVDWSPASGRQSYSHPFISQPDHFSERAFYSNCFSRRMGIDVETRPEKFLLNAYLAAAARAPVTPANFPFRIEYGYHFDAFLLGQFLRQKATEAKVQLMPLTIAQVVQQPNGDIKELVSQDGQSVSADLFVDCTGFGSLLMQQTLAVPFESFASNLFNDSAVVMPTAALAKLPVQTKATALSNGWAWQIPLQNRTGHGYVFSSAFITADQAETELRSHLGLLDADVQARHLKMNVGQLKQHWHKNCLALGLAQGFIEPLEATALHLVQTAVEIFIDQYSCSEATAAQQSRYNQLITERFDKVRDYIVAHYKLNSRDDSDYWRANRANTDLSDSLLQILDCWYRKNDLDQEIKRQQLNSHFGTTSWHCLLSGYGVYPAVAEPSTDINQRPDPFKQMQLEGFFSGCLLNFMPQNELLSIYQGN

SEQ ID NO: 82875 - protein, 509 aa, Xanthomonas sacchari
  REGION 1..509: note = tr|A0A0A8DYP2|A0A0A8DYP2_9XANT Tryptophan halogenase; OS = Xanthomonas sacchari OX=56458 GN=SB85_15250 PE=4 SV=1
MNLATTTDGRIRKVVIAGGGTAGWLAGCALAHQFRDRLDITLVESEQIGTVGVGESTVPPIRTFHRFLQIDEQEFLRAVAGTFKLSISFEHWRRPGDRFIHPFGTIGQGTWATPFHHFWLDSLRRGMPSDLGDFCLESVASRADRFSLETQPQVNYAYHFDAALYAKFLRKKAEGYGLRRVEGQIREVRQHAHDGSVASLLLEDGQLIEGDLFIDCTGFRGLLTEQTLHTGYEDWREWLPSDRAVAVQTEAVAPPVPYTRAIAHEAGWRWHIALQHRVGCGLVFSSRHLSDDEAHAKLLRDVDGPPLRDPWLVPFRSGRRLQAWNKNVVALGLASGFIEPLESTSIHLTISAVVRLIQLFPHDGISPALVELYNTVSRQEMEHVRDFIILHYHATQRDEPMWKACREMALPESLAIRLRAWRERAHAWQDPGELFRVDSWTSLLLGQGIQPGPPHPLAAAIGDADLRTLLTRIRQPLQQASAAMPSQAEFIERYCKATPDVWQRSVSLA

SEQ ID NO: 82876 - protein, 498 aa, unidentified
  source 1..498: note = Chromatiales bacterium
  REGION 1..498: note = tr|A0A520X1J6|A0A520X1J6_9GAMM Tryptophan 7-halogenase OS=Chromatiales bacterium OX=2026725; GN = EX272_11365 PE=4 SV=1
MPRKIVILGGGTAGWMAANLFVKRWTGEQVSVSLVESPDIGIVGVGEGSTPFLERFFRVLDVPDAEWMPRCNATYKLGISFAGWSPASGIERYSHPFLSQTDHFTERAFVVNCHRRRLGLDVNTQPDDFFINSRLVNERKGPRAPENFPFTIGHGYHFDSGLLGQYLGELAVSRGVQHVQAKIIDVEMAPDGMIAALLCEDGTRLAADMFVDCTGFASLLMQKSLGVRFESFKTNLFNDAAVVMPTPAEDAPRPETVSYAMSNGWCWKIPLTNRLGNGYVYSSDFLSADDAETELRTFLGTLDSDVDARHLKMSVGQLERHWEKNCIALGLSQGFIEPLEATALLLVQQAIEMFIARYEKGNFTPEFRDDYNAKVHERFERVRDYIVAHYKLNTRDDSDYWRANRDNMELSTSLRQILDVWYRRGDLAQEIQRQDIESHFTSMSWHCLLAGYGAFPPLAAEQPGKGDVYKEQNVAQFLSGCSLNFESHRNNLEAKRDS

SEQ ID NO: 82877 - protein, 504 aa, Asticcacaulis benevestitus
  REGION 1..504: note = tr|V4PBA9|V4PBA9_9CAUL Tryptophan halogenase; OS = Asticcacaulis benevestitus DSM 16100 = ATCC BAA-896; OX = 1121022 GN=ABENE_10870 PE=4 SV=1
MGKAGIRNLVIVGGGTAGWMAAAALSKVFGTQSYAITLIESDEIGTVGVGEATIPTIQEFNTLLEIDENQFMKETNASFKLGIRFLNWKHEGSDYFHPFGTYGVDMNVNFTHYWMRYHLAGGSGDFGLFNPQTLASRLNRFGRMAEINPKAPKVNYAFHFDASLYAKFLRRHSEARGVVRHEGKITSVVQHPDDGDITCVALESGKTIEGDLFIDCSGFRGLLIEQTLKTGYEDWSQWLPCNRAVAVPCDKVSGLTPYTTSTAREAGWQWRIPLQHRTGNGYVFCDSYLSEDQAMDLILQRLDGRPQADPRVIRFTTGHRKKQWNRNVIAMGLASGFLEPLESTSIYLVQEAIMKLLRYFPRDQITESARSSFNRDMLFAYDDVKDFLIAHYKVTERAETPFWAYCKHMDVPDSLRARLESFERHNQSLVKADELFKEASWFAVLAGQGLMPKSYHPIADLIAEDEFRWRMDRVKEGTAGLANAMPGHEAYIAKACPSLATGKA

SEQ ID NO: 82878 - protein, 510 aa, Maricaulis maris
  REGION 1..510: note = tr|Q0AL33|Q0AL33_MARMM Tryptophan halogenase; OS = Maricaulis maris (strain MCS10) OX=394221; GN = Mmar10_2724 PE=4 SV=1
MPVDPIRSVLIVGGGTAGWMTAAALAKIFGDQALDIRLVESEQIGTVGVGEATIPQILLFNRMLGIDENEFVRATQGTFKLGIEFVNWRREGHSYIHPFGSYGSDMDGVMFHHFWLHARQRGYEVDLPEFCLQIIAARQGKFLRPVPDARNSPLGHIAYAFQFDASLYAAYLRRYAEGRGVTRTEGRIANTRLDPETGHVQGVQLENGETIEADFFIDCSGFRGLLIEQALKTGYEDWSSWLPCNSALAVPSENTGPPSPYTRATARKAGWQWRIPLQHRTGNGHVYCSDHISDDEAANILLSNLDGPALRDPLQLRFTTGHRKKFWNKNVLAIGLSAGFMEPLESTSIHLIQSGIARLMTLFPDRAFNPVDIDEYNRLTLQEYDYVRDFLVLHYRQTERDDSEFWRYCRNLPLTDHLARKLALYQTNGRVSREKDELFNETSWLAVLDGQGVVPQGHHPLVTGLGDAEVDARLEQILGAVRASARQMPSHADFIANQCAAPADIQLFQA

SEQ ID NO: 82879 - protein, 504 aa, Asticcacaulis benevestitus
  REGION 1..504: note = tr|V4PWR0|V4PWR0_9CAUL Uncharacterized protein; OS = Asticcacaulis benevestitus DSM 16100 = ATCC BAA-896; OX = 1121022 GN=ABENE_09480 PE=4 SV=1
MSQGTIKKVVIAGGGTAGWMTAAWFSRILRDDFEEIVLVESEEIGTVGVGEATTPYIHVFNRHLGISEDEFVRFTKGTFKLGIEFVNWGRQGHAYHHSFGPYGRDYGALPFHAVWLRHYLENGADRLENYSLQSLASINGRFMRPTGANSPLAEIAYAYQFDASLYARFLRSISEAAGVVRLEGKIGRVNLGDSGAIESLSLEDGRCIDGDLFIDCTGFRALLLGEALGVGYIDWSRYLPCDRALAVPTARKGPPAPYTRSTALSAGWQWRIPLQHRDGNGHVFSSAFIDDTQAMDALLANLDSPPLADPRPIRFTTGRRETFWKKNCIAVGLSAGFLEPLESTSIMLIQNAILRLQYLFPDKDFSKADTAAYNAAMAREYEDIRDFLILHYKVGTRDDSEFWRYCRHMDIPEGLQNRIDLFSSRGRIPEERGEQFRTPSWLAVMIGQGLMPAAPEPLSLSIPSDAMKTWLSDLRSVIGNCLTRMPTHEDFIAQHCQARLSESA

SEQ ID NO: 82880 - protein, 283 aa, unidentified
  source 1..283: note = Chromatiales bacterium
  REGION 1..283: note = tr|A0A520X0E8|A0A520X0E8_9GAMM Tryptophan 7-halogenase (Fragment) OS=Chromatiales bacterium; OX = 2026725 GN=EX272_12230 PE=4 SV=1
FVSLLMDKTLGTDFEDWTHWLPCDRAIAVQTTAVSDPIPYTRSIARESGWQWRIPLQTRVGNGLVYCSEFMSDDEARDTLLANIEGELITEPRVLRFRTGQRVKHWNRNCVALGLAAGFLEPLESTSIHLIQRGVIRLLQMFPYGGIVESDRTEFNRQMDAEFRFIRDFIIMHYHVTERTDSEFWRRCRNMDIPDDLKHRLDLFRDSGRVFEAEFDIFRENSWTQVMLGQGIEPQSYHPIVDMMSEQELRQFMQIQGQKVDRVLQQLPTHQEFIDRYCPTTAG

SEQ ID NO: 82881 - protein, 504 aa, Pelomonas sp.
  REGION 1..504: note = tr|A0A397QYX2|A0A397QYX2_9BURK Tryptophan halogenase; OS = Pelomonas sp. BT06 OX=2135721 GN=C8K28_4270 PE=4 SV=1
MHQLDRIVIVGGGTAGWMTAAALSTVLRGRYRIQVVESDEIGIVGVGEATIPMIQRFNRLVGIDENEFMRETQGSFKLGIEFVNWGKRGDRYMHGFGRLGQDLWTVPFDQYWHRMRALGKAQALENYSITRMAAKANKFMPARTDMGNSPLADITYAYHFDASLYARYLRRLSEGRGVQRTEGKITHATRRGEGAHAGHVDAVVLESGERVEGDLFIDCSGFRGLLIEQTLQTRFEDWTHWLPCDRALAVPCESVAPLTPYTRATAHRAGWQWRIPLQHRIGNGHVYSSAHVSDDEAAATLLANLDGKPLADPRPIRFKTGMRKQAWTENVIAIGLASGFLEPLESTSIHLIQSTIQQLIDFFPDRGFDATDIAEFNRHSRFHYERIRDFVILHYHLNQRDDSAFWKDCAHMAIPDALQEKLDLFRTHGRVIRRDNELFSEVGWVQVMEGQNLVPQRHHPLAALQSEQDTHDYMESVREVIAKCVDVMPDHAAYIAQNCAAKPM

SEQ ID NO: 82882 - protein, 502 aa, Asticcacaulis benevestitus
  REGION 1..502: note = tr|V4PZN0|V4PZN0_9CAUL Uncharacterized protein; OS = Asticcacaulis benevestitus DSM 16100 = ATCC BAA-896; OX = 1121022 GN=ABENE_07260 PE=4 SV=1
MTNPAISSITIVGGGTAGWMTAALLSKLLMGRYAITLIESEEIGTIGVGEATIPAIKIFNDMMEIDEAEFLKATQGTFKLGIEFVDWREKGHSYIHGFGKIGVDRLWLHTHQFWLKMFPKGGFRDFDSYSMCTAAARKGRFAPPDARRGPPMSDLDYAYHFDASLYARYLRSLSEKRGVKRIEGRITDVVLKAESGFIDKVVLQSGQAIGGDLFIDCSGMRGLLIGDALGVGYQDWSQWLLCDRAYAVPSANPTQITPYVTCTTRDAGWQWRIPLQHRTGNGYVHSSAYTSDQQAVDTLMSTLGGPALGDPRLIKFRPGKRHQTWEKNCVAIGLSAGFLEPLESTSIHLIQTGLLRLLSLFPGQGFHAADIREYNTYSDDEYRDIRDFIIAHYKITRRDDTPFWAYVKHMEVPETLQRKIDLFQSSARIFKRGAFELFREESWVQVLLGQGMWPDYDPNVDMMTEADIAGYLHDIEAVIGEHTDAMPRHEDYINRYCKAASL

SEQ ID NO: 82883 - protein, 508 aa, Maricaulis maris
  REGION 1..508: note = tr|A0A495D506|A0A495D506_9RHOB Tryptophan halogenase; OS = Maricaulis maris OX=74318 GN=C7435_1829 PE=4 SV=1
MINPKTLDQVVIVGGGSAGWMTAAALSRLIGNGHTRITLIESEAIGIVGVGEATIPPIRHFNELLGLDERDFLRATQGTIKTAIEFVDWTRPGHTYLHPFGTYGADMNAVKFHQYWLKLRQLGQAEAFGEYNLCDVAARQNRFGPVARDRQSPVSSLHWAYHFDASLYARHLRRYAEQRGVQRIEGKVVDVHQRPEDGFIASVEMESGDRIGGDLFVDCSGFRGLLIEQTLKSGFEDWTHWLPCNRAIAVSSASAGELTPFTRSTARDAGWQWRIPLQHRIGSGFVYSADHLSEDEATSVMLDNLDGEPLNTPKPIRFTTGRRKQAWIKNCVAIGLASGFLEPLESTSIHITQAGISRLMALFPDKDFDPAGITEYNRQAEYLYRHIRDFIVLHYHANERHGVPLWDHCRNMAIPETLQRKLDLFRLKGRLFRYEDELFAESSWHAVLLGQNVMPDGYDPLVDAAPEDRIIDAFRQMHQAVAGAVASMPKHQTFIDQHCRAAMTAPPA

SEQ ID NO: 82884 - protein, 510 aa, Asticcacaulis benevestitus
  REGION 1..510: note = tr|V4NNK2|V4NNK2_9CAUL Uncharacterized protein; OS = Asticcacaulis benevestitus DSM 16100 = ATCC BAA-896; OX = 1121022 GN=ABENE_20280 PE=4 SV=1
MKIVILGGGTAGWMSAAALTRAFKPEFCSVRLIESDDIGIVGVGEATLPQVHDFNQFLAIDEAEFMRETNATFKLGIEFRDWAQRGDSYIHPFGVHGQAMGGVPFFQYWLRARQNGHDLNIEDYSYPIAACRHMKFDMPSDDEKSIRSTYSYAYHFDATLYAKFLRKWSEGQGLKRTEGQVVDVTLDAESGYIRALTLKSGEVVEGDLFIDCSGFRGLLISQTLKMGWEDWTQWLPCDRALAVPCERVGDLTPFTRATAREAGWQWRIPLQHRTGNGYVFSSQFTTEERAAEVLLANLDGKPLADPRLITFQSGRRQQSWYKNCIAIGLASGFLEPLESTSIYLAQIAASYLIELFPGKQIDPRISGEFNRLVDIEYERVRDFLILHYHATAGRDEPLWRHAQSMQVPESLVEKMAIFKRRGHVHRYKDGLFSPASWIAVYTGQGITPVGYDRQADNLSAYELLARLSEMKGRIDVNVAAMPSHADFVRDFCFDAKAASKAAMMGETAHG

SEQ ID NO: 82885 - protein, 507 aa, Asticcacaulis benevestitus
  REGION 1..507: note = tr|V4PP63|V4PP63_9CAUL Uncharacterized protein; OS = Asticcacaulis benevestitus DSM 16100 = ATCC BAA-896; OX = 1121022 GN=ABENE_14915 PE=4 SV=1
MTRSADHFVILGGGTAGWMAAACLSRLLFRVPGSPKRVTLVESAEIAPIGVGEATIPSIQDMLRYLNIDEADFVSATDATYKLGIRFRDWRVAGSDFFHGFGELGPTIENLPLFQHWLSEKIAGRPVPPLEALSMSAQLALNNRFAKPKQDGNSPLFMAGYAYHFDAAKVATYLRDYAEAKGVKRIEGHVAEVALAVDGSVNSLRLTDGRDITGDFFIDCSGFKGLIIEKALGSPFEDWSHWLPCDRAVALPSQSIAPLQPYTQVTARDAGWTWRIPLQSRIGNGYVYASRFCDAAQAEQTLRGALESQPLAEPRQIHFTPGRRREAWVKNCLSLGLASGFLEPLESTSIHLIFANLFRFFDHFPRDIDSAVLRQTYNDRSVREIEEIRDFLILHYWASARRDTPFWRYVTAMDIPDSLGAKLEAFRTQGKILADYYDLFKPASWMAIYDGMGFTPKAPDPLADLVPGDFSRRVLQNVTQGIRQAALAAPPHEASLAALLRRPLSPV

SEQ ID NO: 82886 - protein, 481 aa, unidentified
  source 1..481: note = Xanthomarina gelatinilytica
  REGION 1..481: note = tr|A0A3C0F4N4|A0A3C0F4N4_9FLAO Uncharacterized protein OS=Xanthomarina gelatinilytica OX=1137281; GN = DCM10_11115 PE=4 SV=1
MKNICIVGGGTAGLISALMLKQSLNIDITVIKSDKIGIIGVGEGSENKFTQFLKFCNIDKEEIIKETGATLKYGILFKDWTDKDFIHEVSPQVFDIRKEQYLAGFGYAITNNLQQNEYTQIDQLKDNKVVHQYISDQFHFNTFKLNKFLLKKCEQYDINIIEDEILDVEITNNNISKLVGEKTIHTSDFYIDSTGFKRLLISKLGAKWESYNKYLKLNEAIAFQTEDTDNYNVYTLAKAMKYGWFWRIPVYGRWGNGYIFDNNYINKDEAKQELERRLPKEIEIARHIKFDPGKVDKTWIGNCCAIGLSANFIEPLEATSIGTSINQSFLLAHYLHNYSELDIQDYNKKVNYIMENIRDFVCLHYMVKREDTEFWKDVKKIDIPLSLQNNLLKWQRRLPIREDFEQTQYLLFWAPNFTSVLHGIGFWENNKLSVIEEYNSYNANWSEKIRVAEHKRNNIFNNNKKIKHKDYLTYIRGQHEL

SEQ ID NO: 82887 - protein, 517 aa, Verrucosispora sp.
  REGION 1..517: note = tr|A0A4Q9CX60|A0A4Q9CX60_9ACTN Tryptophan 7-halogenase OS=Verrucosispora sp. SN26_14.1 OX=2527879; GN = EYA84_03005 PE=4 SV=1
MIRDVVIVGGGTAGWMTATYLKTAFQDRISVTLVESAAVGTIGVGEATFSTIRHFFDYLGLDEREWMPQCSGSYKLAIKYDNWRGDGSHFFHPFERLRTSDGFTAAEWNLALGDPTESFDRGSFITPYLCEAQRSPRMLDGSLFTASLDGELGRSTLDEQRAQFPYAYHFDAALMARYLTKLGVAQGVRHVVDDVVGVGQDERGWITHVSTRDQGDVTGDLFVDCTGFRGLLINQTLKEKFVSFTDVLPNNRAVALRVPRDMAEHGIAPYTRATAKDAGWIWTIPLYGRIGTGYVYSDEFCEPEEAERTLREFAAPGQDDLQANHIRMRIGRNERSWVNNCVAVGLSSGFVEPLESTGIFFIQHAIEQLVKHFPDNTWDETLIRGYNDKVARVIDGVKEFLVLHYVASPRQDTDYWRETKVRAIPDGLAERLETAAVRLLDESTIYPYYHGFEVYSWITICLGMGLAPKSPRPALAHIDPTRASAELAAIRADAERLVSTLPSAYEYLSTIQPAAEG

SEQ ID NO: 82888 - protein, 512 aa, Asticcacaulis benevestitus
  REGION 1..512: note = tr|V4PDK1|V4PDK1_9CAUL Uncharacterized protein; OS = Asticcacaulis benevestitus DSM 16100 = ATCC BAA-896; OX = 1121022 GN=ABENE_20270 PE=4 SV=1
MESKVRKIVIVGGGTAGWMSAACFAKALGTQGYDITLVESEEIGTVGVGEATIPAIIRYNRFLNIDEDEFIRETNATFKLGIQFVDWQKEGVSYFHPFGYFGVDIDGFTFPNYYLRDYYRRGGGVIDLGRYNAETEAALQGRFGRVKPENGKPDLNYAFQFDAALYARFLRKYSEARGVTRREGKIVKVHQNPETGYVTSVEQENGSQIAGDLFIDCSGFRGLLIEETLKCGYTDWSQWLPVNRAAAVPCERGDDLIPYTRATAREAGWQWRIPLQHRTGNGYVFCNSFISEDEASEKLLSRLDGKPMADPKILRFVTGHRKRFWDRNVVALGLASGFLEPLESTSLHLVQAGLFKFLALFPRQGFNPRIVEEYNRQMLFDYDNVKDFIIAHYKVTERDDTPFWNYVRNMEVPDSLRERLDVFRSTGQTLSNERELFREVSWYAVLTGQGLVPEDYHPAADTLDDDDIRLRLGRWRTAVVDRVKTLPMHEDFIRKSCASAALKQRDEARAGG

SEQ ID NO: 82889 - protein, 508 aa, unidentified
  source 1..508: note = Alteromonadales bacterium
  REGION 1..508: note = tr|A0XX27|A0XX27_9GAMM Putative tryptophan halogenase OS=Alteromonadales bacterium TW-7 OX=156578; GN = ATW7_15061 PE=4 SV=1
MNKAVKTVAVIGGGTAGWLSAALIASYHQSQNGDGLKVMLVESSDIPTIGVGEGTWPTMKNTLQQIGLREVDVFKTCNATFKQGGKFVNWTHGNNDFYYHPFTVPLGYGRIDLAPYLDNVVDYAQQTNFQHDICEASLAPRGIAQGEYQGNCNYAYHLDAGAFAEMLKQHSKSKLGVEHVIGTVDEVKLDNDGAIDTLTLKDQTRTINADLYVDCTGFSSLLLGQALNIPFKKMDHVLFNDSALAMQVPYAEGDESLASHTIATAQNAGWIWDIGLTHRRGVGHVYSSKFLSDDEAEQNLRNYLGDAAEGLTARKISFESGYREKFWHKNCVAVGMSAGFVEPLEATAIMLVEISSRFVAEHMPADTKVMPIVAKRFNEQMDYRWQRIIDFLKLHYMLTKRPEPYWQAHVDPDTIPQSLKDDLLLWESRGPLIQDFHGALELFPAASYQYVLYGMGFKPDFTKQAYLYSQDAQAKQIIERNSQLTQQMLQTLPPHRAYIEQWLAANPV

SEQ ID NO: 82890 - protein, 512 aa, unidentified
  source 1..512: note = Sphingomonas spermidinifaciens
  REGION 1..512: note = tr|A0A2A4B8X2|A0A2A4B8X2_9SPHN Tryptophan halogenase; OS = Sphingomonas spermidinifaciens OX=1141889; GN = COC42_07265 PE=4 SV=1
MTTPSRMRVVIAGGGTAGWLAAALLTRQLSALVNVTLVESEEIGTVGVGESTIPTVRAFHALIGLDEAEFMAATGATFKLGISFEHWSRVGDRYIHSFGDLGRSTWMGDFHHFWLEARAQGIAAELGDYCLEHRAAELGRFATGGETPLNYAYHFDAGSYARYLREACETAGLERVEGRIARVERDGESGHITRLHLADGRIVAGDLFLDCTGFRALLIGEAMGVGFEDWSHWLPANRALPVQTSSVEPARPYTRAIAHSAGWQWRIPLQHRVGNGLVYCSDYLSDDEAQARLYAQVEGERLVEPNPIRFRTGRRLQAWSGNCVALSLASGFVEPLESTSIHLVMIALTRLLQVMPLGGISPAAVARYNEQARRELEAIRDFITLHYYLNGRPEPFWVRCRTTPPPDSLTERIALFAEGAHAYQDTHDLFRVASWVQVMLGQRLQPKRHHPLGRIMPPDRLAGALNDIRSRVGQTVAGLPTHQVFLGSYLQRHGTSTSSAVMPPEQSGRFAP

SEQ ID NO: 82891 - protein, 519 aa, Rheinheimera sp.
  REGION 1..519: note = tr|A0A3S2U4U8|A0A3S2U4U8_9GAMM Tryptophan 7-halogenase OS=Rheinheimera sp. YQF-1 OX=2499626; GN = EMM73_03305 PE=4 SV=1
MLKSTLDEIVIVGGGTAGWLTAAILAKKLNAGKPGSVQITVIESPDIAILGVGEGTWPTMRTTLQTVGVDEGEFMRECDATFKQGAEFVNWQHTPVPGEKHSYFHPLSAVFHSSYDFNLAPYWLQGASDLPYDLAVASQSRICQLGLAPKKITTAAYSALQNYAYHFNALKFAAFMKKHCTEKLSVRFISGNVQQVSLHPCGAIASVSTDSAGEIKADFFVDCTGSKALLLGEALGVPWHGINDIIFNDTALAMQVPYPAPDWPIATHTIATAHEAGWTWDIGLHNRRGVGYVYSSSHSTDERAEQILRQHIGVQSEGLEARKIKLNLGYRQQFWRKNCVAIGMSAAFIEPLEASAIFLIEAAANMLADQFPRSSASLEFVEKKFNDTFKLRWDKSIDFIKLHYCISQRRDTEYWVDNCTDSSIPQSLQQRLAHWRLHPPGKYDFDYAFEPFVLDSYLFVLYGMKFNTDISHNLSSYSDIQSAHQLFAEIDRTTAILQQQLPTHRELLDKVYQYGMPKL

SEQ ID NO: 82892 - protein, 502 aa, unidentified
  source 1..502: note = Sphingomonas spermidinifaciens
  REGION 1..502: note = tr|A0A2A4AZR3|A0A2A4AZR3_9SPHN Tryptophan halogenase; OS = Sphingomonas spermidinifaciens OX=1141889; GN = COC42_13505 PE=4 SV=1
MTDRCEPIRSIVIVGGGTAGWMSAAYLARRLSHLPIAITVVDSAEIGTVGVGEATVPAIRDFLAAVELGEPDVLAATEGTIKYGIRFEGWGGEGHGFFHPFGLYGVPANGVAFHQYWLKLRAAGHDLPLGDYCLATQLAERGLFLPPSTQPGSDLGVFNFALHFDATRFAHLLRRLSLANGVAHIDGRIVDVERDDEGVRSVRLADGRAVESDLWIDCSGFRSLLLGEAMGVPYVDWRRWLPCDRAIAIPCRSARVHRPFTTATAHAAGWRWHIPLQHRVGNGIVYSGAHLSDEDAETRLRSTLEGEPIAEPNRLRFVTGHRARFWAGNVVGVGLSSGFLEPLESTSIVLVQSALERFVALFPDRGGDPRLAATYNRQSVLEFERIRDFILLHYWANHRTGEPFWDANRALELPDSLAERIDAWRAGGVFVRREWDTFQDPSWLSIYAGFELLPERVSPLADQMGESELLTALARMREAIDRAARTAEPHADFLARQRASAA

SEQ ID NO: 82893 - protein, 499 aa, Rheinheimera sp.
  REGION 1..499: note = tr|A0A437JQU9|A0A437JQU9_9GAMM Tryptophan 7-halogenase OS=Rheinheimera sp. YQF-1 OX=2499626; GN = EMM73_01065 PE=4 SV=1
MLEPIQTIVIVGGGSSGWMSAALLAKLTGQRYRIELVESEQIGTVGVGEATIPAIKLYNHLCGIDEQEFIRATGATFKLGIEFVNWGQKGDSYFHAFGALGRQWEWLSFYQYWLKLKQQGQALPFEHYCIASQMAQQHKFMPADPTKPKSPVSEIAYAYHFDASLYAVYLRKLSEQRGVIRHQGLIKHVERDAVSGHIRHLLLEDGRQVAGDLFIDCSGLRALLIGQTMGVGYDDWSHWLPNDSAWAVPSAALSELPPYTRATAHEFGWQWRIPLQHRTGNGLVFSSAYASDDLAQQRLLQKLEPQHSAEPRLIRFTTGKRKQMWVGNCVAIGLSSGFLEPLESTSLHLVQTAITRLVNLFPDRSFAQANTDHYNLLAAEEMEQIRDFIIAHYKVTERDDSEYWRYLKQMTVPDSLQQKLDIFQAYGRVHRVADELFREDSWVQVLLGQRLMPERYDPMVDNKTLAQIGDFAASTAGVITACVEKMPTHTNFLAGLAAH

SEQ ID NO: 82894 - protein, 507 aa, Maricaulis maris
  REGION 1..507: note = tr|Q0AL36|Q0AL36_MARMM Tryptophan halogenase; OS = Maricaulis maris (strain MCS10) OX=394221; GN = Mmar10_2721 PE=4 SV=1
MGQDAPRRIVVVGGGTAGWMAAAALVSVLPSQRVQVTLVESEAIGIIGVGEATLPHLRHFNETLGINEADFIKATSATLKLGIEFVNWARKGDSYVHPFGDFGTEIAGLPFHQAWTRMRAAGKARDIGAYSLPVRMCAANRFDRPAEDPADFASRFGYAYQFDATRYAPFLRQHAEARGATRIEGIVDTVHCDPETGDIERLDLKDGQEIEGDFFFDCTGFRGVLIEQALNVGYEDWSHWLPCNRAIALPSEKSGPTPPYTRATAHQAGWLWRIPLQHRTGNGHVYASDFIDDETARQTLLDNLEGAPLADPRPLRFTTGRRKQFWAHNCVSIGLAGGFLEPLESTSIHLTQIAITQFIELFPVDNDYTLERESYNAHMTREFERVRDFLILHYHATERTDSEFWNYVRTMPVPDSLTEKMALFRQTGRVGRYQQGLFLEPSWLAVYLGQRIVPQSWDGRLDTIPEESLGQSLTTIESQIDQAMSRMPDHDTWLANLAGVEAETRHG

SEQ ID NO: 82895 - protein, 515 aa, Pelomonas sp.
  REGION 1..515: note = tr|A0A397QYQ3|A0A397QYQ3_9BURK Tryptophan halogenase; OS = Pelomonas sp. BT06 OX=2135721 GN=C8K28_4878 PE=4 SV=1
MNTAMKPFNRVVIAGGGTAGWMMAALMSKLLGKRLDIKLIESEEIGTVGVGEATIPALHTFHNLLGINEAEFMAATNATFKLGIGFEGWKNIGENYFHSFGSTGNDHWSAGFQHFWLKGRAEGLSKTYTDYNPETVAAFANRFAHLPRSGLNYAYHLDAGRYAKYLRAMSESCGVKRIEGKIATVLMDGPQGRDGDITALQMQDGTRIDGDLFIDCTGFRAMLIGEALGMGYEDWSHWLPCDRAVAVQTASVREAWPYTRSICHPFGWQWRIPLQHRVGNGLVYSSKELADADAPEVLKKNVEGELLIQPRVLKFTPGQRHKVWERNCIAVGLASGFIEPLESTSIHLIQRTAIRLMQLFPTGGINPADVQEFNLQCERELVHIRDFIILHYHVTERTDSGLWNHVRTMELPATLKHRIELFRESGRVFRPSDELFAENSWVQVMMGQGLIPQSYHPVADLMGREELARFLGDIQLQVSRTVAGLPQHQAYVEQLCAPYRNATTAQLAATPLLRA

SEQ ID NO: 82896 - protein, 500 aa, Xanthomonas gardneri
  REGION 1..500: note = tr|F0C237|F0C237_9XANT FAD dependent oxidoreductase; OS = Xanthomonas gardneri ATCC 19865 OX=925777 GN=XGA_0900; PE = 4 SV=1
MTQAPIRKVVIVGGGTAGWIAACALSHQFRELLEITLVESEQIGTVGVGESTVPPIRTFHRFLQIDEQEFLRAVAGTFKLSISFEHWRRQGERYIHPFGITGQSTLVCAFHHLWLESQRRGMPGTFGDYCLETVASRVDRFALLREPAVNYAYHLDAALYAKFLRARSEAFGVKRIEGKIQQVTLQPDSGDVATLVLEDGQVLDGDLFIDCSGFRGLLIEQALHTGYEDWSHWLPCDRAVAVQTEAVGPPVPYTRAIAHQAGWRWHIPLQHRVGNGLVFSSRHLSDDEAHAKLLRDAAAPALKDPWLVPFRTGRRRKAWNKNVVSLGLASGFIEPLESTSIHLTIAAVVRLITLFPADGIAPSQVQLFNDISRAEMEHVRDFIILHYHATQRDEPLWRQCREMELPESLALRLRAWRERAHAWQGADELFRVDSWTHVLMGQGLIPAQHHPLARAVSDRDLHRLLDGIAQPIQRAVEQMPSQQAFIDAYCKAGASAWGAA

SEQ ID NO: 82897 - protein, 529 aa, unidentified
  source 1..529: note = Vitiosangium sp.
  REGION 1..529: note = tr|A0A2T4VP78|A0A2T4VP78_9DELT Tryptophan halogenase; OS = Vitiosangium sp. GDMCC 1.1324 OX=2138576 GN=DAT35_08860; PE = 4 SV=1
MGVATTRSSSEGVRPATTSGAGCTIAWRPTAGSPRPGRTTSVWPPQPGERVEERLETEVCVIGGGPSGAALALRLARLGHAVCLVERHAFPRPHVGESLTPGVWPLLDALGVGEMVRQAGFLPAREALVRWEDATGRRVRAPAREPGVLVDRGRFDALLLGAAASAGVKVLQPAVARRPERKADGWELRVLHEGRWVLVSARFLADASGRASCLGGRKVPVSTRTLALYGYWRGEIPHGPETRVEAGPDAWYWGAHLPDGTFNAMAFVDPESLRERGIGRRTLEPFYRELLGRSGLLGAWTAPRLVSGALACDATCYRDAEPIGEDFIKVGEASFSLDPLSSSGVQKALQTALSGAVAVHTLLVRPGSADAALRFYTDDQRYSVEQHAAWAAGYYREQHGYEERPFWKRRALPSPPTLAPPEVRPVAGDELQHRRWRLASEASLVDTPCIVGDVIEVRRALSHPRLARPVAYVDGVELAPLVEAMCEGLTMPQLADTWARQVPFRQGVALLGWFYRQGLLSEAAASDPP

SEQ ID NO: 82898 - protein, 502 aa, Rheinheimera sp.
  REGION 1..502: note = tr|A0A3S3S6M3|A0A3S3S6M3_9GAMM Tryptophan 7-halogenase OS=Rheinheimera sp. YQF-1 OX=2499626; GN = EMM73_07555 PE=4 SV=1
MIEKIRKIIVLGGGSAGWMTAAALGKVLKNQYCQIQVIESEQIGTVGVGEATIPQIMLYNELIGLDENDFMRRTQATFKLGIQFVDWQKQGSSYFHAFGDVGKNMEGLQFYHYWLRMRALGKAAPLDEYTLSSLACLEQRFMRSMDAGNSPLSNIAYAFHFDAGLFAQYLRELAEQWGVQRTEGEVVEVRQLDNGFIRSLRLADGTEHEADFFIDCSGFRGLLIEQTLKTGYEDWSHWLPCDRAIAVPSATTSEPWPFTRATAQRAGWQWRIPLQHRVGNGHVYCSRFMSEDEATAILLKNLDGEALAEPRPIRFVTGKRKQFWNKNCLAVGLAGGFMEPLESTSLHLVQATISKLFSFFPDRNFAQSDIDEFNRQMHFDYDKIRDFLILHYHATERNDSEFWNYCRTMPVPDELSQKIQQFKANGRIFRFNNEMFSDLSWFEVMLGQGITPQGYHPMADLFPEAELAKRLEGIRSVVRKSVDYMPSHQSFIDQNCKAGKIY

SEQ ID NO: 82899 - protein, 497 aa, unidentified
  source 1..497: note = Alteromonadales bacterium
  REGION 1..497: note = tr|A0XZI4|A0XZI4_9GAMM Uncharacterized protein; OS = Alteromonadales bacterium TW-7 OX=156578 GN=ATW7_07434; PE = 4 SV=1
MKPIKNVVIAGGGTAGWIAAALLNKVLGKVINITLIESSSIGTIGVGEATIPPIIQLNNALGINEQDFINATNASIKLGIEFENWKTPSHSYMHAFGSFGKDFPFCDFYNFWVKGQISGSEDSLWDFSLNYQAAKKHKFAPLSAIPNTQLPGISYAFHFDATLYAEYLKKLAVSRGVKHIDAKIERVTQCPNTGQINSLTLDNNSQIEGDLFIDCTGQRALLIEQTLNTGFVDWSHYLPCDSAVAVQSTGSDELRPYTRSIAHNAGWQWQIPLQNRTGNGLVYCSRYLSDEGATALLLNNLPGEPTTDPRLIKFKTGRRLKQWHKNVVAVGLSSGFLEPLESTSIHLIQSAVIRLIKLFPHNGISDALVTEFNKQSVTEIEHIRDFIILHYKLTEREDSPFWRQCKQMDIPQSLAHKIDLFRQTGKVVRENDELFAEVAWQQVCIGQGLIPEDYNNIVESLSSEQLNDLFSTLKTLITSTVDQLPTHKDFLAKIKKA

SEQ ID NO: 82900 - protein, 505 aa, Maricaulis maris
  REGION 1..505: note = tr|Q0AL24|Q0AL24_MARMM Tryptophan halogenase; OS = Maricaulis maris (strain MCS10) OX=394221; GN = Mmar10_2733 PE=4 SV=1
MSTTPKGPAPGLPRIAIIGGGSAGWMTAAAIINATKGAASLTLVESEQIGVVGVGEATIPPIKLFNQMLGIDENDFVRATNGSFKLGIEFVDWSRKGQRYFHPFGTHGRDFDSVPLYQYWLRERKRGDDTPLDAYSMAWEIARQNRFSPPARDPRLVQSTFDYAYHFDTILYGQFLRRYAETRGVVRQEGRVVDTRRTETGDVEAVMLEGGRAVEADFFIDCTGFFGLLIEQVLETGYEDWTHWLPCDRAVAVPCEGVGDFTPYTRSTAREAGWQWRIPLQHRTGNGHVYASQFISDEAATDTLLANLDGEPLADPRLLRFTTGRRRKFWNRNVVALGLSAGFMEPLESTSLHLIQTGINRLLALFPGTGDTQKEAAEFNRLTGEEYERIRDFLILHYHATTRDDAPLWRHTANMAIPDSLAWRMEHYRANGRLVSPGTELFLNPSWMAVYAGQEIEPAGLDPLAAASPVDGAQRLAGLRRVMAEATAPVPDHRDYIERFCTAAV

SEQ ID NO: 82901 - protein, 517 aa, unidentified
  source 1..517: note = Halioglobus japonicus
  REGION 1..517: note = tr|A0A2N5YCT5|A0A2N5YCT5_9GAMM Tryptophan 7-halogenase OS=Halioglobus japonicus OX=930805; GN = C0029_07060 PE=4 SV=1
MDNGRIKSVLVVGGGTAGWLAACHLARKLHPSDPQGVRVTLVESPDIPTIGVGEGTVPAIRNSLQYLGISETEFIRHCEATFKQSIRFDGWMAAPDHSYHHVFDYPRRDPVDVTPYWLLGGEEQSYAQWVGIQAGICDAGLGPKQMTQPEYAGVANYAYHLDAGKFAELLTRHATEKLGVEHLKANVREVKLAANGDIEALDTDRLGELRADLFIDCTGFNSMLLGKALGVEFIDRSDVLLADHALAVQVPYPEPDSPIPSQTIATARSAGWIWDIGLVTRRGTGYVYSSNHIDHDAAELELRDYLRQSLGDRVDDLACRRIPMQVGYRERFWFRNCAAIGLSQGFVEPLEATGLLMFDATARMLAEQFPASRDLMPLLSERFNRRVQFAWERVIDFIKLHYCISDRDDTAFWRDNRDPAGIPESLQENLALWRHQVPSEYDFSSKLEIFNLENYLYVLYGMNYGTAIEPLAYRYRDSALAAKAVQRTQAVVEEARANLLPHRELIEKIHRYGLQPV

SEQ ID NO: 82902 - protein, 509 aa, Maricaulis maris
  REGION 1..509: note = tr|Q0AL34|Q0AL34_MARMM Tryptophan halogenase; OS = Maricaulis maris (strain MCS10) OX=394221; GN = Mmar10_2723 PE=4 SV=1
MTGTISKVVIAGGGTAGWMTAAALSRFLVPSGVTVELVESEQIGTVGVGEATIPGIIDFNRMLGIDEADFIAATKGTFKLGIEFVDWDRVGNRYLHPFGEYGFDLEGVPFHHYWLRDRLRGSDHPLSAYSMCCQAAMSGKFMRPVSDPQSPVAQMRHAYHFDAGLYARYLRNYAEQRGVTRVEGRIKAVDQSTETGSLTALELENGSRIEGDIFVDCTGFRALLIGETLGVDYDDWRRYLPCDRAIAVPCEKIGAAAPYTRATAREAGWQWRIPLQHRTGNGYVYSSSFLNDDEAESALLANLDAPTTGPTNRLRFTPGRRRSVWKKNCVAIGLSAGFLEPLESTSIHLIQEGVSKLLALFPRGGINQREVTRYNSIIGNAYDYVRDFLILHYNATTRDDTPFWDYVRTMAVPDSLTETVELFAENGRFFAHKSDLFSITSWVAVMIGQGILPRGYDPVADSIPDQDLVATLTNMREIYAQAASKMPPHQAFIDHLAKSARQGGQAHAR

SEQ ID NO: 82903 - protein, 531 aa, unidentified
  source 1..531: note = Sphingomonas spermidinifaciens
  REGION 1..531: note = tr|A0A2A4B2N2|A0A2A4B2N2_9SPHN Tryptophan halogenase; OS = Sphingomonas spermidinifaciens OX=1141889; GN = COC42_15060 PE=4 SV=1
MNEHTIRNVVIVGGGTAGWMAAAAFSRFLANGVTRVTLVESDEIGTVGVGEATIPPILTFNRMLGIDEGEFLRETAGTFKLGIEFVDWGGPGERYFHPFGFHGRDLQGVHFHQLWLRERARRAIPDISSWSMSAVAAAAGRFGRPAPDAKSAVKDLLYAFHFDAGRYAAFLRRYAERGGVTRVEGKIEAVETRPGDDHVAAVKLADGQRVEGDLFIDCSGFRGLLIEEALQTGYDDWTRWLPADRAVAVPCALPGEPDPFTRATARGSGWQWRIPLQHRMGNGLVYSSQFLDDDAAEAELLANLEGEPLADPRRIRFTTGRRRHCWNRNVVALGLSSGFIEPLESTSIHFIQSGIARLIALFPDQRFDPVERDEYNRQMRDLYEDVRDFVVLHYKATRRSDTPFWNHCRTMEVPESLTRKIDLFRGKGRVFREGQELFGTTSWVAVCLGQHIVPERHEPAADALDEEKVAAALAQMYEEYQAVAERLPTHAEFIERSGARSPLAAPPAAEPALPTFSFENESPFADRSFSL

SEQ ID NO: 82904 - protein, 512 aa, Verrucosispora sp.
  REGION 1..512: note = tr|A0A4Q9CY38|A0A4Q9CY38_9ACTN Tryptophan 7-halogenase OS=Verrucosispora sp. SN26_14.1 OX=2527879; GN = EYA84_00380 PE=4 SV=1
MIRSVIIVGGGTAGWMTASYLKAAFADRLDVTLVESAQVSRIGVGEATFSTVRHFFDYLGLDEVDWLPKCAGGYKLGIRFENWRKPEEHFYHPFERLRTVHGFSLADWWLELGDHSQTFDRACFITTALCDAKRSPRMLDGSLFVSGLDSSLGRSTLEEQRAQFPYAYHFDADEVARYLAGYATARGVRHVVDNVDRVDQDERGWISAVRTAEHGDLTGDLFIDCTGFRGLLINQTLGTAFQSFEDVLPNNRAVALRVPREDSTEMSPYTTATAMNSGWMWTIPLFRRNGNGYVYSDQFISPEEAERELRNTIAPGRDDLPANHIRMRIGRNTDSWVKNCVAIGLSSAFVEPLESTGIFFIQHAIEQLVKHFPDERFDPVTIAAYNTRVARAVDGVKEFLVLHYKSAKRDDTPYWKEAKTRAMPPGLAEKFQLSESRLLDEDTIYPYYHGFESYSWNAMNLGLGHQPRTANPALRHIDPANAIAEFDRLRAEADEMVAALPSCYEYLASINR

SEQ ID NO: 82905 - protein, 454 aa, Amycolatopsis lurida
  REGION 1..454: note = tr|A0A2P2FU70|A0A2P2FU70_9PSEU Tryptophan halogenase; OS = Amycolatopsis lurida NRRL 2430 OX=1460371 GN=BB31_15800; PE = 4 SV=1
MDDYDVIVVGGGPGGSTAAGLIAAEGHRVLLLDKDHFPRYQIGESLLPATIHGICAMLGVRDEIERAGFVRKRGGTFKWGTGAEPWTFSFAASDRMAGPTSYAYQVERTRFDALLLDGARRLGAEIRQGHRALGTIRVGERVGGVRYLDEAGHERRATARFVVDASGHGSRLHHDVGGTREYSPHFRNLALFGYFEGGRRMPAPDTGNILCVSFPDGWFWYIPLSDTLTSVGAVVRHESADRVQGDPDVAYSALIEDCPLIEEYLRDARRATEPPYDRLRVRKDYSYDRTVLWSPGMVLVGDAACFIDPVFSSGVHLATYSALLAARSINSTLAGFSDEKRCFAEFEARYRREFGLFRDFLITFYQLDSDEDDYFRQARRLTGHHGAAEAAFAGLVGGVSSQDFSRAMFGDVLAEGVQLQLRGLLGEAAGDEPPMFPGGLVPTADGRRWRVPDA

SEQ ID NO: 82906 - protein, 507 aa, Sphingomonas sp.
  REGION 1..507: note = tr|A0A4R2XNH4|A0A4R2XNH4_9SPHN Tryptophan halogenase; OS = Sphingomonas sp. JUb134 OX=2485112 GN=EDF69_1303 PE=4; SV = 1
MQQCADSPLRVVIVGGGTAGLMTAAALTALAGRTCAVTLIEAADIPIIGVGEATLPHLRAFVARLGIDETAFMAATSATFKLGIRFSGFGARDSDYFHPFGDYGPDFGRAEFHHYWLRRHAAGDAAPLGDYGIADMAAAANRFARPEDMQWSGEHDTAGLPYGYAYQFDATRFAPFLRDWTCARGAQRREAQVTRVVRSSENGRVLALEIADGQRVSGDLFIDCSGFRAILRDEDLWEDWSHWLPCDRAVAVPCTAAGATIEPYTRAKAMDAGGWRWRIPLQHRVGNGYVYPSAFVGDDHAQDTLLAALEGAPLADPRVLRFRAGRQRRAWAHNVVAIGLAAGFLEPLESTSIHLVQAAITHLIEHFPDAQGCDADRDGFNRAMDAEHDRIRDFLILHYHATIRDDAPFWTHVRTMAVPDTLAATLELWRETAQVARYGFGLFKPPSWVAVLIGQGMIPRRWDQRADAAPADMLARELAGLRASIADRVAALPNHSATLARVAASSA

SEQ ID NO: 82907 - protein, 499 aa, Asticcacaulis benevestitus
  REGION 1..499: note = tr|V4PUT0|V4PUT0_9CAUL Uncharacterized protein; OS = Asticcacaulis benevestitus DSM 16100 = ATCC BAA-896; OX = 1121022 GN=ABENE_14170 PE=4 SV=1
MNEQRVKKVVIAGGGTAGWCTAAALSKLIGPLLDITLVESEDIGTVGVGESTIPTVRTFHRFLGIDEREVMRATNATFKLGISFENWAREQDQYFHAFGTIGRSPWMADFHHIWLQARADGYGGDLGDYCLELQAAKAGRFQTSEKATINYAYHLDAGLYGQFLRKLSEANGVRRIEGKIARVEQDAKSGFLTGLVMDSGATIEGDLFIDCTGFRGLLIEQTLKTGWDDWSHWLPTDRALAVQTDSVGTIMPYTRAIAHDAGWRWRIPLQSRVGNGLVYCSQYLSEEDARTRLLGALDAPPLFDPRLIPYSTGRRKMSWNKNCVALGLSSGFIEPLESTSIHLFQIGVTRLVQMFPFSGITQALTDRYNQAARAELERVRDFVILHYKATERDDSAFWHDRHNMSVPDTLAARIELFREKAYAYQAPDDLFRVDSWVQVLLGQRIEPRGWHGVGKLMPREDAVRGLEGLKGSIAKAVAAMPPHDHFLAQYCPMKDVVPA

SEQ ID NO: 82908 - protein, 498 aa, Xanthomonas sp.
  REGION 1..498: note = tr|A0A0Q5GJL6|A0A0Q5GJL6_9XANT Tryptophan halogenase; OS = Xanthomonas sp. Leaf131 OX=1736270 GN=ASF73_20210 PE=4; SV = 1
MTQPRIRKVVIAGGGTAGWIAACALAHQFRDLLDITLVESDQIATVGVGESTVPPIRTFHRFLQIDEQEFLRAVAGTFKLSISFEHWRRHGERYIHPFGITGQSTLVCAFHHLWLESQRRGMPGTFGDYCLETVASRVDRFALLREPAVNYAYHLDAALYAKFLRARSEAHGVTRVEGKIQQVTLQPDSGDVAALVLEDGQVIEGDLFIDCSGFRGLLIEQTLHTGYEDWSHWLPCDRAVAVQTEALGPPVPYTRAIAHEAGWRWHIPLQHRVGNGLVFSSRHLSDDEAHAKLLRDVAAPAVKDPWLVPFRTGRRRKAWNKNVVSLGLASGFIEPLESTSIHLTIAAVVRLISLFPADGIAPSQVELFNDISRAEMEHVRDFIILHYHATQRDEPLWRQCREMELPESLALRLRAWRERAHAWQGADELFRIDSWTHVLLGQGIVPQQHHPLAAALSDNDLRRLLDGIAQPIQRVVEQMPPQQDFISAYCKMDARAWG

SEQ ID NO: 82909 - protein, 536 aa, Dyella sp.
  REGION 1..536: note = tr|A0A1G7LNE0|A0A1G7LNE0_9GAMM Tryptophan halogenase; OS = Dyella sp. 333MFSha OX=1798240 GN=SAMN04515659_1122; PE = 4 SV=1
MARLKKVLVVGGGTAGWLTACYLARAVNAVDPRSVQVHLVESPDIGLLGVGEATFPSIRGTLAAIGLDERRFLVGATATYKQGIHYRHWVRPPGAPGADHFFHPFNAPSQRPGGPELLPYWLLGAAPAGMPFADAVSMQTALVDHSRAPKRVKDADYQGPMNHAFHFDAACFARVLAEHGQETLGVVRHTATVERAELDEHGAIARVVTKEEGELTADLYVDCTGLRGMLIGGAMQSPFRSRADVLFADRAVAMQVPYDAPDTPIPSYTISTAQEAGWIWDIGLQKRRGVGYVYSSRHTDDERAEAVFRKYLGEAGKGGRAMQIKFETGYRPEHWRKNCVAVGLAGGFVEPLESTGIALIELATYLLTHLLPGDTDDMESAARHYNEMMVARYDRIIDFIKMHYCLSQRRDSAFWLENADPSSIPQTLREKLEKWKTRPPHRLDFVSDLEMFMTSSWQYILYGMEFRTDLEPMRSAYPDVEVARREFGMIQQAAVRALDDLPDHRGLVEQLCAEHRPRSPATHAGHDDRIAERSRI

SEQ ID NO: 82910 - protein, 491 aa, Novosphingobium sp.
  REGION 1..491: note = tr|A0A4R1URC8|A0A4R1URC8_9SPHN Tryptophan halogenase; OS = Novosphingobium sp. PhB165 OX=2485105 GN=EDF56_10315; PE = 4 SV=1
MTDKAPIRSIVILGGGTAGWMTAAALSKALQPNGIAIRLVESDAIGTIGVGEATIPTIHWFNQLLGLDEAEFMAATKATYKLGIEFQGWQGDGHNYLHPFGTYGSPGDAVMFPHRLIRAWLGGHDLSPEDYSLTTQLARQRRFISPANDPRSLLSTLGYAYHFDASLYAGYLRKHAEARGVQRHEGKVTEIEQDGETGFIRSVSTDKGERLSGDLFIDCSGLRGLLIEDRLQAGFEDWSHWLLCDGAWAAPTPADAEPVPFTRSITHEAGWRWRIPLQHRVGNGYVFSSAFQTPEAARETLLAAIGEPSAEPRLIRFTPGRRKRAWVGNVVAIGLSSGFLEPLESTSIHLIQTGIGKLLSLFPRAGCEPLLAEQYNRIFAREMEDVRDFLVLHYHFTAGRSEPMWQHCQTAAMPETLAYRIAQYEASGRIMLTGEDLFRDASWFAVMTGQGIRARDYSPMLDAAPEAENLRHLEAVRAAVRQSSERIPRIA

SEQ ID NO: 82911 - protein, 529 aa, Asticcacaulis taihuensis
  REGION 1..529: note = tr|A0A1G4RAM2|A0A1G4RAM2_9CAUL Tryptophan halogenase; OS = Asticcacaulis taihuensis OX=260084 GN=SAMN02927928_1727; PE = 4 SV=1
MTPLKKVVIVGGGTAGWMAAALLAKLARKGLEIELVESEEIGTIGVGEATIPAIKRFNHLLELDETDFIRSTQATFKLGIEFVNWGREGDSYIHGFGKIGQDLGWLRMHQYWLKMRDTGKVSDRFADYSINTAAAYANRFMRARADMKASPLNDIAYAYHFDAGLYALYLRKYSENLGVKRTEGKIVKVNQRATDGFIEGVVLESGAVVEGELFIDCSGMRALLIEETLGAGYEDWSHWLPCDRAVAVPCSYMRSDAARASPPNGSGGQSALPRTGEPALGKSELLTPYTRSIAHKSGWQWRIPLQHRIGNGHVFSSRYISDDEATAVLMGNLDGAPLAEPRVIRFRTGKRRKVWDRNVVAVGLSSGFMEPLESTSIQLIQSVILRLLAFFPDSGFAPAPRDSFNRLVDEEYREIRDFLIAHYKLTARDDSPMWRYCRDMDIPDALRERLDLWRVAGRFFKTGEELFVDESWIQVLIGQGLIPTGYDPFVDLRAEGEIVKYLNDISGVIGKCVAAMPSHEQYIEATCKA

SEQ ID NO: 82912 - protein, 499 aa, Novosphingobium sp.
  REGION 1..499: note = tr|A0A4R1UUE9|A0A4R1UUE9_9SPHN Tryptophan halogenase; OS = Novosphingobium sp. PhB165 OX=2485105 GN=EDF56_102201; PE = 4 SV=1
MNTPRKRVVVAGGGTAGWLAATALVRQLSGLIDVTLVESEEIGTVGVGESTIPTIRTFHEFIGVQENDFVRATHATFKLGIGFENWDRLGDHYFHPFGSVGRSTFVADFQHFWLEGRKAGFGGDYGDYSLEQQAAMAGRFGASGDNSLGYAYHLDASAYARFLRGVAEGAGARRVEGRIASVEQDGESGDITALVLASGERIEGDLFIDCTGFRGLLIEQTLKTGFEDWSHWLPTDSAFAVQSEATGDPVPYTRAIAHGEGWRWRIPLQHRVGNGIVYDSNFLSDGEARDRLLQSLDGPPLFEPRLLRFTAGMRKRVWNRNCLSLGLASGFVEPLESTSIHLVMVAVTWLIQNFPFGPDNTAVADWFNARSRHEWEHVRDFIVLHYAMTHRDDTAFWRERAAAAIPDSLAARIQLFREAAIAYQSQDDLFRVDSWVAVLIGQGVWPERHHQLPAMLPKPQLQAALNDLRRNIVGAVERMPSHAARLAQIADETREREVL

SEQ ID NO: 82913 - protein, 509 aa, Sphingomonas sp.
  REGION 1..509: note = tr|A0A432VEV7|A0A432VEV7_9SPHN Tryptophan 7-halogenase OS=Sphingomonas sp. TF3 OX=2495580; GN = EJC47_16665 PE=4 SV=1
MPAKRKILVVGGGTAGCLAAAYLARFFDGRIEITLLESPDIGIIGVGEGAFPTIRATLQFLGIDEAHFLRETSGTFKQGIRFDDWLHAPTADGRRHRYLHPFEAPFHTERTSLVPYWLLQDAAKRAPFAEAMTIQNRVAESGRAPKRADEGAFSGPLNYAYHFDAGKFVEIIEHRAVELGVRHLKGLLTDVALAEDGSIAHVATREHGALEADLYIDCSGFRAELIGKALGAPFKSVRDQLFTDRALACKIGYDRADAPIESFTIATAHPAGWTWDIALEGARGIGCVYSSAHMTDDRAAEMLQRYIGHDRFTARTIPFESGYRTQQWIGNCVAVGLSGGFLEPLESTGVVLVEAAVAMIAELFPHTGPIDAPARRFNALMAARYDRIITFLKLHYCLSRREEPFWRDNIAPDSIPEALRDLLDQWRHRPPNRFDFLIDVESFAYFNYQYILYGMDFPTDLAAGRGDFPDGAVAEKMFARIRSFGERAVADLPTNRALLHDINAGLMLR

SEQ ID NO: 82914 - protein, 513 aa, Sphingomonas sp.
  REGION 1..513: note = tr|A0A430BI24|A0A430BI24_9SPHN Tryptophan halogenase; OS = Sphingomonas sp. S-NIH.Pt15_0812 OX=1920129; GN = BRX43_08610 PE=4 SV=1
MQPINHIVIVGGGTAGWLTAGTIAARHKGRMAHGFTVTLVESPNVPIIGVGEGTWPTLRTTLRRMGVSETEFFRQCDAAFKQGALFAGWTTGAADDAYYHPLMLPQGFGQLNLAQHWLADPDAANFCDSVTPQGKICDAGLAPKTIATPEYEGPANYAYHLDAGKFSAFLQRHCTENLGVRHVLADVREVRMTEGGDIAAVRTEQAGEIAGDLFVDCTGFAARLIGEAMGVPFRSCADTLFCDTALAIQMPYEDEDAPIASHTKSTAQSAGWIWDIGLPTRRGVGHVFSSSHIGVDEAERELRAYLGEGARDLPMRTLKIRAGHRETFWKGNCVAVGLAAGFLEPLEASAIVLIELSAKLIAEQMPACREVMDTIAARFNATTHYRWGRIIDFLKLHYALTQRRDTDFWRDNVRPETIPDRLQGLMELWRWNAPWMHDEFDRADEVFPAASYQYVLYGMGHRSAVTPGSLDAEAVQASRAWRENRSQTERMLAGLPRHRDLIRKIHQHGMPTL

SEQ ID NO: 82915 - protein, 504 aa, Sphingomonas sp.
  REGION 1..504: note = tr|A0A430BEC5|A0A430BEC5_9SPHN Tryptophan halogenase; OS = Sphingomonas sp. S-NIH.Pt15_0812 OX=1920129; GN = BRX43_14190 PE=4 SV=1
MTETPPIRVVIVGGGTSGWMAAAALAKLLPRRCTVHLVESEAIGIVGVGEATLPHIRAFNERLGIREADFMAWTRATFKLGIEFRDWGRIGDSYIHPFGTFGRGQSEVDFHHYWARLMQAGVDVPPIEQFSMACTMAREGRFALPTTDPRQITTTFGYAYQFDAVLFAPYLRALAEDMGAVRSEGIVVDVERDGEGGDLTAIRLADGRRIEGDLFVDCSGFRSLLLGGAMGEPFQDWSRWLPADRAVAMPCRTETALTPYTSAIAMPAGWRWRIPLQHRTGNGYVYASGFTADDAARDALVAAVEGEPIADPRLLRFTAGRRERSWVGNCVAIGLASGFLEPLESTSIYLVQQAITALIELFPQGRVRGVDRDEFNRVIDLEYERIRDFLILHYHATERDDSEFWRYVRTMTIPDSLAEKMELFRRRGRIVKYREGVFLDASWVAVYLGQRVRPEGRDPRADLPAMDVLMRGMTNLRDEVAATAAAMPGHLAFIDRYCPMSPTA

SEQ ID NO: 82916 - protein, 507 aa, Asticcacaulis taihuensis
  REGION 1..507: note = tr|A0A1G4SG55|A0A1G4SG55_9CAUL Tryptophan halogenase; OS = Asticcacaulis taihuensis OX=260084 GN=SAMN02927928_2650; PE = 4 SV=1
MAEPIRKIIIAGGGTAGWMTAAALRTSLAQDVEILLIESEDIGTIGVGEATIPTIRLFNEHVGIDERSFIRATEATFKLGIEFQGWGHEGNRYFHPFGDYGGTHEGLAAHQIWRRLNLAGDHTPLEAYSVGTQMAYAGKFFPPNPDPRSPMHDYSYAFHFDAGLYARFLRQHCEQRGVRRLNAKIANVNLRGEDGYIDSLTLDDGRVETADLFIDCTGFRALLLGGALGVPFVDWSHYLPVDRAWAVPTAKAASPAIMPFTRSTAHEAGWQWRIPLQHRTGNGHVFSSSHISEQAALDTLMQNLDAPPLKDPMLIRFKTGHRQRFWEKNCVAVGLATGFLEPLESTSINFIQNAAIRLLELFPAKEIDPYLRDEYNLRNQASYDYVRDFIIAHYCLNSREGELWRHCANMPIPDDLQWKLELYRRRGEVLIRKFDHFHEPSWISIYHGHGLRAAAYDPLADRIPLETLSALMQRRREGIQRVVAQVPFHAEFIAKHCPSESFMKAGV

SEQ ID NO: 82917 - protein, 489 aa, Asticcacaulis taihuensis
  REGION 1..489: note = tr|A0A1G4TQ52|A0A1G4TQ52_9CAUL Tryptophan halogenase; OS = Asticcacaulis taihuensis OX=260084 GN=SAMN02927928_0072; PE = 4 SV=1
MALHKSDDNVKKIVVCGNGLAAQMTVCALARQLPDQIQLTWLRIAGSEQSDIFYGNTAPPATYEFNLNLGISEPELLSGSEASFSFGTRYQNWGGAAWTQCFQQPLPIIDGVLFHHYLSQQNIFELEPFLVSAVAAQKGAFAHPPEDRRHALSRAEYGYHIDPLDWGRFFERMVPRDRVDIAAGEIADIVVHDGDIETVRLSDGRELVADLYVDGSGAGAVFLSSLGVVFKAERRLAAHMQYRPLSGAEGVVRTLTGCDFGWVSDTPLQSHVATLTVFDPQMPGQAALIAVPEGAAVAEVPIGRHPIAWAGNCVAIGQAAGVVEPLTAAPVVLLIRDVDRLLSLLPNTRDMRVESREFNRQYDEDYRNAGLFHRAFYEGHAFPDTSYWRAARAQPIDERLSAKLAQFESRGLHVAYDLEPFTQEDWLILSYGMGRRPGRYDRIADRADRDRVRQFLSGMRQDIERCVSAMPNHTDYMQNFMRYLRQQET

SEQ ID NO: 82918 - protein, 510 aa, Asticcacaulis taihuensis
  REGION 1..510: note = tr|A0A1G4TRX7|A0A1G4TRX7_9CAUL Tryptophan halogenase; OS = Asticcacaulis taihuensis OX=260084 GN=SAMN02927928_0071; PE = 4 SV=1
MTRPIKKIVILGGGTAGWMTAAALSSVLASKDVSITLVESELIGTIGVGEATIPDIINFNRLLGIREDEFMKATQATFKLGIEFVDWGRKGDVYVHPFGSHGVDMNGIDFHHYWLHSRNGGNPQPIHRYSLCAVAALEERFALPDANPRSLRSHLRYAYHFDAGLYAAYLRKYAETRGVRRIEGQMRTVDQDADTGDILRLHLDDESVIEGDFFFDCTGFRALLIEKALGAGFVDWKHWLPCDTAQAVACKHAGGLLPFTRSTARKAGWQWRIPTQQRTGNGHIYSSDFMSDDEAQSILMRNLDGEMIGQPRRIQFRAGHRETFWSKNCVAIGLSAGFLEPLESTSIYLIQEGISRFISLYPDLPAPEIVRHEYNRHMQTEFEQVRDFIILHYCATERSDSPFWDYCRTMSLPDSLVHKIELFRQVGRVFRYEEELFSKASWVAVFLGQGILPRSYDPIVRNLPPGEVSQSLESMRVAMINEVGRMATHADFIQNYCAARRLTSIDVASA

SEQ ID NO: 82919 - protein, 506 aa, Asticcacaulis taihuensis
  REGION 1..506: note = tr|A0A1G4RY14|A0A1G4RY14_9CAUL Tryptophan halogenase; OS = Asticcacaulis taihuensis OX=260084 GN=SAMN02927928_2237; PE = 4 SV=1
MTNPPIKTITIVGGGTAGWMTAALLSKLLMGRYDITLIESEEIGTIGVGEATIPAIKVFNEMLEVNEAEFLKATQGTFKLGIEFVGWRDGPHDPADSYIHGFGKIGIDRLWLHTHQFWLKMREKGAVKHFDHYAICCAAARKGRFTPPDPRRGPPVSDLDYAYHFDASLYARYLRTLSEGRGVKRIEGRITQVNLRPEDGFIDTLTLQNGHSIGGDLFIDCSGMRGLLIGEALGIDYEDWNEWLLCDRAYAVPSVNPAQITPYVTCTTRDAGWQWRIPLQHRTGNGYVHSSGYTDDQTAVDTLMSTLGGPALAEPRLVKFRPGKRHKSWEKNCVAIGLSGGFLEPLESTSIHLIQTGILRLLSLFPGQGFNAADISEYNTYTDDEYRDIRDFIIAHYKVTNREDTPFWKYLKHMPVPESLARKLDLFRSSARFFKRGAFELFREESWVQVLLGQGMTAGYDPNVDLLSEAEMIGFLRDIEAVIDGNVNAMPTHDAYIARYCPAPKV

SEQ ID NO: 82920 - protein, 527 aa, Pseudoxanthomonas taiwanensis
  REGION 1..527: note = tr|A0A562E074|A0A562E074_9GAMM Tryptophan halogenase; OS = Pseudoxanthomonas taiwanensis J19 OX=935569; GN = L613_001800000190 PE=4 SV=1
MDNNRIRKVVIAGGGTAGWVAACALTHQFRDLLEITLVESEEIGTVGVGESTIPTIRTFHRLLQIDEREFMKAVAGSFKLAISFENWKRPGERYFHPFGTTGVNTWSCDFHQFWLESRRRGIHSDLGDYCLETAAARLDRFALFDANDSAQQWSMRWTKAATRLERSDVSYAYHFDAALYAAFMRAKCEGRGLKRVEGKIAQVRQDPGSGYVQALVLEDGQVLEGDLFIDCTGFRGLLIEQTLKTGYEDWNNWLPCNRAVAMQVESDVPPVPYTRAIAHEAGWRWHIALQHRVGCGWVFSSEHMSDDEAAARLRAAYPDDRLVREPWVVPFRTGRRRQAWNKNVVSLGLASSFIEPLESTSIHLTLSAVTRLVQLFPFEGISQAVVDRYNKVSRDELEHIRNFIILHYHLNQRDEPMWKQCREMQLPPELAERIQVFRDTAYAWQGEDELFRLDSWTHCMLGQGVVPKDHHPLTRGLSDADMQTLLQGVRRPIERAVQAMPQHHEFLKRYCPADPSVWHNRRRSTVG

SEQ ID NO: 82921 - protein, 518 aa, unidentified
  source 1..518: note = Massilia lurida
  REGION 1..518: note = tr|A0A562R0C4|A0A562R0C4_9BURK Tryptophan halogenase; OS = Massilia lurida OX=1036180 GN=IP91_04489 PE=4 SV=1
MNKPIEHVVIVGGGSAGWLAAGIIAADHQARAPHGLRVTLIESPDVPPIGVGEGTWPSMRDTLHRIGVSESDFFRECDAAFKQGSRFNGWRHGGAADEDYYFHPFVLPQGYGDTDLVAPWLQRRGDVPFADLVSFQPHLCVNGRAPKQAGTPEFAAVANYGYHLDAGKFGVFLRRHCLEKLGVHYVPDHVTAVNSHENGDIASLQTKEHGALAGDLFIDCTGMQSLLLGGHYGVPLLHQKHVLFNDSALAVQVPYEREDSPIASQTTSTAQRAGWIWDIGLPTRRGIGHVYSSAHTDDEQAERDLRAYVAATGGPADMPAPRKLTFQPGYRQQFWHRNVVAIGLSAGFIEPLEASALALVELSAAMVSDDLPATRAAMDIVSRRFNEAFTYRWERVIEFLKLHYVLSGRDDSAYWRDNRSDAAMPERLRELLTLWRHRPPSRLDFHRIEEVFPSASWQYVLYGMGFRPDRAHGTRRIEPQAAEQQFHAAADLTRRMLRALPSNRELLAHIRLHGLPKL

SEQ ID NO: 82922 - protein, 513 aa, unidentified
  source 1..513: note = Alteromonadaceae bacterium
  REGION 1..513: note = tr|A0A495DC23|A0A495DC23_9ALTE Tryptophan halogenase; OS = Alteromonadaceae bacterium 2052S.S.stab0a.01 OX=1304900; GN = K256_2619 PE=4 SV=1
MTEHRKPAIAIIGGGTAGWMAAMVFAHTWQQEIDISLVESDAIGTVGVGEGSTPALKNFFDQLGIAESEWMPACNATYKCGITFSGWSTRPGFEHYYHPFASQLDHFTLPLFIRQAQERVQGLDVDAHPDRYFLSAYLAQHHLAPKPGDSFPFELQYGYHFDASLLGQFLRQRACRMGVIHRRATVVEVNRATDGNIASLRLDTGELAAADIFVDCTGFAGLLIQQHLGTPFVSYQRQLSNNAAVAVASPLDSTVGDEPAPALPSQTLSTAMACGWAWKIPLTNRFGNGYVYSRDYCSADQAEFELRQRLGLLDADVEARHLSMKVGRVAEHWRGNCLAVGLSQGFIEPLEATALFLVQQTVSLFAESFTRGDYSSQYRDQFNQRMNRQFDGVRDYIVTHYKTNSRDDTEYWRDARANPDDISDPLRQLYRCWMAGGDLAAEVRRQQMDEFYPVASWYCILAGMGIFPSSERLRKPASADRQRELGRIDDFIRRCALNYQDHRQQLAELSRGT

SEQ ID NO: 82923 - protein, 510 aa, Asticcacaulis taihuensis
  REGION 1..510: note = tr|A0A1G4RFZ3|A0A1G4RFZ3_9CAUL Tryptophan halogenase; OS = Asticcacaulis taihuensis OX=260084 GN=SAMN02927928_1885; PE = 4 SV=1
MQTAVRKIVIVGGGTAGWMAAAALIKALGSHAYDITLIESEDIGTVGVGEATIPPILEYNYFLGLDEDEFIRETNATFKLGIQFQDWRHLGHSYFHPFGLFGTEIDGFSFPHYYFRHYHKAGLSAVDIGKYNAETEAALQGRFGRVRREPGKPPVNYAFQFDAALYARYLRKYAEKRGVVRQEGKIVTVNQHPETGFITSVQMEKGRVIEGDLFIDCSGFRGLLIEQTLKTGYTDWSHWLPMNRAVAVPCERAGELLPYTRATAREAGWQWRIPLQHRTGNGYVFCDEFISEDAACETLLGRLDGKALADPKILRFVTGRRNLAWNKNVVALGLASGFLEPLESTSIHLVQSGVFRFLALFPRHGFNPHIVNEYNREVELSYNNIKDFIIAHYKVTERDDTPFWRHVRQMAIPESLQNRLDVFRASCQTLWRDSELFREVSWVAILTGQGLVPEDYHPAADAMDDDDLRLHLGRWRSAVLDRVKGLPTHEDFIRRNCASEAFKRLEAAGG

SEQ ID NO: 82924 - protein, 543 aa, Asticcacaulis taihuensis
  REGION 1..543: note = tr|A0A1G4RJP2|A0A1G4RJP2_9CAUL Glycine/D-amino acid oxidase OS=Asticcacaulis taihuensis OX=260084; GN = SAMN02927928_1970 PE=4 SV=1
MSHTDTSASERKAREVLIVGGGAAGWMTAAYLAKNLGTDRTGGPRITVLESPDISIIGVGEGTFPTIRNILRSLGIDEAEFMRESHATFKQGIRFDDWEMPPQREPNGQLIHSHYFHPFEAPYWSREELNLVPYWLLKDRDKRLPFAQAVTFQKKVADAGLAPKAIHQGHYQGPLNYAYHFDAYRFAGVLAKFAKGLGVHHLSGNLTGVGLAADGAIDHVATAEHGDLKAGLYVDCSGFRAELIGKAIRAPFRPIRDILFTDRAVTAQVPHDCSDCQLESYTVSSAHEAGWTWDIALSDRRGIGYVYASDYTTDERAEAVLREYIGRTSKAEISPRHISFTAGYREQQWMKNCVAVGLSAGFLEPLESTGMVLIESAVNKIVEFFPFSGPADASATIFNESMTRRYETIIGFIKLHYCLSKRPESFWVDNTKPETIPPHLRDLLALWKFRPPSRFDFVLDHESFAFFSYQYILYGMNFETDYEAARPSLSQSELADQLFARIAAFGEQASKDLISHRDLVDAVYREGFVERQAPPPRMRGIKM

SEQ ID NO: 82925 - protein, 500 aa, Asticcacaulis taihuensis
  REGION 1..500: note = tr|A0A1G4TRW7|A0A1G4TRW7_9CAUL Tryptophan halogenase; OS = Asticcacaulis taihuensis OX=260084 GN=SAMN02927928_0070; PE = 4 SV=1
MNDLRIRKIVIVGGGTAGWMTAAAMARLLRDDEISIRLIESEAIGTVGVGEATIPHILYFNRLLGLDESEFMRRTHATFKAGIEFVDWGGLGQRYIHPFGAYGEPMNSLHFHHSWLRYDQMGKAQPLDKYNLIVEAARLGKFQKPEGGRLNASSGAYSYAFQFDAGLYARYLREIAEAGGVKRTEGKISHVSRQPETGHVESVTLETGETVPGDLFIDCSGFRGLLIEQTLQSGFEDWSAYLPCDRAVARACERVAPPLPYTRATAKSAGWQWRIPLQSRTGNGHVYCSEFISDEEALEGLNRDLDGPVTSEPNFLKFKAGVRKSPWNRNVVAIGLSSGFLEPLESTSIHLIQSAIARLMENFPDKTFNQPDIDYYNRRTQLEYEQVRDFIVLHYCATQRDDSPFWNYCRTMQIPQTLADRLAVYSENARLYRHDNELFDETSWLAVLHGQNIRPKRYHPIADIMPAAELETRMKRIEGQVAAGVSLMARHPDFLERYIR

SEQ ID NO: 82926 - protein, 538 aa, Burkholderia pseudomallei
  REGION 1..538: note = tr|A0A0F6G7Q1|A0A0F6G7Q1_BURPE Tryptophan halogenase; OS = Burkholderia pseudomallei MSHR2543 OX=1249472 GN=prnA; PE = 4 SV=1
MSNPIQNIVIVGGGTAGWMAASYLVRALQQQANITLIESAAIPRIGVGEATIPSLQKVFFDFLGIPEREWMPQVNGAFKAAIKFVNWRKSPDRSRDDYFYHLFGSVPNCDGVPLTHYWLRKREQGFRQPMEYACYPQPEALDGKLAPCLPDGTRQMSHAWHFDAHLVADFLKRWAIERGVNRVVDEVVQVHLNERGYISSLSTQEGRTLEADLFIDCSGMRGLLINQALKEPFIDMSDYLLCDSAVASAVPNDDARVGVEPYTSAIAMNSGWTWKIPMLGRFGSGYVFSSKFTSRDEATADFLNLWGLSDKQPLNQIKFRVGRNRRAWVNNCVAIGLSSCFLEPLESTGIYFIYAALYQLVKHFPDTSFDPRLTDAFNAEIVYMFDDCRDFVQAHYFTTSREDTPFWRANRHDLRLSDAIKEKVQRYKAGLPLTTTSFDDSTYYETFDYEFKNFWLNGNYYCIFAGLGLLPDRSLPLLRHRSESIDKAETMFARIRREAERLRTSLPTNYDYLRSLREGDVGLSRSRPGPTLAAPEIL

SEQ ID NO: 82927 - protein, 496 aa, Asticcacaulis taihuensis
  REGION 1..496: note = tr|A0A1G4TMW0|A0A1G4TMW0_9CAUL Tryptophan halogenase; OS = Asticcacaulis taihuensis OX=260084 GN=SAMN02927928_3655; PE = 4 SV=1
MNSVQQQEIVILGGGAAGWIAAALLAKRTDRRHIRITLVESEEIGIIGVGEATVPILTHCNALLGIGENDFIRSTQGTFKLGIEFCDWGVAGNRHFHAFSDYGHHVDNVSTHHYWLRLRQSGDERPIDDYSFAYAVAKNNNFAPSDPQNSRYHHAYHFDAALYARYLRDVATGLGVQRIEGRMTHFDLDGASGNIAAVHLAEGVKVPGDLFLDCTGFASELLGKALDTPFVDWSRWLLCNSAIAAPSKRTGALMPFTRSTAHAGGWRWTIPLQHRNGNGMVYNSDLWSDDAAREALLGNLDGELLAEPRVFRFTSGHRKWFWNRNCIGIGFASCFLEPLESTGLQLIVTGVLKLLRLFPQRTINPVLRDEYNRITTIELERIRDFIIAHYYLSRRPEPLWAASRDIEIPDSLRHKLEIWKASGQIALGDLESYMEPSWLAILLGNGVVPARYAVAADLYPLEQIRKGMEIRREEIIRSAQAVTSHQDFIDQYCKAS

SEQ ID NO: 82928 - protein, 495 aa, unidentified
  source 1..495: note = Porphyrobacter mercurialis
  REGION 1..495: note = tr|A0A0B2BXC0|A0A0B2BXC0_9SPHN Tryptophan halogenase; OS = Porphyrobacter mercurialis OX=1572751 GN=PK98_11790; PE = 4 SV=1
MTREQGVTRVVIAGGGTAGWLAAAALTRQLRGQVAVTLVESDEIGTIGVGEATIPTIRAFHALLGLDENAFLRAAKASFKLGIQFEGWAREGDSYIHSFGALGRGTWMAEFHHMWLEAHAQGFGGELSAACAEHEAARAERFATDENGSLNYAYHLDAGLYARALREQAEAQGLVRIEGRIARVERDGASGDIAALVLEDGARVAGDLFLDCTGFRALLIEGEMQAGWEDWSHWLPTNRALAMQTRAVGPAVPYTRAIAHDAGWRWQIPLQHRVGNGLVYASDFLSDDEARHRFLGLVEGEPLIEPRLIRFTTGRRKRVWVNNCIALSLASGFVEPLESTSIHLTMIAITRLLQLFPFNGSTPALARRFDDLAQRELERVRDFVMLHYVLNQRPEPFWQRMREMELPASLTERIAVWREAAHAWQGADDLFRVDSWVQVMLGQRLEPEGHHHVARLMPPERLRQALADMQAATAATVAKLPTHQQYLDRHGGVAA

SEQ ID NO: 82929 - protein, 534 aa, Streptomyces sp.
  REGION 1..534: note = tr|A0A1K2FLX6|A0A1K2FLX6_9ACTN Flavin-dependent tryptophan halogenase RebH OS=Streptomyces sp. F-1; OX = 463642 GN=rebH PE=4 SV=1
MTGEDRRIKKVVILGGGTAGWMTAAYLGKALQNTVEITVLEAPTIPRIGVGEATVPNLQRVLFDFLGINEDEWMRECNASFKTAVRFVNWRTEGAGQATARELPQGGPDHFYHPFGLLPDYDQTPLSHYWYKNKYEGLTDEPFDYACFREPPVMDAKLSPRWLDGRHATRYAWHFDAALVAKFLCRFATEKQGVRHVQDEMTRVEQDERGFVTALHTASGKVLDADLFVDCSGFRGLLINKAMAEPFIDMSDHLLCDSAVATAIPHDDEANGVEPYTSAIAMSSGWSWKIPMLGRFGTGYVYSSKFTGKDEATREFSEMWGLDPENHEFNHVRFRVGRNRRAWVKNVVGIGLSSCFVEPLESTGIYFITAAIYQLAKHFPDRSFNETLINRFNREVESMFDDTRDFIQAHFYFAPRNDSPFWRANKELTLPENIREKIDAYRAGLPINSPVTDESTYYGNFEAEFRNFWTNGSYYCIFAGLGLVPDAPLPALSYKPESVIGAQPLFERVKRQQQDLLDTLPTTYDYLRQLHGTS

SEQ ID NO: 82930 - protein, 499 aa, Sphingopyxis sp.
  REGION 1..499: note = tr|A0A1G3KHP4|A0A1G3KHP4_9SPHN Tryptophan halogenase; OS = Sphingopyxis sp. RIFCSPHIGHO2_01_FULL_65_24 OX=1802171; GN = A2885_15650 PE=4 SV=1
MTDPIRTIVIVGGGTAGWMAAAAAARFLNDGQRRILLVESDAIGTVGVGEATIPPIRDFNNMLGIDEAEFIRETGATFKLGIEFVDWGALGERYLHPFGDPGHNFEGIAFHQYWLKHRHDPRIGPFTDYFITDAAVRHRGCAPQSGDPRSPLHQMAAAYHFDAALYAAYLRRRAEAQGVERIEGRITGVARDGGSGHVAALRLADGRDVAGDFFIDCSGFVSLLLGREMGVAYRDWSRWLPCDRAFAVPSARTDPLIPATRATAHGFGWQWRIPLQHRTGNGIVWSSAHAGEDEARDTLLANLDSEALAEPRQLRFTAGVRERLWEGNVVALGLAGGFIEPLESTSIHLIQTGINKLFWLFPDRNFSAVERDEYNRLMIDQYEYVRDFIILHYKATARNDTPFWRDMAAMEIPDSLAQKIELFRTKGRIRRFDHDLFGVANWAAVMLGQNIVPDGYDPLVDATDDDRIVAAMERIASVFDQQARAMPSHADYIARLIAR

SEQ ID NO: 82931 - protein, 502 aa, Sphingopyxis sp.
  REGION 1..502: note = tr|A0A1G3JYS1|A0A1G3JYS1_9SPHN Tryptophan halogenase; OS = Sphingopyxis sp. RIFCSPHIGHO2_01_FULL_65_24 OX=1802171; GN = A2885_16340 PE=4 SV=1
MDEGLFNLVIVGGGTAGWMCAAACAAKLDRSRFRVRLIESEEIGTVGVGEATLPQMKDFNDFLGLDEVEFMQATQASFKLGIEFVNWGRQGDRYVHPFGTFGRPIGEADFFSYWVRGRNAGVAAPLSDYCFPIVAALQNRFMLPNGDPNDVRNAFAYAYHLDAFLYARYLRGWAEARGIERVEGRIVDVARDANSGNIAAVTLASGTSVAGDMFVDCSGFRSLLLGGTLGVDLDDWSKWLPCDSAAAVPSVRSTDFTPYTRSTRRKAGWQWRIPLQHRTGNGYVYASKDISDDEAAATLLANLDGEALAEPRVLRFKAGKRDQAWAHNVVGMGLAGGFLEPLESTSIYLVQMAIMHMLTLLPSCDGIDPALPAEFNRVMDVEYDRIRDFLILHYIANDADAPLWEQVTTMNVPDTLAGKIDRFRQRAFVQAYRDGLFGPPSWQAVFVGQGIVPHAADRLADTLPDDLLADRLGNLAATITLGAKSAPSHADFVASYCPAPAP

SEQ ID NO: 82932 - protein, 496 aa, unidentified
  source 1..496: note = Alteromonadaceae bacterium
  REGION 1..496: note = tr|A0A495DF02|A0A495DF02_9ALTE Tryptophan halogenase; OS = Alteromonadaceae bacterium 2052S.S.stab0a.01 OX=1304900; GN = K256_3205 PE=4 SV=1
MQFNVKKIVVLGGGTAGWSAAALLARQFQPSAVEIVLIESPNITPIGVGEATVPAILNVHNHLQIDEREFLKATQATFKLGIEFRDWRSVGQDFFHPFSNFGVPIEGVDFHQCWLRLNQAGKRTNLQDYSLCTALAKAGRFAIPDNESPNSLAWYGYAYHFDASLYAQFLRDYSEKRGVRRLADTVVGVDKDPQTHFVKSLALESGESLAADFFIDCSGFNSLLLEGQYQVGYEDWSHWLPCNRAWAVQTESDGELLPYTTSTAMSAGWRWRIPLQNRTGNGYVYSSAFTDDDRARTEFLETLQEPMITEPRLIQFTAGMRPNFWVNNVAAVGLSSGFIEPLESTSISLMHTGIGKIIAHMPELVVTDAAIAHANEQNRMEYERIRDFIILHYWASQRDDTDFWRSVRSTPLPDKLEAKIQQFLRDGSMLSYEQESFRDPSWLAMYNGFGLNPAACSEAAEKLSPDMIENIFEKIGSAIVKGVDQAPSQQEFLKTL

SEQ ID NO: 82933 - protein, 505 aa, Asticcacaulis taihuensis
  REGION 1..505: note = tr|A0A1G4SPK2|A0A1G4SPK2_9CAUL Tryptophan halogenase; OS = Asticcacaulis taihuensis OX=260084 GN=SAMN02927928_2789; PE = 4 SV=1
MPAEPIRKLVILGGGTAGWMAAAMASRTWGKRLNITLVESEAIGTVGVGEATIPPLIKLLRFLGLDEDVTLRNIQGTFKFGIEFDGWRRKGESYMHSFGTPGAPIGIVPFYQYWLRRHLAGEDCGSLWDYSLNTQVSYAGKMSREPRIEGNLPGPERAFHFDAGLLAQFMRRGCEASGVVRHEGKVSGVNLRPEDGFIESLTLDSGEVIAGDMFIDCSGFVGVLIEGALKAGYEDWTHWLPCDRAVAVPCTLPADKSVGILPYTRSTAHVAGWQWRIPLQHRTGNGHVFCSGAMTNDEATRILLENLDGEPLADPRVIGFRTGRRKATWVKNCVALGLASGFMEPLESTSIHLVQSVMTRFLDFFPDKDFNPVEIEEFNRRCRREYEYIRDFLVLHYHANERDEPFWRDCRTMAIPDSLAHKMDYFRQHGRLLVEEGDLFREDSWVQVLIGQGIMPKAASPLTETVGQEALASFMSGMKMAMDKAVTAMPSHDAFIARHCAATTV

SEQ ID NO: 82934 - protein, 441 aa, Actinosynnema pretiosum
  REGION 1..441: note = tr|A0A290Z6K7|A0A290Z6K7_9PSEU Tryptophan halogenase; OS = Actinosynnema pretiosum OX=42197 GN=CNX65_16200 PE=4; SV = 1
MLDAIVMGGGPAGSVCAAVLARQGRSVLVLERQEFPRFHIGESMLPYMVGLLERHGLLDAVREQGYVVKRGGEFIDPTGTKFFRAGVFRADFAKTGDGRHHETFQVERSHFDRVNLDQARAAGATVREGAQVVGLLEEGGRVVGVRYREGGVEREERARYVVDATGRAGVVANRFGLRRMIEDLRMVAVFHHRDGLDEAHNPGHEGDIQVGSHSDGWIWAIPLSADRISVGTVMHRDRLRGRTPAEAFAEHVERVPRINQRLTGTSATSDFWVETDYSYHSDQVTGPGWVMVGDAGCFGDPMFSGGVLVGMATGAEAAEALGRALDSPADEEQALTGYSNFFKTGYDTYVRLIFSFYEGELLPALAEAHSEAGNLSEADMEMYVVRLLGGDFWSARNPVANALRANPAWSTFSPFEPVHRCPVYPELDVAELGGLAGTVGR

SEQ ID NO: 82935 - protein, 505 aa, Sphingopyxis sp.
  REGION 1..505: note = tr|A0A1G3JYW4|A0A1G3JYW4_9SPHN Tryptophan halogenase; OS = Sphingopyxis sp. RIFCSPHIGHO2_01_FULL_65_24 OX=1802171; GN = A2885_16455 PE=4 SV=1
MAKTVERVVIVGGGTAGWLAAARLAAARPTLNVTLIEAPDIPTIGVGEGTWPTMRATLAAIGISEGEFLAACDGSFKQGSRFDFWVDGAADDRYLHPFTAPPALPTGELLAAWQATAADRSFGAAMTAQAAVCDLDLAPRQRAMPDYQGAANYAYHLDAGKFAALLRDHATRRLGVRHLADHVTAVTRGEGDTLTAVATRAHGEIAGDLFLDCTGHAALLIGGELGVEWIDRSDTLFNDRALAVQVPVAEGSAIASQTISTAHRAGWIWDIGLPGRRGIGCVYASRFLGDDAAEAELRAYIARVLPGAPDVPVRRLSFPTGHRARFWQGNCVAIGLSAGFIEPLEASAIVLIELSLNALIDNFPASASAMPIHAERFNTLFRYRWDRIVEFLKLHYVLSKRPEPYWLAQRDPASVPQRLTDMLALWQEQPPSAWDFPQVDEIFSAESHQYILYGMGYPIPPGLVASDRAVAALAEQRQRARSLASALPTNRDYLDALTATATAAE

SEQ ID NO: 82936 - protein, 498 aa, Sphingopyxis sp.
  REGION 1..498: note = tr|A0A1G3JYT1|A0A1G3JYT1_9SPHN Tryptophan halogenase; OS = Sphingopyxis sp. RIFCSPHIGHO2_01_FULL_65_24 OX=1802171; GN = A2885_16440 PE=4 SV=1
MTDKKQRIVIAGGGTAGWMAAAAIARTMGNAVDLTLVESEAIGTIGVGESTIPPLVNYNRLLGINEADFMRATQATFKLGILFDHWREPGHRYFHSFGLTGKDHWSAGFQHFWLHGKTRGHEQSYDEYCMELVAALEGKFAHLPNEGINYAYQLDSGLYARFLRQMAEGDGTKRIEGKIARVELDSESGDIAALVLDGDRRIEGDLFLDCTGFRALLIEGALHAGFDDWTHWLPCDSAIALQTPNVRPPVPYTRAMAHDAGWQWRIPLQHRTGNGLVYCSRYLDRDAALDRLLGNIEGEALTEPNFLRFTTGVRRRQWYRNCIAVGLSSGFTEPLESTSIHLIQRAVLRFIRMLPLGKVSERDIAEYNDQQMQDNLQIRDFLILHYKATERRDSAFWRQCADMPIPDSLAQKIELFRETGRVFRKNEELFAENSWVQVMMGQGIAPQSHHPIATKLSDEELARFLGGIRDNVRDTVAKLPEHHAYVARYCGAAVPQAA

SEQ ID NO: 82937 - protein, 301 aa, unidentified
  source 1..301: note = Acetobacteraceae bacterium
  REGION 1..301: note = tr|A0A4Q4BP83|A0A4Q4BP83_9PROT Tryptophan 7-halogenase (Fragment) OS=Acetobacteraceae bacterium; OX = 1909293 GN=EON48_16680 PE=4 SV=1
RIEADFFIDCSGFRALLIGKALGVGYHDWSPWLLCNRAVALQVSNPTPPGPYTLAHAQDAGWCWRIPLQQRSGVGYVFCDRFVSDDEALANLLSQAEGEPVVDPWIIPFKTGMREKLWDKNVLSLGLAGGFIEPLESTALHLIYRGMDFFIRYLPDKDCDPNLITEYNRRMGQDYEEIRDFVIMHYATTRRDDNAFWRECRDMEMPESLQSKIDLFKVNGTVREGVDLMFRNVSWQSVLEGMGQHPRGYHPLMNRIAFDGMPRYLDQGAAMIRKAVEGLPTHAEFLDAHCTAPSPDWLAPV

SEQ ID NO: 82938 - protein, 519 aa, unidentified
  source 1..519: note = Flavobacteriaceae bacterium
  REGION 1..519: note = tr|A0A2E2ZDU9|A0A2E2ZDU9_9FLAO Uncharacterized protein OS=Flavobacteriaceae bacterium OX=1871037; GN = CMC73_07755 PE=4 SV=1
MNQLKLKTAETLRKLKTNPNNIVIVGGGSSGWMTAAILCTRFPNKNITLVESPDIPTVGVGESTLGSINLFFNLLGLEDKDWMPYCNATYKLAIQFTDFYKKGETFYYPFGDKDFSNSRGIDDWMIKKANNKDLSIKDYYDTFYSIMPFVYDNKIPATKVGNFNFTKDAAYHMDAAAFGEFLKEKICIPKGVKYIQDTIQDVKLQDNDVHCLKCNNHTVHGDLFVDCSGFRSLLLEQTMKVPFTSFKDHLPNDRAWTCHLPYDDKDAEIENVTNCTAYNNGWIWNIPLYHRAGSGYVFCTDFISEDDALIEYKQYIQQLGKDTDKLKFRLVKIKNGRHDVCWKNNVVGVGLAYGFIEPLESTGLLSTQEMLLALCETLYNDNVGSLQVKNFNYFCANMLDTFKEFVAYHYIASSRKDTEYWKHVTENISIDSDASIDLAHNYTVNHTTPNDSAGLPDILVGMHYYSHNPLSVDWTSFVTGSPLVTSKNWENTVSQKNRLYQSISDKSLSHYNYLERFIY

SEQ ID NO: 82939 - protein, 493 aa, unidentified
  source 1..493: note = Flavobacteriaceae bacterium
  REGION 1..493: note = tr|A0A2E5ZPJ4|A0A2E5ZPJ4_9FLAO Uncharacterized protein OS=Flavobacteriaceae bacterium OX=1871037; GN = CMC89_03020 PE=4 SV=1
MKVVVVGGGTAGWLAALMISKIRPEHDVTVIESSKIGIIGAGEGSTGSLTNIVQNEMWNLGCVEQDFIRECDATIKLGIKHIGWNKDTKSHYYGPIDGSPTSGDVVDIVFQNALGYREQDMLHISTELGYKIHHNKNSFVENKGNHAYHFDAHKVGQYFKKVCDTVKHIDSEVDDVIQDKEKGWVTELKLSNGQTVQGDMFIDASGFNQVLMRAVGSKWKSYKDNLPVNSALPFLLPYEDDEVIEPVTNAWAQKNGWCWQIPTLNRRGCGYVFCADFVTPDKAQEELEQTIGKKIDPIRLLTFDSGRQEKLWIKNVLSVGLCAAFAEPLEATSIHTTIFQLKHFVFGCLGKDRDETCNVGQIDDYNDKNGHLYDTLKDFLVAHYTCGRNDTEFWKYIDSGKTTTDFVRTMHEVCKNRVPNHTMFPRHEGCAGWPLWSYVLAGTGKLTDKICRRELHFNNDARISDTAYVYHVAQHDGKTMHLPSNTDYIRDMQ

SEQ ID NO: 82940 - protein, 501 aa, Sphingomonas sp.
  REGION 1..501: note = tr|A0A0Q4KSG7|A0A0Q4KSG7_9SPHN Tryptophan halogenase; OS = Sphingomonas sp. Leaf34 OX=1736216 GN=ASF00_14345 PE=4; SV = 1
MTEQRVKKVVIAGGGTAGWLAAAALSRQLGQLLDITLVESDEIGTIGVGEATIPTMRSFHAILGLDERKFMRETQATFKLGISFENWARDGDRYIHSFGDLGKSTWMGDFHHFWLAAKAAGDPSEIGDYCLELQAAKAERFALPSEGEIHYAYHLDAGLYARFLRARSEANGLKRIEGRIASVDRDGETGFIRALVLDSGERVEGDLFIDCTGFRGLLIEGTYAAGYEDWSHWLPTNSALAVQSAATGPAHPYTRAIAHDAGWRWRIPLQHRVGNGLVYASDHLSDDEAHARLLSAIDGAPLTEPRLIRFRTGRRRQVWMGNCVALSLASGFVEPLESTSIHLVMTGVTRLMQAFPFGGIAPAAVTRFNEQAQAELERVRDFIVLHYHLNERTEPFWAARRDMPIPATLVERIALFAEAAQAYQGGEDLFRVASWVQVMLGQRLAPRDHHRLGSIMGGAQLAGVLTNIRSTIADAVAGMPMHQQFLDRYLPAPAVSAAQIR

SEQ ID NO: 82941 - protein, 528 aa, Sphingomonas sp.
  REGION 1..528: note = tr|A0A4Y8ZSR1|A0A4Y8ZSR1_9SPHN Tryptophan 7-halogenase OS=Sphingomonas sp. 17J27-24 OX=2555898; GN = E2493_13085 PE=4 SV=1
MNDTGPGEPLRKITIVGGGTAGWMTAAVLSRWLSQVEIKLIESDAIGTIGVGEATIPHIRNYFALADIDVAKMIDAAKATFKLGIQFVDWGAPGETYFHGFGRIGRDMLWLHTHQLWLAARERAPGSVKDFDRYSISAQAALRNRFMFPDPRDRTSPLADYEYAYQFDASLFARLLREESEARGVERIEGRIVEVRRNSETGFVEQLRLEDGREVDGELFVDCSGMRALLIGEALGVGYDHWDRWLLCDRAMAVPCESVAPLTPYTRSTAKRAGWQWRIPLQHRIGNGYVYNSGMIGDDEVADALLASLDGTPTADPRPVRFAPGRRLKAWEKNVVAVGLSSGFLEPLESTSIHLIQTAIQRLLALFPARGLCAPDIDEYNRQSRDEYEDVRDFVIAHYKVTRRSGDPFWDHVRTMDVPDSLAERLELFRSSGRFFKHGAAELFAEESWVQVLIGQGFEARADPVTRFVGTEDLVHYLDDMAAVMSDVAGRMPEHAAFLSRLPASGAGRGASAGGPPKIDLGFEAARR

SEQ ID NO: 82942 - protein, 498 aa, unidentified
  source 1..498: note = Sphingomonas pokkalii
  REGION 1..498: note = tr|A0A2U0SF58|A0A2U0SF58_9SPHN Tryptophan halogenase; OS = Sphingomonas pokkalii OX=2175090 GN=DD559_12305 PE=4; SV = 1
MDDPSTIVIAGGGTAGWMAAAALARFAGTGWRIRLIESDAIGTVGVGEATIPQIRLFNAGLGMDEAEFLRATGGTIKLGIEFAGWNGEGSRYLHAFGTIGRGLGLIEFQHYWLRAHAAGTALPFSAYALNNEAAHAGKAARLDGQGPIPAMPYAYHFDAGLYAAFLRRYAEARGVERHEGRIADVERGPAGIAALRLDDGRRIAGDLFIDCTGFPALLMAALGVGYTDWSHWLPCDRAVAVPSARTAPLLPYTRATARGAGWQWRIPLQHRTGNGLVYARAHCSDDEAMATLLANLDGDALTDPRPLRFTTGTRDCFWQANCVALGLAAGFLEPLESTSIHLIQSGIARLLQFLPRGQATNAARAEYNQLTQFEYAAIRDFLVLHYHANGRTEPLWQACRAMALPEELARKIALFRATGRISRREDELFAEPGWLQVLLGQGIVPDRWHPFADQLSDAELTMFLGTIRTMIERTTAAMPSHAGFLAGIDAVQKEVEPA

SEQ ID NO: 82943 - protein, 505 aa, Caulobacter sp.
  REGION 1..505: note = tr|A0A2R7L689|A0A2R7L689_9CAUL Tryptophan halogenase; OS = Caulobacter sp. HMWF025 OX=2056860 GN=DBR10_16630 PE=4; SV = 1
MADTAIKALTIVGGGTAGWISAALLSRTLGPSVTITVVESEEIGIVGVGEATIPAIRLLNGLLGLDEDDFLAATNGTIKLGIEFVDWHTVGQSYLHAFGPVGRPLGMAPFHHYWLRRRQAGHAESLWDYSLNARAAKGGKFDRIGQVGGGYLEGLVYAFHFDAALYAQYLRRYSEAQGVTRVEGRIVGVDQHPETGFVTGLTLQDGRKVGGELFIDCSGFRGLLIEETLKSGYEDWRSWLPMDSAIAVPCASATPLTPYTRATAREAGWQWRIPLQHRTGNGHVFCSDHIDAARATDVLMANLDGAPLAEPRQLKFTTGRRKQFWNRNVVALGLASGFMEPLESTSIHMVQSALNRLLALFPDRSFNPVEIAEYNRQTAAEYEYIRDFLVLHYKASTREDTPFWQAMRRMEMPDSLKARIELFSQSGRLFSQDDDLFKEASWIQVLIGQGVIPEAFHPLTGVVTDAQLDDYLGNLRQIMSRAVEALPAHGDFIARTCPSRSRPAA

SEQ ID NO: 82944 - protein, 491 aa, Caulobacter sp.
  REGION 1..491: note = tr|A0A2R7L9B1|A0A2R7L9B1_9CAUL Tryptophan halogenase; OS = Caulobacter sp. HMWF025 OX=2056860 GN=DBR10_13465 PE=4; SV = 1
MTALPLGRVAIIGGGVEGWMTAAGLARATGGRASLRLVETGPGPRGALSTLPSLRSFHALLGLDEAALMAATQATFKLGTRFSGWTPGTSFCNAFGELGASLEGVGFHHYWTRLQQAGGAPPLDDFNLAAVMARSGRFSPPASDPRSPLATLAYGLHMDAGAYVAVLRDLATRRGVAVSHGAVGEVLRRETGDIAAVILAGGERIEADLFVDCTGAEARLIGSEPFEDWSSLLPANRSLRLRAEVRRDAPALTEIEAAAEGWRWRIPLRDGVESGLTYRQDLTDDETALKAARTGLPKHGLSDPEVTPLRNGRRTRSMAGNCVAIGTSAGVVEAMDAADLHLVQSGVTRLIALFPRPGDAAVAAAEYNRLGEETLLRVRDLAITHYRLGQRTDGALWALGRNGPVPEPLAYRLAQFESRGRVVMYDEETFLEPHWIATLIGHGLLPRRYDPLADRMPLEKTRAMLERMRLIFRQTAESLPTHAAALAGLAP

SEQ ID NO: 82945 - protein, 516 aa, Caulobacter sp.
  REGION 1..516: note = tr|A0A2R7L610|A0A2R7L610_9CAUL Tryptophan halogenase; OS = Caulobacter sp. HMWF025 OX=2056860 GN=DBR10_17015 PE=4; SV = 1
MCGTRKPSPQQSGRLVSRPVRNVVIVGRDAAAWLTALGLKRAFGRQGVNVTVLELPSMVRSADVLVGLPTLEGLHRLLGLDTDDMLAATAGAYALGQQFANWSQARPPFVHAYDTHGAPIHRIDFLQHWLKARSEGMNVPLEEFSLGAAAAKHGRFVVHGDATSGFSKARAGYHLDASAYIRLVRQKAIELGVQRQAGTLGEVVRSDSGIVSVSLAGGEPLAADLFVDASGVDAVLIGKVLEQPLESWSPWFGCDRVLVTSGPKLNPLPAMSRISGFKAGWIGMFPLRDRTPVVAAYDSRRISDAEMLQSASVLCGMRLGDAFVAPCEPGMRSAPWTGNCVAIGEAAVVLEPLDAASLHMIHVGLSHLITLFPVSAEAMLEAEPFNTSMQNHARNLRDFQIVHYRLNGRLDEPFWDRARETPPPPELAAKLDLFAARGAVALYDDETFQEENWASVLIGHGLIPRGYDPQVDTLAPDELIAAFQRMLGFIASTVRDMPSVEAQLELFAPLPSNASF

SEQ ID NO: 82946 - protein, 538 aa, Pseudomonas sp.
  REGION 1..538: note = tr|A0A285GB81|A0A285GB81_9PSED Tryptophan halogenase; OS = Pseudomonas sp. LAMO17WK12:I10 OX=1286371; GN = SAMN05660489_01224 PE=4 SV=1
MNKPIKNIVIVGGGTAGWMAASYLIRALQQQANITLIESEAIPRIGVGEATIPSLQKVFFDFLGIPEREWMPQVNGAFKAAIKFVNWRKSPDSSRDDHFYHLFGNVPNCDGVPLTHYWLRKREQGFQQPLEYACYPQAGALDGKLAPCLPDGTRQMSHAWHFDAHLVADFLKRWAVERGVKRVVDEVVDVHLNERGYISSLFTKEGRTLEADLFIDCSGMRGLLINQALKEPFIDMSDYLLCDSAVASAVPNDDAREGVEPYTSAIAMNSGWTWKIPMLGRFGSGYVFSSKFTSRDQATADFLNLWGLSDNQPLNQIKFRVGRNKRAWVNNCVSIGLSSCFLEPLESTGIYFIYAALYQLVKHFPDTSFDPRLSDAFNAEIVYMFDDCRDFVQAHYFTASREDTPFWLANRHDLRLSDAIKEKVQRYKAGLPLTTTSFDDSTYYETFDYEFKNFWLNGNYYCIFAGLGMLPDRSLPLLQHRPESIEKAEAMFASIRRETERLRTSLPTNYDYLRSLRDGDAGLSPSQRGPTLAAQEIL

SEQ ID NO: 82947 - protein, 504 aa, Caulobacter sp.
  REGION 1..504: note = tr|A0A2R7L936|A0A2R7L936_9CAUL Tryptophan halogenase; OS = Caulobacter sp. HMWF025 OX=2056860 GN=DBR10_13455 PE=4; SV = 1
MNIDNRLRSIVIVGGGTAGWMTAAALGRFLTKDGQTRVTLVESDAIGTVGVGESTIPQINIFNRMLGLDENEFVRRTKATFKLAIEFRDWERIGHSYHHPFGPYGLDMEAVSFHAYWLKLHAMGEDDDLGAYSLQAVGARQDRFMRPNGQANSPLGAIAYAFHFDAGLYARFLRDYAEARGVRRREGRITSVQQDGLNGHVTSVILESGEAVEGDLFIDCSGFRGLLIEETLHSGFEDWSNWLLNDRAVAVPCASGGSFSPVTRATARPAGWQWRIPLQHRIGNGYAYSSAHISQDEAAAYLLSHLDGEPLAEPNHIRFKAGRRKKSWNRNVVAIGLAAGFMEPLESQSIHLIQVGISRLLAMLPDRDFRQPDIDRYNRVMAFEYEKIRDFLILHFKATSRNDTPYWDYLREMAIPDYLADKIALFESYGRIFRENEELFNDTSWFSVMVGQGLRPRGYDPMVDVMPVEELRARMADIRTVIARSAEVMPDHRAFIRDHCDAMA

SEQ ID NO: 82948 - protein, 511 aa, Sphingomonas sp.
  REGION 1..511: note = tr|A0A4Y8ZSU2|A0A4Y8ZSU2_9SPHN Tryptophan 7-halogenase OS=Sphingomonas sp. 17J27-24 OX=2555898; GN = E2493_06890 PE=4 SV=1
MNGEPIRNIVIVGGGTAGWMTAAAAARFLAGGGKRRIRLIESAEIGTVGVGEGTIPPMIEFNQQLGIPEADFLRETKGTYKLGIDFVGWGAEGERYFHPFGKLGLNLNGVDFHQLWLKHRSNPAVGPITAYSISALAAQEHRFAHPDKSGRSALTNIGYAYHLDAGLYAAMLRRYAEAGGIERIEGRIVDVARDPQSGHVTAVTLADGQRIEGELFIDCSGFRSLLLGQTLGVAFEDWSHWLPCDRAIAVPSARREPITPFTRSIAHKAGWQWRIPLQHRTGNGHVYSSAYLGDDEAERILVEHLDSAQIGNFNRLRFTAGRRARSWEANVVAIGLSSGFLEPLESTSIYLIQYGIHRLFSLFPDTGFAEAERREYNRFMSESYEAVRDFIILHYQATRRPEPFWRDVRAVEMPDSLRRKIELFADKGRIFRYSDELFELPSWVAVMLGQGIVPSGHDPLADSLPDDQVVAAMAELRKGYAKIAGQLPTHESVIGQALAAAGGQQAVRQSL

SEQ ID NO: 82949 - protein, 500 aa, Robiginitomaculum sp.
  REGION 1..500: note = tr|A0A2G2J3M1|A0A2G2J3M1_9RHOB Tryptophan halogenase; OS = Robiginitomaculum sp. OX=2030823 GN=COA69_06195 PE=4; SV = 1
MSNNRIRKVVIVGGGSAGWMTAATLSKLLKDKFCDIELIESEQIGTIGVGEATIPLIGTFNRTLGIDETDFVKATKATFKLGIQFENWGRIGDKYFHPFGPYGLDMGGVSFHAFYQKRHPEHRHELLEQYSLQALAAKQNRFMRPVNAGNSPLSTIAYAFHFDAGLYAQFLRGHAEGRGVKRTEGKVVDVTQRDADGFIESVTLEDGQIITGDLFIDCSGFRGLLIEQALKTGYNDWGHWLPCDRAVTVASESLDVLRPYTRSMARDAGWQWQIPLQHRVGNGHVYSSKFMEDDVAQDVLMSTLESKPLADPHLIRFSTGHRKKFWNKNCVAIGLSAGFLEPLESTGLHVIQSGISSLLQMFPTREFNQIDIDRYNRITTFEFERIRDFIILHYHATQRDDTDFWNYTRTMSIPDYLVDKMAVFKSQGRIFRENEELFNDTSWFSVMMGQNFVPDQYDTVADVLSTEETTEKVDHIREVIATSVTHMPLHADYIAKNCTG

SEQ ID NO: 82950 - protein, 504 aa, Sphingomonas sp.
  REGION 1..504: note = tr|A0A0Q4KNQ2|A0A0Q4KNQ2_9SPHN Tryptophan halogenase; OS = Sphingomonas sp. Leaf34 OX=1736216 GN=ASF00_11485 PE=4; SV = 1
MANHPLRIVIAGGGTAGWMAAATFARFLETGYEIDLIESDAIGTVGVGEATIPQIHLFNDALGLDEGAFLRATGGTFKLGIEFVDWFKPGHRYMHAFGDVGRDVGLLPFHQYWLRARSLGLAGDLGAYSLNTHAALAGRMQRGPARTARTLPSMPYAYHFDAGLYARYLRRYAETRGVNRIEGKIVRVTRDGESGDVSGLVLENGTTVAADLYIDCTGFRGLLIEEALGTGYEDWTHWLPCDRAIAVPSARSEKFTPYTRSTAHGAGWQWRIPLQHRTGNGVVYSSAHLSEDEATATLLRGLDTSAMADPRTITFRTGRRKRMWNHNVVALGLAAGFMEPLESTSIHLIQSAVARLLKLLPGRVIAEVDRAEFNRQSDFEYERIRDFIILHYKATARDDTAFWRACRDMAVPDTLAAKIELWRGNGHIVREHEELFTEVGWLQVLAGQGIVPDGHHPLADAISTADLGEFMDTIDKLNAREANQMQDHAAFVAQHCAAAPSLAA

SEQ ID NO: 82951 - protein, 494 aa, Sphingomonas sp.
  REGION 1..494: note = tr|A0A4Y8ZV02|A0A4Y8ZV02_9SPHN Tryptophan 7-halogenase OS=Sphingomonas sp. 17J27-24 OX=2555898; GN = E2493_02445 PE=4 SV=1
MRRVVIAGGGTAGWMTAAAIAKTMGRTVAVTLVESDAIGTIGVGESTIPPLQIYNRLLGIGEAEFMRETQATFKLGILFDHWKQVGHSYFHSFGMTGKDHWAAGFQHFWLYGREKGHAQSYDDYCLELIAALQGRFAHLPDNRMNYAYQLDSTLYARFLRTLAEKEGTRRIEGKIAQVELDGASGHIAALSLESGERIEGDLFVDCTGFRALLIEGALHAGHDDWTHWLPCDSAIAVQTESVRPAVPYTRAMAHDAGWQWRIPLQHRTGNGIVYCSRYLDRDAALERLLGNIEGQTLTQPNFLRFAAGARRRQWHRNCVAIGLSAGFMEPLESTSIHLIQRAVLRLLRLFPEGGISEADVAEFNEQQDADMLQIRDFLILHYKATDRRDSPFWRQCADMPVPDSLAHRIELFRETGRVFRKNEELFAENSWVQVMMGQGIMPRRHHPVAERLSDEELDQFLSGIRESVERTVASLPEHAAYIQHYCGAGRAQAA

SEQ ID NO: 82952 - protein, 490 aa, Sphingomonas sp.
  REGION 1..490: note = tr|A0A0Q4KNL4|A0A0Q4KNL4_9SPHN Tryptophan halogenase; OS = Sphingomonas sp. Leaf34 OX=1736216 GN=ASF00_11495 PE=4; SV = 1
MTACLIAHRWRARGMRVTLVESPEIGIVGVGEGSTPQLKHFFDTLGIAENAWMPACDATYKLGIGFEGWSDRAGYDRYFHPFPTALDGHTAPQFFYNTRALRTGRDVEAHPDRFLLPARLAAAHCAPQPAESFPFEVSYGYHFDAYKVGAFLAAHATGTLGVAHLQRRIASVERTPTGQITALIDTDGVRIAGDFFVDASGFRSTIFAALDVPFVSYADTLFNDRAVVMPTAHAPGAPIPSQTRATALSAGWAWHIPLTSRNGNGYVYSSRHLTEAQAEAELRAHVGAEAGEARHLKMRVGRVRDSWSHNALAVGLAQGFLEPLEATALHLVIATVEALLDGVDGGGATDAVRSAFNTRIAARYDGVRDYIVAHYRLNQRHDDPTGYWAQARGIEALSDELKMLMSAWFTGADMVAAIDRAGLARYYSAISWHCLFAGYGTFPEPARLIPPGADIDPVAMPRIDDFLTRCAMNFGLHASRLRPADLKDFA

SEQ ID NO: 82953 - protein, 508 aa, unidentified
  source 1..508: note = Sphingomonas pokkalii
  REGION 1..508: note = tr|A0A2U0SAZ3|A0A2U0SAZ3_9SPHN Tryptophan halogenase; OS = Sphingomonas pokkalii OX=2175090 GN=DD559_03405 PE=4; SV = 1
MQGRRRILIVGGGTAGWLTAAYLARYLEIAQQPAFEIRVLESPELGIIGVGEGAFPTLRATLAFLGIDERAFVRAASATFKQGIRFDDWRHAPLPDGTRHRFLHPFEAPLYAEGAGLVPYWLLQPEATRPPFAAAMTIQNRVIEGGRAPKRAEEDPFGGALPYAYHFDANRLAALLQARAIELGVGHIEGRLVGVEPDGMGGIARVLTREHGALAADLYVDCSGFEAALIGKALGSPFHSVRHVLFADRALACKIAAETPDGPIQPVTIAAAHAGGWTWDIGLQAARGIGCVYSSAHLRDDDAAAVLRAHIGHDRFSARTIPFEPGFRRVQWVANCVAVGLSAGFVEPLEATGLVFIETAAAMIAELFPHAGPIDAPAARFNARMAARYLRIVDFLKLHYCLSRREEPFWRDNADAASIPDSLAALLEQWRFRPPSRFDFVIDHESFAYFNYQYVLYGMGFHTDLSAGRAAFPNDAAAARRFARIRSFGAQAVADLPAHRDLIRQLGG

SEQ ID NO: 82954 - protein, 503 aa, Caulobacter sp.
  REGION 1..503: note = tr|A0A2R7L6A7|A0A2R7L6A7_9CAUL Tryptophan halogenase; OS = Caulobacter sp. HMWF025 OX=2056860 GN=DBR10_17010 PE=4; SV = 1
MSAQRIRDIVIVGGGTAGWMAAAALAKVMGTQAYTITLVESEAIGTVGVGEATIPMITMFNNVLGIDENEFVRETNATFKLGIEFAGWRREGHSYFHPFGQFGVDMDGVNFNHYWLRWMLSGGSNDYGRFNAETEAARQRRFGRTGHGPQTSLPNINYAFQFDASLYAAYLRRFSEKRGARRIEGQIVKVDRNGQTGLIERLTLKDGQTVQGQLFIDCSGFRGLLIEETLQAGYEDWSHWLPVNRAAAVPCAKVEEPIPYTRSTAREAGWQWRIPLQHRTGNGYVFCDSFISEDEATRLLMSRLDGEAQAEPRMLRFVTGRRRKSWVGNCIALGLASGFMEPLESTSIHLVQVGISKLLAMFPKGGFNPLITDRYNAEMEADYINIRDFLIAHYKVTEREDTPFWRYCKNMDIPDSLATRLEIFRTRGEAMVVQHELFKEQSWFAVLAGQGLMPVDYHPVADLLSEDELKLRLAKIRTGIQDRVSGLPTHQAFLDSCARAPAA

SEQ ID NO: 82955 - protein, 534 aa, unidentified
  source 1..534: note = Sphingomonas pokkalii
  REGION 1..534: note = tr|A0A2U0SF68|A0A2U0SF68_9SPHN Tryptophan halogenase; OS = Sphingomonas pokkalii OX=2175090 GN=DD559_12275 PE=4; SV = 1
MNEHSIRDVVIVGGGTAGWMAAAAFSRFLNNGYTRITLVESDEIGTVGVGEATIPPILRFNQMIGLDENEFLAATGGTFKLGIEFVDWGGLGERYFHPFGNYAQDLQGVHFHQLYLRERARRPIPDIAAWSMSAVAASLGKFGRPSASAQSPVRELFYAFHFDAGLYAQLLRRLSESRGIVRVEGKITDVTLRPEDGYVQSVTLADGRTIAGDLFIDCSGFRGLLIEEALETGYEDWRHWLPCDRAVAAPCANVREPDPFTRSTAHAAGWQWRIPLQHRMGNGLVYCSDYLDDDTAEQQLLAALEGPLLADPRRIRFTPGRRRESWSRNVVALGLSSGFLEPLESTSIHLIQSGIARLIALFPDKRFDPIERFEYNRQMRDLYEDIRDFIILHYKATTRTDSPFWNRVRTMEIPESLAHKIALFEHKGRLFREGNELFTTTSWVAVCLGQHIVPREHEPAADALDEKLVAQALEQMRLGYWDTAQKMPSHAEFLARIAPQPVSQTPPSPPQAADALPVFSFAQDAPFAPPGSPV

SEQ ID NO: 82956 - protein, 505 aa, Robiginitomaculum sp.
  REGION 1..505: note = tr|A0A2G2LGZ2|A0A2G2LGZ2_9RHOB Tryptophan halogenase; OS = Robiginitomaculum sp. OX=2030823 GN=COA85_12160 PE=4; SV = 1
MQNRRNLRRIAIVGGGSAGWMTAAALANNLHGNCAVELIESDQIGVVGVGEATIPPIKHFNQALGIDEREFLTHTNGSFKLGIQFVDWAHKGKSYFHPFGQYGADFDSIPLQHYWLREHQKGKAPSLDEFSLAWVAANMGRFDIPMTDKRRVQSTYDYAYHFDAILYGKHLRKYAQERGVIRSEGKVVDVNLDADSGFIDHLVLEDGRLIEADFFIDCTGFRGLLIEQALKTGFEDWSHWLPCNRAMAVASENTGPLLPYTRSTAQSAGWQWRIPLQHRTGNGYVYCSDYLSDDEAATQLLDQLDGKPIGDPRPIRFTTGRRKKFWHKNCLALGLAAGFMEPLESTAIHLVQTGITRMLALFPDRDFNPLAIEEYNRITANEYEWIRDFIILHYHANTRDEPLWRASANMSIPDALRYKIDHFRTYGRHVSEGAELFANPSWLAVFIGQNIMPEKYAPLVDERTHIDAPRLMAGLHRVIGEAAGAMPSHNDFIAQNCPAPRTGGQ

SEQ ID NO: 82957 - protein, 533 aa, Streptomyces sp.
  REGION 1..533: note = tr|A0A4R7HI14|A0A4R7HI14_9ACTN Tryptophan halogenase; OS = Streptomyces sp. BK141 OX=2512171 GN=EV588_102560 PE=4; SV = 1
MTDNDSRIRKVVILGGGTAGWMTAAYLGKALQGTVDIQVLEAPAIPRIGVGEATVPNLHRVLFDYLGIPEEEWMRECNASFKMAVRFVNWRTPGRGEPGARTLEDGRPDHFYHPFGILPDHDNTPLSHYWFKNKYEGSTDQPFDYAVFREPPVMDAKLSPKWLDGTPSTRYAWHFDAALVADFLRRFAVEKQGVEHVQDEMVRAEQDERGHVTALHCKSGRVMDADLFVDCSGFRGLLINQALGEPFLDMSDHLMCDRAVATAVPHDDEANGVEPYTSAIAMSSGWSWKIPMPGRFGSGYVYSSKFTTQEEATAEFCEMWGLDPNETKFNHVRFRVGRNRRAWVNNVVSIGLASCFLEPLESTGIYFITAAIYQLAKHFPDRSFNPALVDSFNNEIEEMFDDTRDFIQAHFYYAPRNDSPFWRAQKELVLPENIQKKIEAYKAGLPINSPIADESTYYGNFEAEFRNFWTNGSYYCIFAGLGLEPDTPLPALAHKPESVAGAQSLFEQVRQQQEHLLQTLPSAHDYLRRLHGK

SEQ ID NO: 82958 - protein, 543 aa, Idiomarina taiwanensis
  REGION 1..543: note = tr|A0A432ZK74|A0A432ZK74_9GAMM Tryptophan 7-halogenase OS=Idiomarina taiwanensis OX=337250; GN = CWI83_04125 PE=4 SV=1
MQKKKVLIVGGGSAGWMAAAYLNGALNQRGERPRVDIQLLESPDTPRISVGEATIPSMRHLLSVVGVDELDFMKSTNASFKQSIRYTNWVHNDMSFYHHPFSSMRRQPLDRAGMDWLMSDQSIPFMETCSVQPILCEWGLAPVMLGKWDMGAPLNYAYHMNAQKFADYLRDFSTPRGVVHTLANMVDVVMRDDGHIAAVRTDKGETIEADLFVDSTGFSAQLIEQQIGVGFEDCSQYLLCDRAVTMHLPYETHFPGMVRPYTTATALSNGWIWDIPQNDRRSIGYVHSSAFIDKEAAEREMRAYQGGNTDDLPARFVDFKVGRRKQIWSKNVIAIGLAGGFIEPLESTGLYLSDLGAVLLAEHFPWHDDGMEQLASRYNHIMSNRFYEILDFINMHYCLTKRTDTEFWKTVQLREHITDRLQAKFDFWRFKPPTPHDFQDQWFSGMSQAPQAADLCSHDRRPAVDTGGLWNHESYECILFGMEFLKEESEQWFGPNRPATQVHPAIIQRLQMARQKLPPHHIWLNRVLGMPQYPMAYKPVGWG

SEQ ID NO: 82959 - protein, 518 aa, Caulobacter sp.
  REGION 1..518: note = tr|A0A2R7LBQ7|A0A2R7LBQ7_9CAUL Tryptophan halogenase; OS = Caulobacter sp. HMWF025 OX=2056860 GN=DBR10_12140 PE=4; SV = 1
MERRRSILIVGGGTAGWLTAAYLARSLRIAEQGHLEITLLESPEVGVIGVGEATFPTIRNTLQFLGIDEGRFIRETTATFKQGIRFDDWAWAPEDGRRHQYFHPFEAPFSTDGSSLAPYWLLQDERTRAPFAEAMTIQARVAAAQRAPKRPHEDDFAGPLNYAYHFDAIKLSQVLAERARELGVRHLQGHVTGVEVDGTGDIAGVSAGGHCRLEADLYIDCTGFRAELIGQTLKSPFSSVQDVLFADRALACKIPYDRPDAPLQSFTVATAHEAGWLWDIGLSGARGVGCVYSSRHMSDDRARAVLQAYVGKDLELSIRSMAFSAGYRPKAWVGNCVAVGLSAGFLEPLESTGVVLIEAAVAIIAELFPHSGPVNAPAQRFNSLMSARYDNIVTFLKLHYCLSQRPEPFWRDNADPASIPVRLVELLEQWRHRPPSRYDFILDLETFAFFNYQYILYGMGFRTDLSPGRNAYPDAPAADRLFARIQAYSDRALADLPGHRDLIAQIHQAGRDLSPGTA

SEQ ID NO: 82960 - protein, 509 aa, Xanthomonas oryzae
  REGION 1..509: note = tr|A0A411Y8U4|A0A411Y8U4_XANOO Tryptophan 7-halogenase OS=Xanthomonas oryzae pv. oryzae OX=64187; GN = EBA04_21950 PE=4 SV=1
MIPAPLRNIVIVGGGTAGWMAASAFARVLGPTFNVQLIESEQLGIVGVGEATVPHIKAFNNLLGIDEAEFVRQTQGSFKLGIEFVDWQRPGTAYMHGFGTQIGHPLGLLPFHQYWIKQRARGKAQPLGAYTLNTVAAARGKFMTSAGDVPANSPLANIAYAYHFDATQYAHFLHRYSQQRGVTRIEGLVEQVQLHPESGHVQSLQLASGQTVHGDVFIDCSGFRGLLIEKALHTGYHDFTHWLPCDRALAVPCEKVGPPTPYTRSTARAAGWQWRIPLQHRTGNGYVYCSAHISDDEAAATLLANLDGKPLADPRPLRFTTGRRKQFWNRNVVALGLASGFLEPLESTSIHLIQSGISKLLELFPREGISPVLVQRYNDRSAFEFDRIRDFLLLHYHATEREDSAFWRHCRSMPITPELQTTLDLFRDSGRFYRNAEEMFAEISWVQVMVGQGILPQGYHPLVDQVPDRDAEGFLASVAQTIAHCADVMPPHQQFIDRYCKAAALPCGG

SEQ ID NO: 82961 - protein, 498 aa, Sphingopyxis sp.
  REGION 1..498: note = tr|A0A1G3K4K6|A0A1G3K4K6_9SPHN Tryptophan halogenase; OS = Sphingopyxis sp. RIFCSPHIGHO2_01_FULL_65_24 OX=1802171; GN = A2885_20975 PE=4 SV=1
MRLMIIGGGTAGWMAAACLRRFLPRDWSVQLLESDEIGTVGVGEATIPQIRLFNDALGIDEDEFLAATQGTIKLGIEFRDWTRRGHRYMHAFGAVGRGLGLVDFHHYWLRARTAGLAESLDHYSLNERAARARRMQRGAPRTSRYLLEMPYAYHFDAALYAAFLRRRAEAGGVERIEGRIGEVRLDPQRGDVAGVTLDDGRRFDGDFFIDCSGFRGLLIEGALASGYEDWSRWLLNDRAVAVPCAHGTVPQLPWTGATARDAGWQWRIPLQHRIGNGYVYCSAHIGDDAALDTLLANLDGAAQAEPNQLRFVSGKRRRMWNRNVVALGLASGFMEPLESTSIHLVQAGISRLVKMLPSGASDPAVAAEFNRQSDFEWERIRDFIILHFKATERRDTPYWRDRAEMDIPDTLAAKIDLFRAQGLIFREHEELFTESGWLQVLVGQAVEPRRWHPLADSLEPAELAQFMAGISLTIEREVAQMENYDAFLAAARPAGVAA

SEQ ID NO: 82962 - protein, 500 aa, Sphingopyxis sp.
  REGION 1..500: note = tr|A0A1G3KGI3|A0A1G3KGI3_9SPHN Tryptophan halogenase; OS = Sphingopyxis sp. RIFCSPHIGHO2_01_FULL_65_24 OX=1802171; GN = A2885_15560 PE=4 SV=1
MEATRIQSIVIVGGGTAGWMTAAALARILGPDYASITLVESDEIGTVGVGEATIPQINIFNRMLGIDEDDFVRRTKGSFKLGIEFVDWGGIGQRYFHPFGNIGVDMGGVSFHAFWQRLRGEAEFADVEDYSVMAKAARHGKFMRPTTAPGSLLSSIAYAFHFDAGLYALYLRELAEGSGVTRIEGKITSVTRNGENGHIENVTMQDGRTVGGQLFIDCSGFAGLLIGRELEVPYIDWSAFLPCNRAVAVPCELGEDFSPYTRSTARSAGWQWRIPLQHRVGNGHVYCSDYIGDDEAAAVLLANLGGKPLADPRFLKFTTGHRARFWEKNCVSIGLSAGFMEPLESTSIWMIQTGIARLLSNFPDAGFEAASIDRYNRLMVEESELVRDFLVLHYHVTTRDDSDFWNYCRTMPIPDRLAEKIRVFQSSGRAFREHEELFNDTSWFAVMEGQRLGARRYDPVAELMPIEQTRDRLRQIKAAVTASVDHMPRHRDYIRDHCAA

SEQ ID NO: 82963 - protein, 512 aa, Sphingopyxis sp.
  REGION 1..512: note = tr|A0A1G3KBY1|A0A1G3KBY1_9SPHN Tryptophan halogenase; OS = Sphingopyxis sp. RIFCSPHIGHO2_01_FULL_65_24 OX=1802171; GN = A2885_07955 PE=4 SV=1
MAKRSILIVGGGTAGWLTAAYLARFFDLARNPRLSVTLLASDEIGSIGVGEGAFPTIRNTLQYIGIDESEFVRRASATFKQGIRFDDWVRTPREGQSSHFLHPFEAPYHGDGHSLVSYWLLQDEATRRPFAEAMTIQNRVAEAQRAPKRPGEEAFGGPLNYAYHFDATRLAEVLSNQARALGVDHLPGTLTGVGLHPESGTIDHVVTAEHGVLTADLYIDCSGFRAELIGALGAPFRSVKHQLFTDRALACKIPYDAPDAPLESYTIAAAHEGGWTWDIGLAGARGVGCVYSSDHLSDDRAADILSGYTGGRSQDVGVRSIPFAAGYRPTPWVKNCVAVGLSGGFLEPLESTGLVTIETAAAMIAEMFPLGGPVAAPARRFNELMTARYENIVNFLKLHYCLSRRDEPFWRDNADPASIPDRLKELLDEWRYRPPGRFDFILDLESFAFFNYQYILYGMEYRTDLTPVREEFPDVAEAERIFARIRSFGAQAAHELPSHRALVDQINAASYA

SEQ ID NO: 82964 - protein, 524 aa, Sphingomonas sp.
  REGION 1..524: note = tr|A0A0Q4KNF0|A0A0Q4KNF0_9SPHN Tryptophan halogenase; OS = Sphingomonas sp. Leaf34 OX=1736216 GN=ASF00_08810 PE=4; SV = 1
MPDADNSPGAVQTVVVVGGGSAGWLAACRLAARSVQTGSRLTVRLVESTNVPSVGVGEGTWPTMRNTLRKIGIDETTFIRSCDAALKQGARFVGWTDGSADDAYYHPLNPPAGAGDIDLAPYWLGRPIAGASADAASFADWVDYQAALCDAGLAPKTITAPEYGGHANYAYHLDAGKFATLLRDHAVNSLGVEHVLGDVVRANQADNGDISDVELADGRRLAGDLFVDCSGFAALLIGGVYDVPFRSCRDILFADRALAMQIPYQTEHDPIACHTISTAQDAGWIWDIGLWTRRGVGHVYSSAHTSDDEAEAALRRYAGPAAEQLPVRRITFEGGHRERFWQNNCVAIGLSAGFIEPLEASALMLIETSLDALVDRLPQTRSTMDAVARQFNATFQHHWQRIIEFLKLHYVITQRRDTAFWRDNVAAASIPDGLQERLDLWTHHSPAPQDFAHAREVFSWPSYQYVLHGMRFGGSYRGQPATAEGSSAAALVARNARVRAELVSKMPRHRDLLRAVREHGLQRV

SEQ ID NO: 82965 - protein, 504 aa, Sphingomonas sp.
  REGION 1..504: note = tr|A0A0Q4KWK3|A0A0Q4KWK3_9SPHN Tryptophan halogenase; OS = Sphingomonas sp. Leaf34 OX=1736216 GN=ASF00_01125 PE=4; SV = 1
MTDRALRSIAIIGGGTAGWMAAAALAHVLGTRNVAITLIESEEIGTVGVGEATIPPIQAFNALLGIDEDAFVAATMGSFKLGIEFVDWLRPGARYFHPFGVYGTDVGAVPFEGLWHRLRAVGDAASLDAYSICAAAAQDGRFMRPLTDGGNTPLHRIGYAYHFDASLYARFLRRHAEATGVVRREGRVVDVAVRGADGFVETVTLASGERIAADLFVDCSGFRALLLGETLGTGYEDWSRWLPNDRAVAVPSAPVGPPTPYTRSTARAAGWQWRIPLQHRTGNGYVFASGHLSEDEAIATLLASLDGEPLAEPRALRFRTGRRDAFWVKNCVGLGLSSGFLEPLESTSIHLIQAGIARLLEMLPTRDFEAADIRRYNRLMIAEYDSIRDFIILHFHATQRDDTPYWDHVRTMAVPETLAERIRIYQATGRVFREADDLFTKTSWLAVMDGQGLCANGFDPLAASLSADEARTRLARMAAVTAAAATRMPPHEQFIARHCARSIA

SEQ ID NO: 82966 - protein, 505 aa, Xanthomonas oryzae
  REGION 1..505: note = tr|A0A0U4VJN3|A0A0U4VJN3_XANOO Tryptophan halogenase; OS = Xanthomonas oryzae pv. oryzae OX=64187 GN=BCR61_18410; PE = 4 SV=1
MTQAQIRKVVIAGGGTAGWITACALSHQFRGLLDITLVESEQIGTVGVGESTVPPIRTFHRFLQIDEQEFLRAVAGTFKLSISFEHWRAQGERYIHPFGITGQSTLVCAFHHLWLESQRRGMPGSFGDYCLETVASRVDRFALYGEPAVNYAYHLDAALYAKFLRARSEACGVKRIEGKIQQVTVQPHSGDVASVVLEDGHVIEGDLFIDCSGFRGLLIEQTLHTGYEDWSHWLPCDRAVAVQTEAVGPPVPYTRAIAHEAGWRWHIPLQHRVGNGLVFSSKHLSDDQAHAKLLHDVAAPAVKDPWMVPFRTGRRRKAWNKNVVSLGLASGFIEPLESTSIHLTISAVVRLLALFPGEGIAPSQVQLFNDVSRAEMEHVRDFVILHYHATQRNEPLWQQCRAMELPESLALRLRAWRERAHAWQGADELFRVDSWTHVLMGQGIEPEQHHPLTRAFSDHDLRRLLDGIAQPIQHAVQQMPSQHAFIERYCKAGAQVWGMRSPVPA

SEQ ID NO: 82967 - protein, 502 aa, Sphingomonas sp.
  REGION 1..502: note = tr|A0A0Q4KU87|A0A0Q4KU87_9SPHN Tryptophan halogenase; OS = Sphingomonas sp. Leaf34 OX=1736216 GN=ASF00_08010 PE=4; SV = 1
MKRVQRLVILGGGTAGWMTAAAMSATFGDLVNISILESDAIGTIGVGEATIPTIHWFNQLIGLDEEAFVAATKASFKLGIEFVDWARPGTRYFHPFGRYGVDLGPVPFHQHWLRGKGDGLDRPLSVYSLAAQLAAAGRFAKPVDDPRSILSTLGYAYHFDAGLYARHLRQLAEKRGVVRHEGLLRDIERHPKTGFVTALTSDRGERLEGDLFIDCSGFRALLIGETMGARFEDWSHWLPCDRAVAVPCARIAATTPFTRSTLRPAGWQWRIPLQHRTGNGYVYASSFVSDDEAVATLLSNLDGEALAVPRMLRFTAGFRREAWRGNVVAIGLSSGFLEPLESTSIHLIQSGIAKLITLFPDADCDPVLARQFNTLFARDMDGIRDFLILHYHATQGHDAPLWQHTRHMTPPPTLVDKIAQYTRAGRLMLSADELFREASWLAVLEGQGVGALGHAPLADTLDAATNRRQLNQIETVIARATPTLPLHDAAIAALVAPQVAGR

SEQ ID NO: 82968 - protein, 514 aa, Sphingomonas sp.
  REGION 1..514: note = tr|A0A4Y8ZVC6|A0A4Y8ZVC6_9SPHN Tryptophan 7-halogenase OS=Sphingomonas sp. 17J27-24 OX=2555898; GN = E2493_02460 PE=4 SV=1
MAIVGGGTAGWLAAGLIAARGNEVAAAPLEVTLIESPDVPTIGVGEGTWPTMRRTLQRIGIGEAEFLLACDAAFKQGSRFDGWVTGEPGDHYFHPFTAPVDGEPRDLVQAWSGRGGRAFAEAVSPQPRACALDLAPRQRAMPDYAGALNYAYHLDAGKLAELLRGHATQRLGVRHVRDHVVAVEAAPNGDIAAVRTRSSGDVAADLFLDCSGHAALLIGEHYGVPFVDRSRELFNDRALAVQVPVDNGSPIASQTNATAHSAGWIWDIGLPTRRGIGCVYSSLHADDEAAAATLEAYLRKAVPAVGVDRAAFRRLAFASGHRERFWERNCLAIGLSAGFLEPLEASAIVLIELSLDALLANFPRTRAAMALQAKRFDALFRYRWDRIVEFLKLHYVLSRRDEPYWRAHRDAASIPPRLAELLQVWRHQPPSRFDLPMVDEVFPAASYRYVLYGMGFPVPAEPAAASVSCAAVDAALRQVEQRGRALAASLPAHRAYLDALRDQGASRPSIATIC

SEQ ID NO: 82969 - protein, 500 aa, Caulobacter sp.
  REGION 1..500: note = tr|A0A2R7LAP6|A0A2R7LAP6_9CAUL Tryptophan halogenase; OS = Caulobacter sp. HMWF025 OX=2056860 GN=DBR10_13460 PE=4; SV = 1
MTLNPIRKVLIVGGGTAGWMTAAALGKVLKSVQVTLVESDAIATVGVGEATIPPITTFNQLLGIDEAAFMKATQASFKLAIEFVDWTRPGSRYLHPFGSFGLDIEAIKFHQLWLKAQSLGSTQPLDDFNLSATAAKLGRFMLPSKDPGQVLSSLKYAFHFDAGLYARFLRSFAEARGVQRLEGRVVDVGLRGEDGFIRSVTLDDGRELEADLFIDCSGFRGLLIHQALDTPYEDWSHWLPNDRAVAMPCETAGDGLTPYTRATADTAGWRWRIPLQHRTGNGYVYASAHLSDDAAVARLRATLDGPPRGEPNFIRFQAGRRREMWVKNCVAIGLASGFLEPLESTSIHMIQSGITKLLALFPDRGFDPVETAEYNRLTILQTELIRDFIILHFKANERDEPYWQQAREMAIPESLQRKIDLFAARGRLFQSDYDLFAEPSWVAVMLGQNIRPRGYDPLVDSLDAQLVQDQMQRLAALVRQTAEALPSHQAFIARYCAASA

SEQ ID NO: 82970 - protein, 499 aa, Acinetobacter haemolyticus
  REGION 1..499: note = tr|A0A380UUL6|A0A380UUL6_ACIHA Geranylgeranyl reductase family OS=Acinetobacter haemolyticus OX=29430; GN = NCTC10306_03318 PE=4 SV=1
MLNLRGMKRVCVIGGGTAGWFAALHMRQLFSPAVEIILVSSSEIPIVGVGEGGTLTLMQSLVELGIPFYEFLEETSAVHKLGFAYEGWRDSNKNKKDIYYHMFPLMRNDIFFKENDYYPAFSALLNHDIPISYAVDSIELRENNVSQQELTKMLISKSKENFASSFHFDTYKVGQYLKKIAIQRGVIHREGMFREVVQDAETGLVTAIQVDDIIIDVDFLIDATGFSKQIIGNKLKGAWQSFKEYLPQNTAIPFHLKHRRKNPDLVTLSTAMNAGWVWQIPLQERIGAGYVFNRDFITPDQAVEEIEQWLGYEIEPIKTISFEAGCYEEVWKGNVLAIGLASGFIEPLEATSIGQMLSQLDFFVRIVKASHGIISQQSIKLFNKENVQCWYGIRDFIRMHYDSGRVDTEFWRVTQQLPLSDHYQALKECWKHRTPRNLDFYDYEMDGYSPFNIYSWLAIGQALGVVKAEASVAELYALAPEKKQKVAQYLSIIKQRYMI

SEQ ID NO: 82971 - protein, 286 aa, unidentified
  source 1..286: note = Flavobacteriaceae bacterium
  REGION 1..286: note = tr|A0A2D7VPF7|A0A2D7VPF7_9FLAO Tryptophan halogenase (Fragment) OS=Flavobacteriaceae bacterium OX=1871037; GN = CMC15_00120 PE=4 SV=1
MNNSQNQCGLHRVVIVGGGTAGWLAAGVFGAKLSTKHSVTLVESPTVSSIGVGEGSWPSLRDTLLDIGISESEFLTLCQGAFKQGSSFVNWRKNAHSYYHPFTVPAAYNELDIHACWKALAPNTPYQDAFSLQAAMCVAGKAPKQIATPDYAHVLNYGYHFDATKLADLLKQHCVDKLNVDYVSGHIGSIKSSSDGYIEKLITECGKEIVGDLFIDCSGSSGLLIDKHFNVPWIPVKRTMLNDRAVALQVPYSDTDTEIKSTTVATAQTCGWTWDIALQHRRGVGL

SEQ ID NO: 82972 - protein, 525 aa, Robiginitomaculum sp.
  REGION 1..525: note = tr|A0A2G2GKH6|A0A2G2GKH6_9RHOB Uncharacterized protein OS=Robiginitomaculum sp. OX=2030823 GN=COA47_05045; PE = 4 SV=1
MAARMGARRAARSGRMSKTQYCIIGGGTAGWLSALILQEAARRSALDIDITVIESSTIPTIGVGEGTTAVFRGLLLQLGFDEFEFLRETGATIKYGIKHQDWRRLGHSYFGPIDDPLKMVGTPPGVTSSWLNQYCVGAGRAVSEPHLFSQLMRRNRAPFAIRANKTRLPVGPFHHAYHFDQAKVGAYFKQKAKGIGLIDALVVGAETDPDSGDIVSLKLDGAQDIAVDFIIDCTGFKRALIGDVMGARWVSFDDKLPVNRAIPFWLEHPETGEIPTYTLARAMKAGWMWQIPTQDRLGCGYVYSDKFLSPKQAQAEVEAVLGHSIIPRADIPIDAGRLDRAWIGNCLSTGLAQSFFEPLEATSIHGTIVQMMMFTQFHMRAKGADRATHQATYNNNVARQADDFCTFINMHYVSERDDTDFWRYVRTNCISKEVRQLLKVWSDHLPRNDDFAPFPGGLAHVEDQLYYPVLDGLGLLDRALAKQEIGQNPKLRIHARKTTEKLVKEYKRVAAMACGHRSFLESLRE

SEQ ID NO: 82973 - protein, 502 aa, unidentified
  source 1..502: note = Flavobacteriaceae bacterium
  REGION 1..502: note = tr|A0A2E5ZQF9|A0A2E5ZQF9_9FLAO Uncharacterized protein OS=Flavobacteriaceae bacterium OX=1871037; GN = CMC89_03025 PE=4 SV=1
MKRIKNITIVGGGSAAWLAATYIQNNFWDLPVTVIDKEVGNPIGVGEATVLTFPHFLRQCGIDLTQWFQRVDATYKAGIDFPHWKNPKGRVWHPFYLNRSYFDLKCTQYDIWAQKQELDYCKHALPCYETVMDNQVDMMNSFETLAYHIDAGKLVTELQNICKDTVKTIKSDVINVNRDQNGFITSLDLKNGATHVSDFYLDCTGFISLLKGQKKKELLDTGRLFTNSAVAGHVPYEDFEKECTPYVKCPAVDHGWIWKIPVQSRIGSGLVFNRDITDPDTAMQYFSDHWNGRIKPEDLKLIDWTPYYSENFWEKNVVSLGLSGGFIEPLESTGLASMTYGVQELAKQIPQYVYNEEAIASYNMSMMNWYSDAVDFVGSHYADTEWNTPFWDYVKFMHVKSDKHLWYEEWLRDPQRSFYSDVSSNTLFHPQNWQLWLIQMGYPVSKDMNRHNPMQLDFAMTEFLRAEEVRKRTSISHINAIESTNMGMDWYKASQGQREGFL

SEQ ID NO: 82974 - protein, 515 aa, Caulobacter sp.
  REGION 1..515: note = tr|A0A2R7LFH5|A0A2R7LFH5_9CAUL Tryptophan halogenase; OS = Caulobacter sp. HMWF025 OX=2056860 GN=DBR10_09635 PE=4; SV = 1
MADHDRQSPRSSPVIDPKTDNLPGSIVILGGGTAGWMAAALLARALGRRCAITLVESAEIGTVGVGEATIPPIRGFNQTLGLNEAEFVRETKGTYKLGIEFHGWTRPGEAYFHPFGVYGTAPDPGYFHHYWLKLSGLGKAGPLEDYSLCAQAARRGRFGQQSADPRSPLSTFGSAFHFDAGLYARYLRTYAERLGVIRIEGKVARVAQRGEDGFIEALHLEGDRRVDGDFFIDCSGFRGLLIEETLKTGYEDWSHWLPCDRAMAMPCTREGAPPPFTRSTAQAAGWIWNIPLQHRDGNGYVYSSQFIDDDAAEATLRASLGGTPLAEPNRLRFVTGRRKKAWNKNVLSLGLASGFIEPLESTSIHMIQAGLLKFLSAFPGKTWDPVQTDDYNDRIQLDFERIRDFIVLHYHANQRDEPLWQARREMVLPETLTRRLALFRACGRLTQHPEEMFTATSWQAVLDGQGIRPRSYDPLVDLHDIDRVAVEFEQIRRELRQTAEAMPPHAAALPRPVMA

SEQ ID NO: 82975 - protein, 497 aa, unidentified
  source 1..497: note = Sphingomonas pokkalii
  REGION 1..497: note = tr|A0A2U0S9C7|A0A2U0S9C7_9SPHN Tryptophan halogenase; OS = Sphingomonas pokkalii OX=2175090 GN=DD559_00070 PE=4; SV = 1
MAEQKQFRVVIAGGGTAGWVAAAALVRHLGASLDITLVESDAIGTVGVGESTIPTARSFHALLGIREPVFMRETNASFKLGISFENWLREGVRYFHPFGTVGRSLPLADFQHFWLEAKTRGFGGEYGDYSLETQAALANRFATADPAPLGYAYHLDATAYAVFLRGLAEPAGVRRVEGQITAVERDGESGNIAALLLENGERLAGDLFIDCTGFRALLIEGALETGYDDWRHWLPTDRAFAVQSETTEPPVPYTRAIAHGAGWRWRIPLQHRMGNGFVFASDYLDDDAAREQLLAAVPGRALFDPRLIRFTTGMRKKSWNHNCVALGLASGFIEPLESTSIHLVMIAVTRLLQNFPRRHDMAAAAQRFNAQARAEAEHIRDFIILHYKRNDRPEPFWRDHAARAVPDSLAARIALFEEGANAYQSGDDLFRVDSWNAVMLGQGVVPRAHHPMPGEIPSADLERALGDLRAGIAAQLAKLPTHEAFLQRYCGRESIAA

SEQ ID NO: 82976 - protein, 479 aa, Sphingomonas sp.
  REGION 1..479: note = tr|A0A0Q4LG04|A0A0Q4LG04_9SPHN Tryptophan halogenase; OS = Sphingomonas sp. Leaf34 OX=1736216 GN=ASF00_04315 PE=4; SV = 1
MTAAALAAVAGPTVADVHLVESEEIGIVGVGEATLPHIRAFNTRLGIDEAEFMRATGATFKLGIEFCDWARIGDSYIHPFGAFGHDVDGVGFHHYLSRAGQIATLPDYSLPVVAARHAKFAPPLDDPRSLLSTFGYAYQFDATRYAPFLRARAERQGVTRTEGRVVDVERSSTGDVVAVVLGDGRRMTGDLFVDCSGFRSLLLGQAMGEPFEDWSHWLPCDRAVAVPCADAGTLKPYTTATAMPAGWRWRIPLQHRVGNGYVYSSAHIDDGAAQDALLRSIESTSLADPRMLRFKAGRRARSWVGNVVGVGLAGGFLEPLESTSIYLIQLAITQLLELFPATPISPVDRDTFNRVVDLEYDRIRDFLILHYHATTRDDSPFWDHVRTMAVPDTLAEKLALFRKRGRVMTYREGVFLEPSWIAVYLGQGVVPAGYDQRADQPSDAALAQALARLRTETRDAVMTMPDHAAYIAQSGAAAA

SEQ ID NO: 82977 - protein, 171 aa, unidentified
  source 1..171: note = Armatimonadetes bacterium
  REGION 1..171: note = tr|A0A254QD17|A0A254QD17_9BACT Tryptophan halogenase (Fragment) OS=Armatimonadetes bacterium Cent15-Ar3; OX = 1987502 GN=CBB60_009515 PE=4 SV=1
MRDVIFIGGGPAGSTGSTLLKKYAPGMDVLVLEREKFPREHVGESQLPPISIVLDEMGCWDKVEAANFPIKIGATYRWGNTNDLWDFQFLPIERVEDEPRPAKYEGWRKLTAFQVERSVYDKILLDHSREMGVEVREETKVVEILKEGDRITGLKLEDGTIETARYYVDAT

SEQ ID NO: 82978 - protein, 517 aa, Robiginitomaculum sp.
  REGION 1..517: note = tr|A0A2G2HR78|A0A2G2HR78_9RHOB Tryptophan halogenase; OS = Robiginitomaculum sp. OX=2030823 GN=COA60_08840 PE=4; SV = 1
MSKTIDSILIVGGGTAGWMAAAYLARHLGSDLPNGVKITLVESSDIPVIGVGEGTFPSIRTTLGLIGIDEAEFIRKADATFKQGIKFVNWKTNPNTPEHFYYNLFENPHRIQNHEELAPYWAFRHAQTNPSFSDSVSFQHGICEEKKAPKQKGDKNFFAPMNYAYHLDAGKLAELLKEHSLRLGITHLIGTVDKVNVKENGEIASVKLEDGKELEADMFIDCTGFAAVLIDKTMGSKLKPVDDVLFVDRALVAQVPYEDEMCPIASSTLSTAQEAGWLWDIGLRHRRGTGHVYSSRHSTDEQAERVLEEYLGKSAKNASPRLLKMKTGYRETHWIKNCVSVGLSGGFLEPLEATGIVLIEAAIRMIGDYFPRYGDFEVSAKHFNRAMRERYEDAVSFVKMHYYLSERDDSAFWIDNRNDDSVPDYLLEKLELWKYRLPQVSDFHSNNRLFSHEIYQYILLGMGFKPDIIRNQSAFPFVRQADAEFNNVQLAKENAVKMMPNHRDLIEAAQDESFKFG

SEQ ID NO: 82979 - protein, 512 aa, Sphingomonas sp.
  REGION 1..512: note = tr|A0A0Q8XA67|A0A0Q8XA67_9SPHN Tryptophan halogenase; OS = Sphingomonas sp. Root241 OX=1736501 GN=ASE13_16215 PE=4; SV = 1
MTDTVRGPVPIKIVTIVGGGTAGWMTAAMLSHLFRGYEIRLIESDEIGIIGVGEATIPAIRDYMLMAGIDQVEMVRATQATFKLGIDFVDWRTGDDRYFHGFGRIGQDFMWLHPHQLWLKLKASGKPVGHFDDYALNCRAGMANKFCFPDPRNPTSPISGIDYAYHFDASLLAKFLRVRAEGKGVTRIEGRIVDVKLDGESGYVEHVVLANGRTVDGDLFVDCSGMRGLLIGQALGVGYEDWSQWLLNDRALAVPCESVSPLTPYTRVTARAHGWQWRIPLQHRIGNGHVFASSQISDDEAASVLLANLDGKPLADPRPVGFRPGKRHKAWEKNVVAIGLSSGFLEPLESTSIHLIQTGITKLMALFPHQGFAVPDVAEYNRQHDFEFTDVRDFIVAHYKVTDREDTEYWRYLKHMAVPDSLTERLELFASSGRFFRRAAQELFREESWVQVLLGQGLKVAYDPMVEMIPQATVAEFMHDVQEVVADVANAMPDHAAFIDRHCKAPPLTVAG

SEQ ID NO: 82980 - protein, 484 aa, Sphingopyxis sp.
  REGION 1..484: note = tr|A0A0W1DTL7|A0A0W1DTL7_9SPHN Tryptophan halogenase; OS = Sphingopyxis sp. H050 OX=1759072 GN=ATE67_07390 PE=4; SV = 1
MTAAALAKLLPGQADIHLVESEEIGIVGVGEATLPHLREFIRRLGLDEMDFMRKTRATFKLGIDFVDFGAIGERYIHPFGAYGTDIAGVGFHHYWLRMKAAGRVPPICDFSLPIVASRARRFAPIPAGGDFLDSSYSYAYQFDATRMAPMLRAFAEAHGVRRSEGKVVGVDRDGTSGDIAALRTDRDETIAGDLFVDCSGFRALLIGEALGSPWEDWSQWLPCDRAAALPCTAPDGPIEPYTRATAMPAGWRWRIPLQHRVGNGYVYSSAHLSDDEACGAILGAIEGEPLADPRVLRFRAGRRTKSWDRNVVAIGLASGFLEPLESTSIHLVQQAVTRLVELFPQRRIDASDRDTFNALVDREYDRIRDFLILHYHATRRDDSDFWNHVRTMAVPETLQRKMDLWRTSGRVELYTQGLFLEASWVAVYLGQGVVPISYDQRADTPAPDRLAKSLTELDQAIRQRVAAWPDHGDYLRQAGAWEAA

SEQ ID NO: 82981 - protein, 110 aa, Burkholderia sp.
  REGION 1..110: note = tr|U2G9L7|U2G9L7_9BURK Tryptophan halogenase PrnA; OS = Burkholderia sp. AU4i OX=1335308 GN=L810_5673 PE=4 SV=1
MGDTCQVCQVNPAITDAVTQVNVKVVAEAPAMAMGSLYQAQSHSLSILFENAVQQQSQAAIQSQTSTNVGTMQLYTIGPESAGAAATEIGANGIISILADVIAIGKAMRP

SEQ ID NO: 82982 - protein, 509 aa, unidentified
  source 1..509: note = Xanthomonas floridensis
  REGION 1..509: note = tr|A0A1A9M8Y0|A0A1A9M8Y0_9XANT Tryptophan halogenase; OS = Xanthomonas floridensis OX=1843580 GN=A7D17_21330 PE=4; SV = 1
MIPAPLRNIVIVGGGTAGWMAAAAFARVLGPTFNVQLIESEQLGTVGVGEATVPHIKAFNNLLGIDEAEFVRQTQGSFKLGIEFVDWQRPGTAYIHGFGTQIGHPLGLLPFHQYWIKQHARGTAQPLGAYTLNTVAAARGKFMTSAGDVPANSPLANIAYAYHFDASQYARFLRGYAEQRGVVRLEGMVAQVQLHPESGHVQSLQLESGQRIAGDLFIDCSGFRGLLIEDALHTGYHDFTHWLPCDRALAVPCEKIGPPTPYTRSTARAAGWQWRIPLQHRTGNGYVYCSAHISDDEAAATLLANLDGAPLGDPRPLRFTTGRRKQFWNRNVVALGLASGFLEPLESTSIHLIQSGISRLLELFPREGISPVLVQRYNDRLAFEFDRVRDFLLLHYHATERDDSAFWRHCRHMPITPELQTTLDLFRDSGRFYRNAEEMFAEISWVQVMVGQGILPQGYHPLVDQVPDREAEGFLASVAQTISHCVDVMPTHQQFIDRYCKAPAIRQAR

SEQ ID NO: 82983 - protein, 179 aa, Sphingomonas sanguinis
  REGION 1..179: note = tr|A0A147J3R6|A0A147J3R6_9SPHN Tryptophan halogenase (Fragment) OS=Sphingomonas sanguinis OX=33051; GN = NS258_18130 PE=4 SV=1
GRRPHGFTVTLVESPNVPIIGVGEGTWPTLRATLKNMGVSETAFFRECDASFKQGARFNRWTTGAAEDGYYHPLMLPQSFGQVNLASHWLAGEGDASFCDAVTPQGRICDGGLAPKTIATPEYEALANYAYHLDAGKFADFLRRHCCEQLGVRHVLADVEEVLLAESGDIRAVRTAQAG

SEQ ID NO: 82984 - protein, 533 aa, Dyella sp.
  REGION 1..533: note = tr|A0A369UJ88|A0A369UJ88_9GAMM Tryptophan 7-halogenase OS=Dyella sp. L4-6 OX=2282381 GN=DVJ77_17410; PE = 4 SV=1
MEELIRDVVILGGGTAGWMTASYLARAVGSKVRITLIEAATIPKIGVGEATIPNLQKVFFDFLGIPEEEWMRHCNASFKMGIRFVNWRPQPQSAGDDYFYHLFGLIPNCDSVPLSHYWVLRQQERMDDRPLAYACYKEAPLLDAKLSPRMMDGTRVTNYAWHFDAHLVADYLQKLAVGWGVQHVVDELDHVELAPDGSIAALHTRMGNRYGADLFIDCSGFRGLLINKALGEPFIDMKNHLLCDSAVAASVPHDDERHGVEPYTSSIAMKHGWTWKIPMLTRFGSGYVYSSDFTSQDEATDEFLKLWNLDANQVKLNQIRFRTGRNRNAWVKNCVSIGLSSCFLEPLESTGIYFIYAAIYQLVKHFPDRSFNPSVIAAFNDEIAGMYDDCRDFIQAHYFTTSRNDTAFWRANKNELHLSDSIRHKLELYKAGLIVTAPLSDAGAYYENFETEFRNFWTNSSYYCIFSGMGWMPKAPLAKLRYSPASLSKAQQSFTDLQHQTAELKTKLPSCHEYLQTLHGGAKPMQAARTGSA

SEQ ID NO: 82985 - protein, 496 aa, Alteromonas sp.
  REGION 1..496: note = tr|A0A3N5ZAK0|A0A3N5ZAK0_9ALTE Tryptophan 7-halogenase OS=Alteromonas sp. U0105 OX=2259342; GN = DRW07_10480 PE=4 SV=1
MWKKIIIAGGGTAGWMTAALLAKSLGRAGFEITLVESPNIPTVGVGEATVPSFMHFNRLLGIDERHLIKQTKATYKLGIQFVDWEKIGNDYIHGFGALGDQAAGLPFYHYWFRWLKSNPTAKLEDMSLCAVSGRKRRFVHPDPKVNPILGGMGYALHIDAGLYAEFLKQYSTERGIKHIQADITGVNLNQKTGFISSLNLADSSVLEGDFFIDCTGFKSMLLGQALRVPFVSWKQWLKTDSAQVLPTALTQDNFVPYTRAKAHHAGWQWRIPLQHRVGNGLVYSSEHMTDQEAEALLLEQIDSEPLMAPRKLHFEAGMRERFWEKNCVAVGLSSGFLEPLESTSIHIIQTTISRLVTLFPNADTNEVMAKRFNAQATFEMERIRDFIILHYALNHRDDPFWRSLSEMRLPDSLEEKITLFKKTGYIHYEDGDLFADTNWLSVLFGQGVRPENSMYMVNTMSDEQLDKYISSIRHQIVSLTDNFPFHIDYLTRLLKS

SEQ ID NO: 82986 - protein, 606 aa, Fischerella thermalis
  REGION 1..606: note = tr|A0A2N6LUZ2|A0A2N6LUZ2_9CYAN Tryptophan halogenase; OS = Fischerella thermalis CCMEE 5205 OX=2019671; GN = CEN40_25835 PE=4 SV=1
MLMNNTQSQVYDVVIMGAGMAGICQTRHLLLNIPNIKIALVDPRPEERADKDMKVGESTVEISTLMICKELGLYDYMIENHPPKFGLNFHWPKDPAKTENTDDYFHLWATRQPPLASVLINRPKFERDVLKMNKEMGVEFYNGRVVDVDLTSGDELNSVQVKVGDQQLELKTKHVIDAAGRKFIIGRKTDNLVFGPENLYGVNNGSAWMRVRNIDRTIFHSGYDPANATCSHYYATNHWMGHGHWVWMIPTDTESMELSIGLVHHHEVIPAQSVNTKEKFSAFLEANHNVVYQLLKSGEEVDFHYLPRLAHKSKQMYSRDNWYVIGDAAAMFDPFYSMGMTMMSFQIENVTEIIRAKFAGEPDVERKRVVYNNFAVNMIARNNHLVSHHEKQLGNASIMSWRIFLENMWWFGVLIPMYIGKWHLDLPFLHKFGKQGRGAVVAETLEEAYKLFDKLLEKKQNLGFMYTHRMDELPFGYSITKDVSKYIGLSKYEPKHCNIYAEMRNTYFFVALWYLKLLWKGFGLSGLLAPKNVKRVLTLLKISAQSYVDELIFDYQTRNIPTNSAVAKQREEFKNYQPRTELQPWQNLATVDVNDTKLPELVEVGS

SEQ ID NO: 82987 - protein, 514 aa, Sphingobium sp.
  REGION 1..514: note = tr|A0A0C5XHS8|A0A0C5XHS8_SPHYB Tryptophan halogenase; OS = Sphingobium sp. (strain YBL2) OX=484429 GN=TZ53_09660; PE = 4 SV=1
MVHPVRNIVIVGGGTAGWLTAGVIAARHRSRIGNGFTVTLVESPNTPIIGVGEGTWPTLRTTLSRMGISETDLFRECDAAFKQGARFARWTTGTPDDGYYHPLMLPQNFGQVNLAPHWLASEGDESFCDSVCSQGRICDDGLAPKTIATAEYDALANYAYHLDAGKFAPFLQRHCCEKLGVRHVLADVEQVLMKEDGDIRAIRTTQAGEIEGDLFVDCTGFKALLIEGAMKVPFRDCNDVLFCDTALAMQVPYERPDSPMASHTISTAQSAGWIWDIGLPTRRGIGHVYSSNHISDEEAERELRAYIGPLAEGLGARKIAIRSGHRETFWKGNCVAVGLAAGFLEPLEASAIVLIELSAKIIAEQMPACREVMDIIASRFNATTHYRWGRIIDFLKLHYVLTKRTDSDFWRDNVREETIPDRLKELMLLWRYQSPWFLDEFDRVEEVFPAASYQYVLYGMGFRTEVDRPALARDAHLADRARRENTAMTAKLRAGLPRHRDLIDKIVAHGLQPV

SEQ ID NO: 82988 - protein, 536 aa, Sphingomonas sanguinis
  REGION 1..536: note = tr|A0A147HV91|A0A147HV91_9SPHN Tryptophan halogenase; OS = Sphingomonas sanguinis OX=33051 GN=NS319_12480 PE=4 SV=1
MTPNHDQMIRRVVIVGGGTAGWMAAAAFARLLNNGYTQVTLVESEEIGTVGVGEATIPPIITFNQMLGLDENDFLAKTAGTFKLGIEFVDWGERGERYFHPFGRHGQDLQGVHFHQLWLRERSRRALPDIAEWSMSAMAARSGKFGRAKPDARSPIRELFYAFHFDASLYARYLRGYAERGGVTRIEGRIDAVNLRPEDGYVEAVTLADGRRIEGDLFIDCSGFRGLLIEEALETGYDSYAQWLPCDRAVAAPCALPNPAEPDPFTRATAREAGWQWRIPLQHRMGNGLVYCSEYLEADAAEAQLLASLEGELLGDPRHLRFTAGRRRESWNRNVVALGLSSGFLEPLESTSIHLVQAAIQRLIALFPDKRFDPAERTEFNRQMRDLYEDVRDFIILHYKATRRSDTPFWDRVRTMNVPDSLARKMDLWAGKGRLFREGYDLFSNPSWVAVSLGQGIVPQSWEPAADALDEDLVAQALEQMRVGYADTAARMPSHGDFLRMTAPSPLAPALAPGRPADGGFDFTRTPSGGASGPLL

SEQ ID NO: 82989 - protein, 500 aa, Sphingopyxis sp.
  REGION 1..500: note = tr|A0A0W1DSR6|A0A0W1DSR6_9SPHN Tryptophan halogenase; OS = Sphingopyxis sp. H050 OX=1759072 GN=ATE67_07315 PE=4; SV = 1
METNRIQSIVIVGGGTAGWMTAAALARILGPDYARITLVESDEIGTVGVGEATIPQINIFNRMLGIDEDDFVRRTKGSFKLGIEFVDWGGIGQRYFHPFGNIGVDMSGVSFHAFWQRLRGEPEFADVEDYSVMAKAARHGKFMRPTTAPGSLLSSIAYAFHFDAGLYALYLRELAEANGVRRVEGKITDVARNGETGHIEHVTMADGRVVGGQLFIDCSGFGGLLIGRALGVPYIDWSAYLPCNRAVAVPCEHGGDFTPYTRSTARSAGWQWRIPLQHRIGNGHVYCSDHISDDEAAAVLLANLDGKPLADPRFLKFTTGHRARFWDKNCVAIGLSAGFMEPLESTSIWMIQTGIARLLSNFPDTGFEPASIDRYNRLMVEESELVRDFLVLHYHVTTRDDSDFWTYCRTMPIPDRLAEKIRVFQSSGRAFREHEELFNDTSWFAVMEGQRLGARRFDPVAELMPIEQTRDRLRQIKAAVTASVDHMPLHRDYIREHCAA

SEQ ID NO: 82990 - protein, 107 aa, Burkholderia sp.
  REGION 1..107: note = tr|U2G8X6|U2G8X6_9BURK Tryptophan halogenase PrnA; OS = Burkholderia sp. AU4i OX=1335308 GN=L810_5675 PE=4 SV=1
MPEQVSAAVTDAVTQANVKVMGEAPAVALGTLMQSNSHASAILLHNAVQMQANQAMSNLAATTVGVMQLYAGSPVAVAAAARSANDNLASQLTAVAQLMNAIGHWRG

SEQ ID NO: 82991 - protein, 496 aa, Alteromonas sp.
  REGION 1..496: note = tr|A0A3N5Y8S7|A0A3N5Y8S7_9ALTE Tryptophan 7-halogenase OS=Alteromonas sp. U0105 OX=2259342; GN = DRW07_08630 PE=4 SV=1
MFANKTIAIIGGGTAGWMSAAWLQHHCDDTARILLIESDDIGTIGVGEGTTPHLSVFFDTLGIKEQTWMPACSATFKNGITFTNWTSRPTAPSYFHPFPSASDRYSAGFFLQAVEAMRKNVPIGPTLPDSYFLSWHLTQAAQSPRRIKTGANIPLSYAYHFDAGLLARFLREWCEQRGVIRYQGRITRVGQHENGQISAVYTNNIDSPINADFFIDCSGFRSLLAQQTLNTPFVSYADSLLNNAAIALPCEALSPLSPHTVSCAMPSGWRWQIPLQHRTGNGYVYSDSYISAEEAEQQLVQAVASKPLNQSPTHLTFRVGRLEKTWSENCLSVGLSQGFIEPLEATGLHLVLCTLSEFTAAMARCNESQQAMNTVNESISARFDGIKDYIVAHYLMSDRNDSEYWRAARSVTPSDTLQALLDCWHNGGNLITKIDKLGISQYYSVISWYCLLAGYDAFTQNKTHPRAPLQWQQLQEKLKSWQAHFLDHEEALNQFL

SEQ ID NO: 82992 - protein, 498 aa, Sphingopyxis sp.
  REGION 1..498: note = tr|A0A0W1DWS6|A0A0W1DWS6_9SPHN Tryptophan halogenase; OS = Sphingopyxis sp. H050 OX=1759072 GN=ATE67_00920 PE=4; SV = 1
MRLIIIGGGTAGWMAAACLRRFLPRQWSVRLVESDAIGTVGVGEATIPQIRLFNEALGIDEEAFLAATRGTIKLGIEFADWGGRGERYMHAFGAVGRGLGLLEFHHYWLRGRAAGIAAPLGAYSLNEQAARALRMQRGAPRTSPHLLEMPYAYHFDAGLYAAFLRRRAEASGVERIEGKIADVKLDGGSGDVTGVTLDDGRTLDGDFFIDCSGFRGLLIEEALGTGYDDWSHWLINDRAIAVPCAHGAVAQQPWTTATARDAGWQWRIPLQHRIGNGYVYSSAHLSDEDALATLLAGLDGPSQAEPNRLRFTSGKRRRMWNRNVVALGLAAGFMEPLESTSIHLVQSGISRLIKLLPAGNCDPAVAAEFNRQSDFEWERIRDFIILHFHATARRDTPYWRDRAAMDLPDTLAAKLELYRAQGLIVREHEELFTESGWLQVLAGQGVEARRWHPLADSIDPADLGQFLAAQLLLIEREVAQMQSYDRFLSAVRPEGVTA

SEQ ID NO: 82993 - protein, 544 aa, Alteromonas sp.
  REGION 1..544: note = tr|A0A3N5Y3L4|A0A3N5Y3L4_9ALTE Tryptophan 7-halogenase OS=Alteromonas sp. U0105 OX=2259342; GN = DRW07_00410 PE=4 SV=1
MQKRRVVIVGGGSAGWMTAAYLNGALNNKGADPKVDIHLIESPDTPRISVGEATIPSMRHLLAVIGVDEMEFMRATEATFKQSIKYTNWVHKNNTFYHHPFSRATVQPRDNMGMRWLQSDQSIPFMETCSAQPIICEMGLTPKMMGEWRMGQPLSYAYHMNAQKFADYLCEFSVQRGVKHTFANVVDITLRDADHIQSVTTDQGETLESDIFVDCTGFRARLIEEKLGVGFEDCSQWLLCDRAITMHVPYDDFYPGMVRPYTTATALSNGWIWDIPMQSRRSIGYVHSSAFIDEESAEREMRAYQGDDTGALDARLVRFKVGRRHRTWHGNCVAIGLSGGFIEPLESTGLYLSDMGAVMLAEHFPWQDSGMDLLSTRYNRLMSNRFYEILDFINMHYCLTQRTDTDFWREVQKPERINDRLKAKFEYWKVKPPSPSDFDDMWLPGQSVLPVDQTIAGQDRRPAVDTAGLWNYQSYECILYGMDFLKQESEQWFGTNRPPTEINPIILQRLQAAKQNLPPHAYWLQQKVGMQQYQTHAKPAGWVA

SEQ ID NO: 82994 - protein, 521 aa, unidentified
  source 1..521: note = Xanthomonas floridensis
  REGION 1..521: note = tr|A0A1A9MGR5|A0A1A9MGR5_9XANT Tryptophan halogenase; OS = Xanthomonas floridensis OX=1843580 GN=A7D17_10470 PE=4; SV = 1
MDPAPASDPRQRPVRRVVIAGGGTAGWMAAAALSKLLGRQLQITLVESDEIGTVGVGEATIPSLVTFHRLLEIDEAAFMAATQATFKLGIAFEHWRDVDRHYIHSFGHTGTDHWSAGFHHFWLKGQQRGVARDFGDYCLELRATQEGRFAHLPSGAMNYAYHLDAGLYARFLRRFSEGFGVQRIEGRIGQVETDPESGFLTALTLQNGTRVEGDLFIDCTGFAGLLIGKTLGVGSEDWSQWLFADSALAVQTESVGPPVTYTRARADQSGWMWRIPLQHRVGNGIVYSSRYTDQDSARAVLERNLQGRALTEPRALRFTPNQRHRVWEKNCVALGLASGFLEPIESTNIHLIQRGIVRLLQTFPQVIHTVDIAEYNRQAADEIAHIRDFVILHYHATDRRDTPFWRDCAAMDIPDSLRHRIALFQESGRVFHRANELFAENSWVQVMLGQGITPRQHHPVADLMGDAELRHFLEGIRQRVDATVARLPPHADFLRHHCPAAPLPDPPARVPADAALAPPAR

SEQ ID NO: 82995 - protein, 561 aa, unidentified
  source 1..561: note = Ruegeria conchae
  REGION 1..561: note = tr|A0A497YV76|A0A497YV76_9RHOB Tryptophan halogenase; OS = Ruegeria conchae OX=981384 GN=CLV75_3902 PE=4 SV=1
MNNRLRKITIVGGGTAGWMTALILDMVFSRTSAPKDRPRICLIESPNISTVGVGEATVPRMPVTLRQAGIAERDFFRETNASFKLGVKFCNWNNDAKGNRVDYVNPFAHGQLLEGLEAAEYFLRFGNGDRDFTQSISPHDDLARLCKGARPLGAPEFEQRFGYAYHLDAVKFAGMLTKVCTKRGVEHIQDEVQSVELDEHGNVSHLMLERKGRHEIEMVIDCTGFRGLIINQALGEPFMDYSEYLPNDRAMALQIEHPDPERIESVTRSTALGAGWTWRVPLYNRVGTGYVYSSAHRTDDQAADEYLEWLGDSGKGLTPRVIPMRVGRVRNAWVKNCLAIGLSGGFIEPLESTAIHMIDHAIRWFAEHLPTRDIEPALRNRYNRQMNKLYDEVLDFICLHYRLGNRTDDQYWIDARTEMKIPDRLAENLELWQHRLPMEHDIEFATLFNFRVYQTVLLGKQVYDTGYGTGIRDRIRPLKKPIWFQWWKGAKMDLAQILKSMPDHKTLLRDIRGELEKPAFGKAAVAKPTVAMPGTAPAPVVVQNMPNFAEIQSGAKDLQLF

SEQ ID NO: 82996 - protein, 517 aa, Alteromonas sp.
  REGION 1..517: note = tr|A0A3N5Y420|A0A3N5Y420_9ALTE Tryptophan 7-halogenase OS=Alteromonas sp. U0105 OX=2259342; GN = DRW07_06005 PE=4 SV=1
MNIDINNVVIVGGGTAGWLTAAVLAAQFDTRKNFSVTLIESPNIKTIGVGEGTWPTMAATLRRIGLSEAQFISECDASFKQGSRFINWRSGQNESYYHPFSLPVGYNDINIVDHWLDNGATTSFDEFATNQASVCSRHLAPKQASTPEYANVVNYGYHLDAGKFARLLKTHCVERLGVQHISADVTRVNHTNEHIDSVILADGRAVLGHLFIDCTGFKRLLIGDHMGARFISQKSVLFNDRAMAFQVPYADEHAPINSTTHATAHKNGWIWDIGLPSRKGIGIVYSSDYGNEQQAYDMMENYIEQQAPHCNLADITPNKITLDPGHLNTFWKGNCVAIGLSAGFIDPLEATAMVLIEFSAKFIRDHLPAGKQDLGFLSNKFNQRMDLHWRNIIDFIKLHYVLSERTDSQYWLDHRAQHSVPESLNRLLTVWARRAPWHADIEVAESMFPPASYQYILYGMGFRSLSALSDKRFADKERAHLKKLLSHKQTELQKLYQHLPTNRTLLRDIKHSWNSRL

SEQ ID NO: 82997 - protein, 591 aa, Fischerella thermalis
  REGION 1..591: note = tr|A0A2N6LUY2|A0A2N6LUY2_9CYAN Tryptophan halogenase; OS = Fischerella thermalis CCMEE 5205 OX=2019671; GN = CEN40_25870 PE=4 SV=1
MNTNTTAQQLEYDVVIMGAGYAGVCQARHLLLKIPNIRLAIIDPRSQDPSQVNHRPGESTLEAASMFLFSELGLHDYLLEEHTHKAGLNWHWPKDVDKTESLDDYYNIWVNRQLTIPSFHLNRLKFDLDVLEMNKQMGAHFYNGRVVDVDLTPGDEHNTVKVKLHNDYIHLKAKHLIDAAGRKFIIGRKTDNLLLHPKELPVHIKPSSGWVLVRNVDRTIFDNSVYSTESLESRYYATNHWMGKGHWLWMIPVDSQSKELSVGLLHHPDIIPCELVNTKEKFYAFIKANHNLVYKVLQSGEHVEFNYWPRIAHTSKKLFSRDNWYVIGDAASNFDALYSTGTTMSCIAIESVTEIIRAKLANEKDAEKKREAYHHFNLALARFMNLAVSSQEKQVGNASIMSWRLYGNYMVWFNTLLPIYVGKWHLDLLFSRLALIFFKINGSFWVDTYKQLSYLAERGTNIGFMDQLRADQLIGGYHPDKFFDNFLENAKLEPSKLNVFAGLRAYCFYIVIWFMMWQWKGFGPIGLLRPRNIFQIVRLLLTGVVMAIAELTHKLKLLGQPTNSIVAKTRQEFKSYRYQSRLQNWVGSSEL

SEQ ID NO: 82998 - protein, 499 aa, Alteromonas sp.
  REGION 1..499: note = tr|A0A3N5Y1N1|A0A3N5Y1N1_9ALTE Tryptophan 7-halogenase OS=Alteromonas sp. U0105 OX=2259342; GN = DRW07_08700 PE=4 SV=1
MSTPLHVVIAGGGTAGWMAANLFAALCPKERVRVTLVESPDIGIIGVGEGSTPTLKRFFEIIKVPEQVWMPTCNATYKVGIKFNDWSPKSGIHSYRHPFISQTDIFTQRAFEVNCHTRRLGLDTHTRPEDFLINGVLAKKNLGPLTPAHFPFTIQYGYHFDSALLGQFLSEHAQKQGVTHIKKGILAVKTHPDTSIASLLCDDDTEISGDFFIDCTGFRSLLLQQTLGVQFKSYKSNLFNDSAVVLPTSISNTIPSETEATALSAGWCWRIPLQNRFGNGYVYSAEYLSPDSAEEEFRRHLGILDSDDSCRHLSMKVGQVEQHWKKNCLALGLSQGFIEPLEATALHLVQICAEMFISKWQQGDYSSTHQQAFNAFAKERFDRVRDYIVAHYKLNTREDSEYWRDNRENDAISSSLANIINCWFQRKDLTQEIKRQDIGMHWDPISWHCLFSGYGAYPPLAPDQPGKGDHFAEKNIDTFVQGCALNFESHNANLASLLE

SEQ ID NO: 82999 - protein, 500 aa, Erythrobacter nanhaisediminis
  REGION 1..500: note = tr|A0A1I5NHL2|A0A1I5NHL2_9SPHN Tryptophan halogenase; OS = Erythrobacter nanhaisediminis OX=604088; GN = SAMN04488060_1863 PE=4 SV=1
MAIEHIVIVGGGTAGWMAAAALSRIREGRNLKITLLESEQIGTVGVGEATIPPFVEFNQALEIDEREMLSATQGTFKLGIQFSNWGQVGESYIHPFGNYGYDIGGINFHQVWHAMRQRGDKRPIQAFNLETMAAYFGRFSRTQDYNRDDLPPMNYAYHIDASRYAGFLRQYAEKYGVVRQEGRVDDVALHPETGFVTCVTLQSGEKIEGDFFVDCSGFRGLLIEQALETGYEEWTHLLPCDRAVALPCNRDDGSPPPPFTKATAHSAGWQWQVPLQHRNGNGHVYCSEFMSDDEAHDILVKNLAGKPTAEPNFLRFVTGRRKKFWNKNVVALGLASGFMEPLESTSIHLINTGVNKLIALLSLDGVNEAQISTYNRLTRKEYERIRDFLVLHYNATRRTDSPFWDYVRTMDVPETLTEKVEIFKANGQVFREEDELFTTTSWAAVMMGQGIAMEGNSPMADDVATHMAGEVDEMEKSIRWLVERMPGHGQYLQKYSPAPA

SEQ ID NO: 83000 - protein, 493 aa, Cellvibrio mixtus
  REGION 1..493: note = tr|A0A266Q7Y8|A0A266Q7Y8_9GAMM Tryptophan halogenase; OS = Cellvibrio mixtus OX=39650 GN=CBP51_03025 PE=4 SV=1
MQPIKKLVIVGGGTAGWLAAAAVGKIYQGQVSVTLIESDAIGVVGVGEATIPTMLAFHKLIGIPEVEMMRATHATFKLGINFKDWGEIGEDYIHSFGQVGRIFWAGEFQHFWARAKKNGLDIPFGAYCLEHEAARAEKFSISENPALNYAFHFDAGLYAKFLRKFSEGLGVVRHEGKIERVEQDVESGFVQRLHLDSGLTIDADFFIDCSGFRGLLIEETLKTGYENWQHWLPCDSALAVQTAKVKPATPYTTSTAREFGWQWRIPLQNRTGNGLVYSSQYADRIWAEKTLTENLEGEMLTAPRLIQFTTGRRKLGWHKNCVALGLASGFLEPLESTSIHMVTSGLIRFLRLFPLRGVQRVLVDEYNRQSKEEAESIRDFIILHYHATRRNDTEFWRHVRTMPVPDSLRHRIDMFTQSGMVFLGGDELFRTNGWTQVLIGQGFTPENYQPIVDNMSDMEFRAYMTGFRDHVANNISRLPGHEEFIAQYCAMEK

SEQ ID NO: 83001 - protein, 514 aa, Caulobacter sp.
  REGION 1..514: note = tr|A0A0Q6V8A9|A0A0Q6V8A9_9CAUL Tryptophan halogenase; OS = Caulobacter sp. Root343 OX=1736520 GN=ASC70_09365 PE=4; SV = 1
MVRPVKNIVIVGGGTAGWLTAGVIAAKHRARQAGGFTVTLVESPTTPIIGVGEGTWPTLRTTLAKIGVSETDFFRECDAAFKQGAKFARWTTGAPDDAYYHPLVLPQSFGQVNLAAHWLASGAAQSFCDAVCPQGVLCDDGLAPKTITAPPYQGAANYAYHLDAGKFAPFLQRHCCEKLGVRHVLADVRNVTLTEDGDIQGVVTEQCGEVRGDLFVDCTGFRSLLLGEALGVKFRECGDVLFCDTALAIQVPHEREDSPLSTHTISTAQSAGWIWDIGLPTRRGVGHVYSSRHISDEDAERELRGYIGPAARDLSARKISIRSGHRETFWKGNCVAVGLAAGFLEPLEASAIVLIELSAKLIAEQMPACREVMDVVAARFNATTHYRWGRIIDFLKLHYVLSQRSDTAFWRDNRAPETIPERLSDLLRLWRHQPPWLHEEFDRVEEVFPAASYQYVLYGMGFRTEIEPGALADEAALAQRALRENALQTERLRASLPRHRDLIRKIVEHGLQPV

SEQ ID NO: 83002 - protein, 179 aa, Sphingomonas sanguinis
  REGION 1..179: note = tr|A0A147IJ60|A0A147IJ60_9SPHN Tryptophan halogenase (Fragment) OS=Sphingomonas sanguinis OX=33051 GN=SB4_18635; PE = 4 SV=1
AVGLAAGFLEPLEASAIVLIELSAKLIAEQMPACREVMDTVARRFNDTTLYRWGRIVDFLKLHYALTQRTDSDFWRDNGRPETMPDRLRDLMELWRYQVPWMHDEFDRVEEVFPSASYQYVLYGMGQRTEIAPGSLAAETIAAQRARRENDVQTGRLLAGLPRHRDLIRKIVERGLPTI

SEQ ID NO: 83003 - protein, 507 aa, unidentified
  source 1..507: note = Erythrobacter luteus
  REGION 1..507: note = tr|A0A0G9N041|A0A0G9N041_9SPHN Tryptophan halogenase; OS = Erythrobacter luteus OX=1581420 GN=AAW00_06315 PE=4 SV=1
MDKGAGTQGYDPVRNVVIVGGGTAGWMAAAALSRFLGRDRTITLVESDAIGIVGVGEATIPPIRTFNSMLDIAEEDFLRETRGTFKLGIEFVNWGRVGDRYMHPFGAYGQDFHGVPFHQMWLRYRALGGDAGLEDFSMCIAAAHRGKFGKARPGEPTPLQHIAWAYHFDAGLYARFLRGIAEQQGVVRREGRIVAFHRDGESGDVTSVEFEGGTRLAGDLFLDCSGFRGLLIEEALETGWEDWSHWLPMDSALAVPTANTEAPAPFTRSTAHAAGWQWRIPLQHRTGNGHVFCSAHTDADQAERTLRENVEGDLLADPRMIRFTTGMRRQAWNHNVVSLGLASGFIEPLESTSIHLIQHGVLRLIGLFPDRKINPTEREEYNRNLRSIFEFVRDFVILHYKANQREDSVFWRQMAAMSVPDTLQHRMDLWQAHGRVFPKEADMFNIPSWVAVMLGQNVTPDRYDPVADALVEKQLTAALADMRTRYAETAGRLPSHETYLQKVGAWA

SEQ ID NO: 83004 - protein, 534 aa, unidentified
  source 1..534: note = Pelagimonas varians
  REGION 1..534: note = tr|A0A238KDN9|A0A238KDN9_9RHOB Flavin-dependent tryptophan halogenase RebH OS=Pelagimonas varians; OX = 696760 GN=rebH_1 PE=4 SV=1
MAKPITSITIVGGGTAGWLAATFLRSKCSKKIDITLIESPNVPTVGVGEATVPNMSATLRELGINDQQFFQRCNASIKMGVMFRQWNVNHRGDFFDYMNPFITPPSLDKMEMGYFYHAYGAGKRDFIQSFSPLMELLEAGKCPLSFGGKEDPMPRVGYAYHLDAVKFAGLLAEVGTERGVTHILDDVEDVELDNRGHVAALQLKEHGRHEVEFVIDCSGFQGLITQKALGEPFESYGDYLANDRAMALQIPHSETTSIPAATSSTALGAGWSWSVPLFNRTGTGYVFSSAHRTDEQARDEFMAHLGDRAPKGAEPRVIPMNVGRTQRAWVKNCLSLGLSGGFIEPLESTAIHMVDMGLRWLLMCFPTQDFDDATRNRYNQTVDAMYNEVRDFICLHYRLGNRTDDQYWIDARTQLKVPDRLAENLELWKHRLPSPLDLQTQFLFTHHTYQAVLLGKQVYRNGYGDGSFSRPYAMSEKNWKEYLRKSAAHTRATVAFKADHRQMLLALRGELGPGGVQIKKLGTVEPDDSTMALF

SEQ ID NO: 83005 - protein, 530 aa, Streptomyces sp.
  REGION 1..530: note = tr|A0A1A9CH49|A0A1A9CH49_9ACTN Tryptophan halogenase; OS = Streptomyces sp. Ncost-T6T-1 OX=1100828; GN = YW5DRAFT_01220 PE=4 SV=1
MSDNLIKKILVLGGGTAGWMAASYLGKALGPTVQLTVLEAPAIPKIGVGEATIPNLQRVFFDYLGLTEEEWMPECNASYKMGIRFINWRTPGAGTAGPRPYGRYGDQFDHLFGLLPNHEDLPLSHYWTYKKINGLTDEPFDRSCYPQPALFDRKLSPRFLDGRRVASYAWHFDADLVADFLRRFATGKQGATHIEDKFATAETDQQGRLVAVTTEAGRRLEADLFIDCSGFRSLLINQVMKEPFLDMSDHLLNDRAVATRVDHDDEEHGIEPFTSSIAMSSGWAWKIPMLGRFGTGYVYSSRFTSEEEATREFCEMWGISPDTHPMNHVRFRVGRNRRAWVKNCVGVGLSSCFLEPLESTGIYFTYAALYHLVRNFPDKRFDPVLRNRFNSEIESMFDDTRDFIQGHFSFAPRDDTPYWRACKELELAPEFLHKVEMYKAGLGVDLPVTDEDTYYGNFDAEFRNFWSNANYYCVFSGLGMMPEHDPTPLGYRPGSVESAEAVFAQVQRRRDELLDTLPPMHTYLRRLHGK

SEQ ID NO: 83006 - protein, 503 aa, unidentified
  source 1..503: note = Massilia yuzhufengensis
  REGION 1..503: note = tr|A0A1I1I9X9|A0A1I1I9X9_9BURK Tryptophan halogenase; OS = Massilia yuzhufengensis OX=1164594; GN = SAMN05216204_105140 PE=4 SV=1
MHNEPIKDIVIVGGGTAGWMTAAALSTMLNGRYNIRLVESDDIGIVGVGEATIPMIQRFNRVLGIDENEFMRETQGSFKLGVEFVNWGKLGDRYMHGFGRLGQDLATLPFDQYWQRMRRAGKAAPLEEYSITRMAAKADKFMPPRMDVPNSPLRDIAYAYHFDASLYAKYLRKLAESRGVVRIEGKITRATQRESDGFIDAIELESGARVEGELFIDCSGFRGLLIEQTLQTGYEDWTHWLPADRALAVPCESVAAMTPYTRATAHQSGWQWRIPLQHRTGNGHVYCSRFISDDEAASTLLANLDGRALAEPRLIKFQTGMRKQSWNRNVVAIGLASGFLEPIESTSIHLIQSTIQRLVDFFPDRGFSTIVRDEFNRQSRFEYERIRDFIILHYKLNQRSDSAYWTACANMAIPETLQHKMDLYRTHGRVVRVDNELFSEVAWIQVFEGQNMPIEGYHPLADTQSESDIADYLGGVRDVIAKCVNVMPSHRDYIAKTCAAKKM

SEQ ID NO: 83007 - protein, 507 aa, Shewanella baltica
  REGION 1..507: note = tr|A0A380A4W2|A0A380A4W2_9GAMM Tryptophan halogenase; OS = Shewanella baltica OX=62322 GN=NCTC10735_03134 PE=4 SV=1
MTIKTIAIVGGGTSGWLAANHIGRFLKDNPELSITLIESPGIPIIGVGEGTVPSIRKSLSSFGISESEFINSCDVTFKQSIKFVNWLDRTKHGNNNFYHHLFDMPSPFGEDLTPYWLINPREHFADLVSSQHAVCEENKAPKFITTPEYSGVTGYAYHLNAAKFAMLLAKNATERFNVEHVHATVNDVSFGIDGSIRSLLTDKGELIFDFYIDCSGFESILLAKRFDVPFIDKSQQLFVNTALVTQVPTQDFEKIPPFTIATAHKAGWIWDIALTQRRGTGFVYSNDHMSNAEAEDKFDQYLGGKLAELTPRKIPMKVGYRQQFWVKNCVALGLAQGFLEPIEATSILLTDFSARFLAERFPSDKDDIDYLAKRFNEIVSQAWERVVEFAKLHYCLSDRSDSAFWRDNRSDKTIPEGLKQRLKMWRNFIPIAEDFPSKFEVFNRENYLYVLYGMKYFTRPTYSNAEVDKRVVQHLAKMKLLKSKMISELPEHRELLDKIRLYGLQSI

SEQ ID NO: 83008 - protein, 523 aa, Brevundimonas vesicularis
  REGION 1..523: note = tr|A0A2X1BP89|A0A2X1BP89_BREVE Tryptophan halogenase; OS = Brevundimonas vesicularis OX=41276 GN=NCTC11166_00907; PE = 4 SV=1
MTTTSVEAPRTSDRGAAIRKVVIVGGGTAGWMAAAALARHLATTDVAITVVESSEIGTVGVGEATIPTIRRFYAQLGLTDADVMSATQATCKLGIRFEGWGGPRSDFIHPFGLYGQDLNGVGFHHYWMRQAETGDATPLSAYSLGASLALANKFVEPSPNPPSSLSVFDWALHFDAALFAQRLRRYSEGSGVTRIDARIAAVKLRAQDGFIDRLVLDDGREIEGDLFVDCSGFRGLLIGEALGTPYEDWGDWLACDAAYAVQTENTPGDPVAPYTRVTAHQAGWRWRIPLRHRTGNGLVFSSAHMSDDAAQAALMANLQGRPLSAPRRIDFRPGRRRQAWVKNCVALGLAAGFLEPLESTSIALIENGIERLKALFPDRDFAPAVLEEFNDQSAREMERTRDFIILHYWLNGRNEAFWRERREAAVPDTLRRKVDLWKARGAFVRYRWEMFHPASWLAIYDGLGLMPERVDPAVQGIDPVQLRQGLWGMRDAVADMVERTTSHDAFLARFGGVSDPKGISNAS

SEQ ID NO: 83009 - protein, 480 aa, Streptomyces sp.
  REGION 1..480: note = tr|V4KNM3|V4KNM3_9ACTN Tryptophan halogenase; OS = Streptomyces sp. PVA 94-07 OX=1223307 GN=B590_01709; PE = 4 SV=1
MPSPGDAASAESFDVIVVGGGPAGSSAATFVAMQGHRVLLLEKESFPRHQIGESLLPSTVHGICALLGVDEELHAAGFVKKRGGTFRWGSSTEPWSFDFALSEKFAGPTSFAYQVERMKFDQILLDNARRKGVVVRERCSVRDVVEENGRVSGVRFEDENGAAREASSRFVVDASGNQSRLYGRVGGRRRYSDFFQNIALYGYFEGGKRPAAPNSGNITCVAFDAGWFWYIPLSDTLTSVGAVVRKECADLIRGDRDKALAAMIADCPLVEGYLSEAKRVTSGPYGEVRVRKDYSYLSDNFWSPGLTLVGDAVGFIDPLFSSGVHMATFSALLAARSVNSVLRGDLEEEECFAEYATRYRREYQTFHDFLVSFYDVTRDEQQYFDDARRVTRDSSPGAGAFAGLVGGGASDDTALTSDSYRDQRKKDLSRQSRDIHWEGHRIQMQAAFGEADDDVPAVEGGLTIAQDGMHWAKSQESAAV

SEQ ID NO: 83010 - protein, 508 aa, Brevundimonas vesicularis
  REGION 1..508: note = tr|A0A1Z3U4I1|A0A1Z3U4I1_BREVE Tryptophan 7-halogenase OS=Brevundimonas vesicularis OX=41276; GN = CEP68_00870 PE=4 SV=1
MMTQNDAGPIRKIVILGGGTAGWMTAAALSHRLAGSAVSIELVESDEIGIVGVGEATLPHIRAFNTAMGIDEQTLIDQTQATFKLGIQFVDWGRPGDSYIHPFGAYGEPIEGIDFHHVWAARRAMGDVADISDYSYPVRAAEANRFQRPVSDPGSMLSTFSYAFQFDASLYAAFLRQVSCGRGVVRTEGKVVDHVLNGATGDVDAIVLSDGRRISGDLFVDCSGFRGRLINQALETTFEDWSHWLPCDSAFAVPCQTTAPVGPYTRATARAAGWQWRIPLQHRTGNGHVFSSAHISDEDAVTILMSNLEGPALAEPRRLSFKTGRRHKLWSRNVVAIGLSGGFLEPLESTSIYLIQLGITTLLDLFPDRVGMAADAEEYNRIMALEFDRIRDFLVLHYVANQRDEPFWREMRNMAWPDSLSAKVEAFKSRGLLPDYDIGVFLPPSWLAVLVGQNIVPNGWDPRVDRLEPHVLSDKLAALRDAVRSTVDRTPDHMTFIRQAAQRAGGLQ

SEQ ID NO: 83011 - protein, 415 aa, Burkholderia multivorans
  REGION 1..415: note = tr|A0A1W0YRJ7|A0A1W0YRJ7_9BURK Tryptophan halogenase; OS = Burkholderia multivorans OX=87883 GN=UA18_04731 PE=4; SV = 1
MNEKKSNSVDVAIIGAGPSGAVAAALLRKCGRSVLVLERQHFPRFSIGESLLPQSMCYLEEAGMLQAVVEAGFQFKNGAYFVHRDRTSSFDFREKFSDGWGTAYQVERATFDDLLIRCAASQGADVRFGHTVRAFQPGDMPRLDVVDEAGSEYAVEASFVLDASGFGRVLPRLLGLEAPTGLPTRAAIFSHVQDSLPAGSTDRDKICIAVHPERRDVWFWMIPLTNGRSSVGCVADAAFLDVPEAQQESLLRELLQSEPTLARLVGSKSFVMPVRRIAGYASNVASLHGHGYALLGNAGEFLDPIFSSGVTIAMRSAHLAVAALERQLRGETVDWARDYDLALRKGIDTFRAFVERWYSGVLQDIVFHEDKASDVKRMVCSILAGYAWDEANPFVREPARGLDLLAEICRSNAAR

SEQ ID NO: 83012 - protein, 538 aa, Burkholderia ambifaria
  REGION 1..538: note = tr|Q0B6E7|Q0B6E7_BURCM Tryptophan halogenase; OS = Burkholderia ambifaria (strain ATCC BAA-244 / AMMD); OX = 339670 GN=Bamb_4726 PE=4 SV=1
MSNPIKNIVIVGGGTAGWMTASYLVRALQQQANITLIESAAIPRIGVGEATIPSLQKVFFDFLGIPEREWMPQVNGAFKAAIKFVNWRKSPDPSRDDHFYHLFGNVPNCDGVPLTHYWLRKREQGFQQPMEYACYPQPGALDGKLAPCLADGTRQMSHAWHFDAHLVADFLKRWAVERGVKRVVDEVVDVHLDERGYISSLSTKEGRTLEADLFIDCSGMRGLLINQALKEPFIDMSDHLLCDSAVASAVPHDDVRDGIEPYTSAIAMNSGWTWKIPMLGRFGSGYVFSSKFTSRDQATADFLKLWGLSDNQPLNQIKFRVGRNRRAWVNNCVSIGLSSCFLEPLESTGIYFIYAALYQLVKHFPDTSFDPRLSDAFNAEIVYMFDDCRDFVQAHYFTTSRDDTPFWLANRHDLRLSDAIKEKVQRYKAGLPLTTTSFDDSMYYETFDYEFKNFWLNGNYYCIFAGLGLLPDRSLPLLQHRPESIEKAEAMFASIRREAERLRTSLPTNYDYLRSLRDGDAGVSRSQRGSTLAAQEIL

SEQ ID NO: 83013 - protein, 512 aa, Saccharomonospora glauca
  REGION 1..512: note = tr|I1D1Z0|I1D1Z0_9PSEU Tryptophan halogenase; OS = Saccharomonospora glauca K62 OX=928724; GN = SacglDRAFT_02058 PE=4 SV=1
MIHSVVIVGGGTAGWMTASYLKAAFADRIDVTLVESAAVSRIGVGEATFSTIRHFFDYLGLDEADWLPKCAGGYKLGIRFENWHGNGEYFYHPFERLRVVDGFSLADWWLAIGDHSRPMDRQVFLTSALCEAKRSPRMMDGSLFVSGLDGSLGKSTLAEQRAQFPYAYHFDADQVAAYLRSYATERGVRHVVDNVQEVLQDQCGWISGVRTAEHGVLTGDLFVDCTGFRGILINKTLGTKFESFEDVLPNNRAVALRVPRETETDMAPYTTARAMSAGWMWTIPLFRRNGNGYVYSDQFITPEEAERELREAVAPDRDDLEANHIRMRIGRNERSWVKNCVAVGLSSAFVEPLESTGIFFIQHAIEQLVKHFPDKTFDPALIEAYNRRINRAIDGVKEFLVLHYKASSRADTPYWKESKVRAMPEPLAERLKLAETQLFDEETIYPHYHGFESYSWNSMIIGLGYRPKKPLPALAHLDPTDALAEFDKIKTEAAEMVAALPSCYDYLASLNE

SEQ ID NO: 83014 - protein, 501 aa, Shewanella baltica
  REGION 1..501: note = tr|A0A379ZZV5|A0A379ZZV5_9GAMM Geranylgeranyl reductase family OS=Shewanella baltica OX=62322; GN = NCTC10735_02861 PE=4 SV=1
MKVKQAIRKIIILGGGTAGWMAAAALANNPVFAAIELCLVESDNIGTIGVGEGSTPHLKRFMDNLGISEKDWMEQCHASYKTGIDFINWNGDGQQYFHPFYFQMDVKPAEVFFINANARRRGHGNAVKPDAFFSSGVLAKHNLSPRPKKTLPCANEYGYHFDATELANYLKDYACQRGVRQIIADVVEVSTTQHQQIETLILANGERLSADFFIDASGFSAKLIHKALGVPFQSFAEELLNDSAVTVPVPALLDSTQTQQAKYHTRATALSAGWLWQIPLTHRLGNGYVYSSRHLSANAAAKELLHNVNLPESTQVRFLKMRVGVSDKAWHNNVLAIGLAQSFIEPLEATSIMMTQFTLEKFMSLFERYQLNKQAETLSRQTLNQAVMQLVLGIKDYIQAHYVTSQRSEPYWVAARKVAISQRLTQLLKAWYQGEDFDLLLYQYDQQLAYFRPSWYALLAGMDYHDPKLKRPFEPISADITAQAISYCQTLVEQYFQPKHS

SEQ ID NO: 83015 - protein, 501 aa, Shewanella piezotolerans
  REGION 1..501: note = tr|B8CSA4|B8CSA4_SHEPW NAD(FAD)-dependent dehydrogenase, putative OS=Shewanella piezotolerans (strain WP3 / JCM 13877) OX=225849 GN=swp_3710 PE=4 SV=1
MKIKPKSIVIVGGGTAGWMAVNSLLSSWRDTVKITLVESKDIGIIGVGEGSTPYLKQYFSSLGIKESEWMPACDATYKAGISFPDWSTKAGYESYFHPFFSKLDLKPADLFFHNSGLRRRGVKVDALPNHYFVSSQLIELNKSPVPKIDLPFDVDYGYHFDSAKLGRFLKERALKLGLTHVIGNVASVETSVDGHITAVNVEAQQSLNADFFIDCSGFKGLLVNETLGLSFCSYKDSLFNDAAVAIPTNLASHTEVPAQTVSRALTNGWSWKIPLTSRWGNGYVFSSDFISPDSAETELRAHLGLLDADIEARHLKMRVGRLNQHWHKNCLAVGLSQGFIEPLEATALMLIQFTIERFISSFEDESKSDELTKADYNKDLNKTFDGVRDYIVAHYKLNSRNDSTYWQACREDARTPDSLANLITIWDNGGDFESALKQQQDSLIYLRPSWYCLFSGMGRFPSTSIEDTQSVPAYRAKEYCQKIAKKYFISHQTQLEKIYQN

SEQ ID NO: 83016 - protein, 509 aa, Colwellia sp.
  REGION 1..509: note = tr|A0A1D8S0V6|A0A1D8S0V6_9GAMM Tryptophan halogenase; OS = Colwellia sp. PAMC 20917 OX=1816218 GN=A3Q34_05240 PE=4; SV = 1
MVILGGGTAGWMTANLMVEKWQNHPVSITLIESPSLGVIGVGEGSTPQLKSFFDKIGVTEQEWMPQCNATYKNGILFNGWSTRVGFESYFHPFTSLIDAHTAPAFVYNTQYRRKGFNVDCHPDRFFLSAQLAKQKKSAVGEYNFPFDIGYGYHFDAILLGKFLGKVAQKKGVKHILAQVDEVNVNDAGDIQSLTLDNGEVIAGDFFVDCSGFNSLLLQKTLKVPFISFKDNLFNDSAVTISVARDENAQQGLNSQTIATAMKCGWAWDIPLTNRTGNGYVYSSKHCTGEQAELELREKLSLVDEAIDVRHLKMKVGRVKQHWHKNCVAIGLSQGFIEPLEATALHFVQESIEGFIDDFSLGEYSNIYQDRFNEKMNHRFDGIRDYIVAHYRLSSRDDTEYWRKNSINPNISNNLKKIVQCWVAGDDLNKALIQPGMVSFYPPVSWHAMLAGYGIFPELSQDKRLAEKFGEQALDAAHKYDLAHIDQFIQRCSVNFADHQQFINDKLINK

SEQ ID NO: 83017 - protein, 517 aa, Colwellia sp.
  REGION 1..517: note = tr|A0A1D8RXD3|A0A1D8RXD3_9GAMM Tryptophan halogenase; OS = Colwellia sp. PAMC 20917 OX=1816218 GN=A3Q34_13475 PE=4; SV = 1
MDDGMINQVVIVGGGTAGWLTAAKLAKHLGSNKSDAVQVTLIESPDIPTVGVGEGTWPTMRKTLADLDIEEHDFINYCNASFKQATKFVNWRTPAKNGQDSVYYHLFSSVAHADEFNLSPYWSLSDQQIDYANFVSPQALICEGGLAPKTIANRGYDGLLNYAYHLDAGKFADFLKKISCERFGVKHLAANVLSANLNALGEISSIETKELGRIEGDFFVDCTGGRCLLLGEALGVGFTPINDVLFTDNAIAIQVPYQNEEDAISSSTISTAHSAGWTWDIGLSNRRGTGYVYCSDFVSHDQAEQTLRDYIGPQAEQLSARRLKISSGYRNKFWEKNCVAVGMSAAFVEPLEASAIFLIEASANMLCELFPRNKRQLPAVEKTFNDSFHYRWKRTIDFIKLHYFLSQRQESFWLENKSLNSVPESLLEQLDNWKHRPVSKYDFQNTFEPFIQDSYQYVLHGMGYVQALEYNASTFNEHRMLESILKKNAKLKQQLQNNLPTNRDLLNKVRAFGFQKI

SEQ ID NO: 83018 - protein, 531 aa, unidentified
  source 1..531: note = Streptomyces caatingaensis
  REGION 1..531: note = tr|A0A0K9XBN8|A0A0K9XBN8_9ACTN Tryptophan halogenase; OS = Streptomyces caatingaensis OX=1678637 GN=AC230_20560; PE = 4 SV=1
MTDDNRIKNIVVLGGGTAGWMSAAYLGRALGDTVRITVLEAPAIPRIGVGEATIANLQKVFFDFLGLREEDWMPECNASFKMGIRFVNWRTPGAGEATGRPLGGGKDHFDHLFGLLPEHDDLPLSHYWTYKRLNGLTDEPFDRACYPQPAVFDRKLSPRFLDGTKWASYAWHFDAQLVADFLRRFATQKQGAIHVEDTFVGADIDQRGHITAIRTEGGRTLEADLFVDCSGFRSLLVNQVMKEPFLDMSDHLLNDRAVATQVPHDDEADGVEPFTSAIAMSSGWTWKIPMLGRFGTGYVYSSRFTTQDEATEEFCRMWGLDPATQPLNHVRFRVGRNRRAWVKNCVGIGLSSCFLEPLESTGIYFVYAALYQLVKNFPDKRFDPVLVNRFNSEIETMFDDTRDFIQAHFSFAPRDDTPFWRACKELELAEGFKEKVALYKSGLGVNLPVTDESSYYGNFEAEFRNFWSNANYYCVFAGLDYLPDHVMPALAHRPESIATAESAFAEVAKRREELLRTLPSTYDYLRRLHRK

SEQ ID NO: 83019 - protein, 423 aa, Streptomyces sp.
  REGION 1..423: note = tr|A0A2W2MHE9|A0A2W2MHE9_9ACTN Tryptophan halogenase; OS = Streptomyces sp. NTH33 OX=1735453 GN=C1I97_00950 PE=4; SV = 1
MSSSLHGVPDEYDVIVIGGGPAGSTTAGLLAKRGHRVLVLERERFPRYHIGESLIPAFMRPMDELGITERMDARGFERKYGGTLVWGNAQVPWNFSFVEGGSHEYAYHTRRADMDSLILDRARELGAFIIEEATVKEPIETDGRVTGVRYTLRGTDGSHEARAKLVIDASGQARLLSRRYADITWHEELRNVAVWTYFDNCERLGGDEYTNILIEGLDEGWFWAIPIDKGTVSVGYVTRSEDASKDGKSLEDLFKGEVEKSTKLKKMLAGANQSAGWRTARDWSYTSQSFNGNGWVCVGDSAAFVDPLFSTGVALATLAGSTLARIVDQIIQHPEIEEQALKRYVTAYRAFFDEIRDFVERFYDRTKYKEFYHSLATEMVDPDRERTPSSNFVRLISGLSGKHPMLTLQIDDLIEQSAEAAES

SEQ ID NO: 83020 - protein, 520 aa, Altererythrobacter epoxidivorans
  REGION 1..520: note = tr|A0A0M3TAV4|A0A0M3TAV4_9SPHN Tryptophan halogenase, putative OS=Altererythrobacter epoxidivorans; OX = 361183 GN=AMC99_02458 PE=4 SV=1
MSGTMSASVARTVILGGGTAGWLAACFLAVRRPELSITLVEAPDIPTIGVGEGTWPTMRGTLEAIGIEESEFLARCDASFKQGSRFDGWVDGEPDDRYYHPFSAPPPGDMHGLVAAWQQAAQDRSFAHAMTPQAQLCDRDLAPRQTGMPGYAAAANYGYHLDAGKFAALLAEHGEQRLGIRRIAARVDEIERAAGGDIAAVVTSDGERIEGDFFIDCSGHAGVLIGGALGSEWVDRSDVSFNDRALAVQVPVAPGSAVASQTVGTAHEAGWLWDIALPTRRGIGCVYSSRFIDDDRADAILRRYVAAHVPHIDVEGLQPRKLSFRTGHRRDFWRRNCVAIGLSAGFIEPLEASAIVLIELSVRALADNFPASRRAMDIHAGRFNDLFRYRWDRIVDFLKLHYVLSRREEPYWQAQRSAESIPPRLAEQIELWRDQPPSSWDFPQVDEIFSAASQQFVLYGMGFPVPPSATNPAPEAALARIAEVRDQTRALSAALPTNRAYLDKVAASRTDAAMQKEQTA

SEQ ID NO: 83021 - protein, 543 aa, unidentified
  source 1..543: note = Nostoc punctiforme
  REGION 1..543: note = tr|A0A367R6Y4|A0A367R6Y4_NOSPU Tryptophan halogenase; OS = Nostoc punctiforme NIES-2108 OX=1356359 GN=A6769_30775; PE = 4 SV=1
MAQNIKNIVIVGGGSAGWMTAAYLSKALDKNVQITLIESSNITTVGVGEATFSTIKLFFDFLGLQEHEWMPKCNATYKMAIKFVNWNSQGQYFYHPFQRYETVDGFDISEWWLKTKRHEAPFDYSCFMIPLLCDLKRSPRHFNGEVFDNKAQDLFTQEITTQKNVLADLKAQYPYAYHFDANLLARFLKDYGKQRGVRQIVDDVVDVNLGEDGSIDYVKTKEHGTIKGDLFIDCTGFRGLLINKALGEPFISFSESLLCDSAIAMQIPTDIKKNGINPYTTATALSSGWVWNIPLYGRVGTGYVYSSAFISKEEAETEFRQHLGEAANDCRASHIKMRIGRNRNSWVKNCVAIGLSSGFVEPLESTGIFFIQHGIEELVNNLPDTSFNEDVIKNYNKTVANCIDGVRDFLTLHYCASNRADTEFWKASKRDIVISEELQERLRLWKTRLPNNKSINPNYHGFESYSYSVMLLGLNYLPENNLPVLNHIEDQKAIATFDAIKERTDYLSATLPSQYEYLTYVIKSQEQSEYLSENDLVRSLVTT

SEQ ID NO: 83022 - protein, 497 aa, unidentified
  source 1..497: note = Mycobacteroides sp.
  REGION 1..497: note = tr|A0A0R3EW96|A0A0R3EW96_9MYCO Tryptophan halogenase; OS = Mycobacteroides sp. H092 OX=1720573 GN=AOT91_20215 PE=4; SV = 1
MTASYLKVAFGDRIAVTVVESARIGAIGVGEATFSTIRHFFEYLGLEEHEWMPSCCATYKLGIRFQDWRKPGHHFYHPFERQRVVDGFGLTDWWLDNPRSDSFDRDCFLIGTLCDNDKSPRRLDGSLFMGTDGENTAYRTTLSEQDTQFPYAYHFDASLLADFLRDFAVRRGTRHVVDDVVDVLQDDRGWISQVRTRAHGSIGGDLFIDCTGFSGLLLGRAMGEPFESYQGSLLNDRAVALRVPTDQDRGHLPPYTTATAQDAGWIWSIPLFDRIGTGYVYAEDYCSPEDAERALRDFVGPEAEGLEASHIRMRIGRSRRSWVGNCVAIGLASGFVEPLESTGIFFIQHGIEQLVKHFPDANWEESLRDSYNRVINRCMDGVREFLVLHYYLAARVDTQYWRDSKSVQLPAALAERIEHWRSKLPDTGSVYPHYHGFEPYSYVCMFVGLGGIPARPSTVVRYLDATRAQREFDLLAQQASRLRHSLPTHREYLAQMY

SEQ ID NO: 83023 - protein, 501 aa, unidentified
  source 1..501: note = Massilia yuzhufengensis
  REGION 1..501: note = tr|A0A1I1DP91|A0A1I1DP91_9BURK Tryptophan halogenase; OS = Massilia yuzhufengensis OX=1164594; GN = SAMN05216204_101292 PE=4 SV=1
METKGPNGMGRPVRRVVIAGGGTAGWMAAACISKVLGKQLDIRLVESDEIGTVGVGEATIPTLLNFHNLLEINEQEFMAETKATFKLGISFENWRNVNEDYIHSFGLTGTDHWTAGFQHFWHKGRERGLAGDYGDYCLELRAAQENKFAHLPRNGMNYAYHLDASAYARYLRKFSERLGVQRIEGKIVDVTTSALTGHIRSITLDSGADIEGDLFIDCTGFRALLIGEAMKVKYQDWSQWLFNDCAAALQTASAGDAVPLTRSIAHAFGWQWRIPLQHRVGNGIVFSSRYVEQDEAIAALQANIVGEPLMKPRVIKFTPGQREQVWKGNCVAIGLSSGFLEPIESTSIHLIQRGIVRLMQMFPANGIAQTDVEEYNRQAATEIEHIRDFIILHYKVNNRLDPYWRDAREMQVPVSLQHRIDLFRQTGRVFRVPNELFAENSWIQVMLGQGIMPLQHHQTADLMGDAELSHFLGAIKGQVDKTVAQLPAHQAYVERYCSAPK

SEQ ID NO: 83024 - protein, 497 aa, Streptomyces sp.
  REGION 1..497: note = tr|A0A2W2N5T4|A0A2W2N5T4_9ACTN Tryptophan halogenase; OS = Streptomyces sp. NTH33 OX=1735453 GN=C1I97_07035 PE=4; SV = 1
MSNTEAFDVVVVGGGPGGSTLAALVAKRGHSVLVLEKEFFPRYQIGESLLPSTIHGVCRLTGVADELAKAGFTIKRGGTFRWGANPEPWTFAFSVSPRMAGPTSTAYQVERSKFDKILLGNARRVGAVVREGCAVTDVVEDGDRVTGVRYTDDQGVRHEVSARFVVDASGNKSRLNQRIGGRREYSDFFRNLALFGYFENGKRLPEPNRGNILCAAFESGWFWYIPLTDTLTSVGAVVRREMAEKVQGDPEKALQALIDECPIISDFLASARRVTEGQYGQIRVRKDYSYHHTAFWRPGMMLVGDAACFVDPVFSSGVHLATYSALLAARSINSTLAGAVEEEAAMKEFEARYRREYGVFYEFLMSFYDMHQVENSYFWQAKKVTRNSRPELESFVDLVGGVSSGESALSDADAVARRLHAQTEEFASAVESIADGKNDNWAPLLGSSVVREAMAESSKVQMHAVLGEDAEEETPLFEGGLIPSPDGLSWATPAGRD

SEQ ID NO: 83025 - protein, 467 aa, Sphingomonas sp.
  REGION 1..467: note = tr|A0A2U0USF8|A0A2U0USF8_9SPHN Tryptophan halogenase; OS = Sphingomonas sp. CF311 OX=2135485 GN=C7501_3655 PE=4; SV = 1
MIRRIGIVGGGVAGWMTALALTRALPGVRIDLVETAGPDWSLGPFGPAEASLPDFPWWLADHGVDENQLLRAAHGSFALGTAFSGWAGQEADWFLPFGTIGAPLGTTAFHQLAARLRAGGQQLRIADFSLAAIAAASGRFARPSDDPRSVLSSYGYGLHLDRAGLAATLRAASGLEPIGSFRAFAGDMVTLQDGTSIAADLWLDCSGPAALLAGYGGWESWAEWLPCDRVVESWNPAEGVPPPYGHAGAFEAGWQRTLPLVGGQGGALFYASAHLPAQPGAIPLVQGRRSQAWTGKVIALGAAAMLLEPLHGWNLALLQNALARLLALLPAAPNGPEPAEYNRLTAGEADRVRDFAILHYKTNGRTGEPLWDAARAMPVLEPLRHKLDLYESRGRVPLYDEELFEADDWIAVLDGQGIRPRRHDALADAIPEPALAQHAGRIREVILDAVRTMPHHGTTLRAEGLIA

SEQ ID NO: 83026 - protein, 493 aa, Planomonospora sphaerica
  REGION 1..493: note = tr|A0A171CRR3|A0A171CRR3_9ACTN Tryptophan halogenase; OS = Planomonospora sphaerica OX=161355 GN=PS9374_02769 PE=4; SV = 1
MSSPQEYDVVVVGGGPAGSTVSTLVGKRGHRVLLLEKEGFPRYQIGESLLPATVHGIAHLLGVDDELRRAGFTVKRGGTFKWGSNPKPWTFEFAVSRRMAGPTSYAYQVERMKFDSILLDNARKNGVEVRENSPVTGVVEEDGRVRGVRYRDLDGRTAEVRARYVVDASGNTSRLYGRAGAERRYSPFFRNLALFAYYEGGGRLPAPYEGNILSVAFDHGWFWYIPLSPTLTSVGAVVGRESAQLVQGDPEAAMRRFVDACPLIREKLAGATRVTEGPYGRFRVRKDWSYCNTRFWGPGMVLVGDSACFVDPVFSSGVHLATYGGLLAARSVNSCLAGTVDEESAFAEFERRYRREYGLFHEFLIGFYDMHQSEDSYFWRARKVSDTAPTDVEAFVELVGGVASEEIAGGVMARARLAATSRELAKTVAAFEEEPVDSLGAASGPVLSRLLEQGAALQGRALLGERAGEGGPLEPGGLRASADGLMWVRHEPA

SEQ ID NO: 83027 - protein, 518 aa, Pelomonas saccharophila
  REGION 1..518: note = tr|A0A4R3VG95|A0A4R3VG95_PELSC Flavin-dependent dehydrogenase OS=Pelomonas saccharophila OX=304; GN = EV671_1001223 PE=4 SV=1
MSDIQSIVIVGGGTAGWLAAAFLQRTLSATRPTPLPITLIESPQIGTIGVGEATVPTLRATMQALGLPESTLFTAADATLKNGIRFNGWRKGGTAAEDSYDHPFDMPLPFNGYPATVHWLNLMQRGMLQPPMAEACTVQTRLYDGNQSPKLMHSPDYQAPVSYGYHLDAVKLATLLQQTAIERGVQHVQGNVAQVHRGPAGIESVELDDGRRFAASFFVDCSGFQSLLLQKTLDVPWESFSDWLPCDRAVAFPVAYADENAPLRSYTTSTAQDAGWTWEIDLQSRSGTGYVYASRFCSDDEAVATLQRHNAGRTALAEPRLLRMRVGHAARAWEQNCLALGLAGGFIEPLESTGIYLIEWVLQLFVDHIAPAGDSTVCRDRLNRAVGDVYEELRDFIVAHYALSQRRDTPFWRTCTDPASMPPRLAELLQLWDAKLPTPTDLDKRLSLFGPANWTYILAGMHRLPSRGIGLAAHIAPEVSLKAMEHVRSVRQMASQQSPTLRDFVRKLRGAVDHKPAR

SEQ ID NO: 83028 - protein, 506 aa, Pelomonas saccharophila
  REGION 1..506: note = tr|A0A4R3VEZ4|A0A4R3VEZ4_PELSC Tryptophan halogenase; OS = Pelomonas saccharophila OX=304 GN=EV671_100411 PE=4 SV=1
MTDMHDTASPRALRRIVIVGGGSAGWMAAASLATALASRRCAIMLIESDEIGTVGVGEATIPPIRTFNQSLGLDEAEFMRRTQGSFKLGIQFVNWGRQGQRYFHPFGPHGVAFDYAPLHQHWLKSRHEGGDTSIDEHSMAWAAARLNRFAPPVGDPRDVRSTYDYAYHFDAGLYARFLREMAEPRGVQRVEGRIAAVQLHPDSGHVDRLTLADGREIEGDFFIDCSGFRGLLIEEALHTGYEDWSHWLPCDRALAVPCDRGPDFTPYTRSTAHAAGWQWRIPLQHRTGNGHVYCSRFISDDEAAATLLAHLDAPAQSVPRPLRFTAGRRRQFWNRNVLALGLASGFMEPLESTSLHLVQSGISRLLALFPDRDFDPLTIAEYNRIGIQEWERIRDFLILHYKLTERDDGELWRYCAAMPVPDALQWKIDHFRRYGRLVSEGNDLFGNQSWLAAHIGQFNWPQRHDPLVDLRGIDGSAMLRRQREAMAQVAQGMPTHEDFVARHCAA

SEQ ID NO: 83029 - protein, 534 aa, Streptomyces sp.
  REGION 1..534: note = tr|A0A2S4XMT5|A0A2S4XMT5_9ACTN Tryptophan halogenase; OS = Streptomyces sp. Ru73 OX=2080748 GN=C3486_25675 PE=4; SV = 1
MTSTDTRLKKVVILGGGTAGWMTAAYLGKALQGTVDITVLEAPAIPRIGVGEATVPNLQRAFFDYLGIAEDEWMRECNASFKMAVRFVNWRTDGQGEAAARELPDGRPDHFYHPFGLLPDYDQTPLSHYWYLRKHEGRTTEPFDYACFREPPVMDAMKAPRWLDGRPATRYAWHFDAQRVADFLRRFATEKQGVHHVQDEMTRVEQDERGYVTALHTKAGRVLDADLFVDCSGFRGLLINKAMDEPFLDMSDHLLCDSAVATAVPHDDEENGVEPYTSAIAMSSGWAWKIPMLGRFGTGYVYSSKFTERDEATAELSRMWGLDPEETEFNHIRFRVGRNRRAWVKNVVGIGLSSCFVEPLESTGIYFITAAIYQLAKHFPDKTFNQGLIDSFNHEIEVMFDDTRDFIQAHFYYAPRNDTPFWQANKELKLADNIKKKIAAYKAGLPINSPITDESTYYGNFEAEFRNFWTNGSYYCIFAGLGLEPDAPLPALAHKPESVAGAEPLFETVKRQQQNLLETLPSTYDYLRRLHGQA

SEQ ID NO: 83030 - protein, 508 aa, Pelomonas saccharophila
  REGION 1..508: note = tr|A0A4R3UZJ7|A0A4R3UZJ7_PELSC Tryptophan halogenase; OS = Pelomonas saccharophila OX=304 GN=EV671_10134 PE=4 SV=1
MSNSAIRRIVIVGGGTAGWMTAAPLAQRFEKAGAGRCEIVLVESPDIGSIGVGEATLPPIRAYNRTLGLDDADFVRRTQGSFKLGIEFRDWGRLGRRFFHGFGDFGPAIDNRSPWQHWLRLSRIVDGLPGYEDWSMATVMALRNRFTPPVDGAPSAANAYSFAYHFDAGLYAAYLREYALARGAQRVEGTIVDVELRPEDGFVAAVRLADGRRVDGDLFIDCSGFRALLIAGAMQSPFEDWSALLPCNSALAVPSERVAPLTPYTMSTAKPAGWQWRIPLQHRTGNGHVYCSGFIGDDEAAATLLAGLDSRALDTPRQLRFTTGRRRQGWVKNVVAIGLSGGFLEPLESTSIQLIMDGVGRLIQLFPDKRFKPHLAAEFNRRMAGQYESIRDFIVLHYKLTERRDSELWRYCAAMPIPDSLAHQIELFRGAARVAIFDPEGFAEPSWVSLFLGLGLQPESHDPFVDHIDAKALLQHFTRLRQAIAQTAAGVPDHGDYIERHVKAPPQP

SEQ ID NO: 83031 - protein, 489 aa, Asticcacaulis excentricus
  REGION 1..489: note = tr|A0A3G9G4H9|A0A3G9G4H9_9CAUL Tryptophan halogenase; OS = Asticcacaulis excentricus OX=78587 GN=EM6_2269 PE=4 SV=1
MRTVVIVGRDEALWLTAAVLQRTFARSDLSFTAVELPSLLRPGEVLPTLGSQAGFHARLGLEEAVLMRALGATFTLGQQYVGWAKTAPPVFVGYSSTGVALHNVPFHHLWLRARASGMNVAFEDFAINAACAKQGRLLTPDADLSGFADADRGFHLPAAPYAEMLRQVAIKRGVRHLPAAHVSPVVKGPEMTAVVLSDGQTVEGDLFIDTTGSDARLLSQMPETGFSSWRQWLPFDRLLTTYAAPATPLPAYAQITAFRSGWAGLFPLRDYTAVQQAYIRDELSDDEAFEAAAMVVKMSLHPQATVTPFEAGRRPAWSGNVIGLGEAAAVLDPLGTARMPALLLGLSHLTALFPLDTSGLESAVYNRTVGQAYDRLRDAQIWLYSLNKRRDQPVWDHLRSVSLPPELAYKREVFAACGHLPVYDDETFDEAWWIAAGLGHGLFPATHDVRADQLAEPELIRHFQTALGYVRKQVEAMPTPDAVSRAATV

SEQ ID NO: 83032 - protein, 502 aa, Brevundimonas vesicularis
  REGION 1..502: note = tr|A0A1Z3U4H2|A0A1Z3U4H2_BREVE Tryptophan 7-halogenase OS=Brevundimonas vesicularis OX=41276; GN = CEP68_00885 PE=4 SV=1
MSDGSIINRIVIVGGGTAGWMAAAALAHALEGAGKTVALIESEAIGIIGVGEATIPEILKFNARLGIDEADFLRETKATFKLGIEFDGWRREGERYFHPFGAFGLDMEGIAFHHFWLKACAEGGSEPLETYSMAWQAARRGRFVHPQGGPQSPLSSLGYAYHFDAALYAGFLRRFAEGLGVVRREGRVVEVQQAADGDITGVRLNDGRVVEGDFFIDCTGFVGLLIEQALKSGYEDWSNWLPCDSAVAVPCVREEALSPYTRSTAREAGWQWRIPLQHRVGNGYVYSSAHISHQEAEDALMSRLEGTALAEPRRLRFATGRRKDCWKRNCVAVGLSSGFLEPLESTSIHLIQSAITKLITLFPSHKNSEGLRREFNALMEEEFFTVRDFLILHYKVNQRAGPFWSQVRDMPIPDRLAAKIALFEETGRIVRRDHDIFSESSWLAVAVGQGLTPHGRHPISDVINHDANLGRLSAIRDSIWRTADALPTHEGILTTTMNRKAF

SEQ ID NO: 83033 - protein, 506 aa, Pseudomonas nitroreducens
  REGION 1..506: note = tr|A0A239KU00|A0A239KU00_9PSED Tryptophan halogenase; OS = Pseudomonas nitroreducens OX=46680 GN=SAMN05216209_3896; PE = 4 SV=1
MMLNLSNCRRVAVVGGGSAGWFAALELRKLFLHKVEVVLVEAESLGIIGAGEGSLPNFNRALEHYGLDRTEFMRETHSTHKLGLALEGWRSGAPDDIFLHQFSYSHDGVDLTSWVEPNGSYPLASILINQGYQLQHYPATWKMWQEGASQATAEAFLQSLPAKTPMAYHFDARKLASYLRDIAIKRGVQHINATVESVRLDEKRHVTALVLPDREIEVDFVIDASGLHRLIIGKTLNASWQSYADHLLLNRALPFFIPSQTEHPPLVTRAIAMKHGWMWCIPTLERLGVGYVYCDRYTDKEAAVKEVQDYWGMDIEPANDFAFEPGHYDQVWLGNVMAVGLSSGFVEPLEATSIGQTLDQLARFGELIFACDGIIPQQLIDQFNHEIGRYWDGIRDFLFLHYDTPRNDTAFWRAASNAAAPSTYKELKRTLAHRPPRLMDMEQYQGGPFRMFGVPNWMSVAAPLGILSREATALDLRSLSQEKRQRLGSFLAKVESRMKAESGASN

SEQ ID NO: 83034 - protein, 483 aa, Sphingomonas sp.
  REGION 1..483: note = tr|A0A2U0USH1|A0A2U0USH1_9SPHN Tryptophan halogenase; OS = Sphingomonas sp. CF311 OX=2135485 GN=C7501_3654 PE=4; SV = 1
MLIGRVLVVGGGTAGWMAAAALAHKFAGTGLAITLVESAEIGTVGVGEATIPHIRHFNATLGIDEAEFLAATRGTYKLGIEFVNWGRIGDSYIHPFAEFGEALGGVPFHQQWLATPEAGAFEDYSLPIQAARRGRFRRPEGDPYNYAYQFDAGLYARFLRSYSEARGVVRREGKVVDVALDGDSGFVRSVTLESGEAIEADLFLDCSGFRGLLIEQALKTGYEEWTHWLPCDRAIAIPCANQGPLPPLTRATAQDAGWIWRIPLQHRTGNGHVYSSGFTSDEAALETLLAQLPAAPMAEPNRLRFVTGKRRRQWVGNTVAIGLASGFLEPLESTSIHLIQVAIGRLLDLFPTQAWDPIDAAEFNRLMALDYERVRDFLILHYHATEREDSAFWRHCRSMALPDSLEHKLALFRERGVVVQYRDGTFLEPSWLAVYLGQHVTPRHPDPRAGGEGIAAALAAMRAEIVAVAGAMPSHEAALGMAA

SEQ ID NO: 83035 - protein, 505 aa, Asticcacaulis excentricus
  REGION 1..505: note = tr|A0A3G9G4U9|A0A3G9G4U9_9CAUL Tryptophan halogenase; OS = Asticcacaulis excentricus OX=78587 GN=EM6_2268 PE=4 SV=1
MTPIRNITILGGGTSGWMTAAVLSRAFTPDACTIRLIESEEIGIVGVGEATLPQVRDFNTWLGLDEAEFMRATNATFKLGIEFRGWGTSGSYHHPFGVHGQSAGGIPFHQLWLKARTFMDPGSIEDYAFPIRLARENRFDFPVEDPKSIRSAYAYAYHFDAVLYARYLRQWCEARGVQRIEGQVTGVDQNAETGFVERLTLASGESVGGELFIDCSGFRAVIAGQALNLGWEDWTPWLPCDRALAVPCERTDDLTPYTRATAREAGWTWRIPLQHRTGNGYVFSSRFTTEDRAREVLLGALDAPAQAEPRLLRFQAGRRTASWHKNVIALGLASGFLEPLESTSIYLSQIALTFLMRLMPDTRFDPALAREFNRLIDIEYERVRDFLILHYHANSASQGPLWDYVRSMPVPDSLKEKMALFRHRGHVQQYKDGLFSPASWIAVFMGQDVMPQAYDRQADGLSEEALTGYLKDLKRKIDSNLAVLPSHAEFVAAHCYNPNSGISHD

SEQ ID NO: 83036 - protein, 491 aa, Pelomonas saccharophila
  REGION 1..491: note = tr|A0A4R3VJK4|A0A4R3VJK4_PELSC Tryptophan halogenase; OS = Pelomonas saccharophila OX=304 GN=EV671_1002288 PE=4; SV = 1
MAQKYERIVVVGGGSAGWMTATALATEFKGRIGIELVESEDIGIIGVGEATFPSIREYNRLVGIDEAEFLRATNGTYKLGIRFHDWLELGRDYFHTFGHFGNLFGSQTLWAQHRRMGLAEPLGQQCVPTVMAMQGRFVLPSEQAQFKYAYHFDAVQYAAFLRQLAIQRGVRHTQGRIVEVARRADGGVAALQLDDGRRVEGDLFIDCSGFRSLLLGDALQEPFVDFSHWLPVDGAWACPCERSGEEIKPYTEATALEGGWAWRIPLQNRTGHGHVFSSRFIDVDRAREQLLARLDGKPLAEPRLLRFTTGHRQRFWVHNVVSIGLSSGFLEPLESTSIYLIQDGIARLMAALTTGRPLDENDLALFNDGAARRFARIRDFIILHYCLTRRRDSELWRHVATMELPETLAFRLALWRGYGVLHEYDEEGFDATSWLAIHAGMDHWPERQDPVIAEIPAERALQALKGRSKAIAASVERMPLHRSTLRQVLGQ

SEQ ID NO: 83037 - protein, 504 aa, Shewanella violacea
  REGION 1..504: note = tr|D4ZIJ0|D4ZIJ0_SHEVD Tryptophan halogenase, putative OS=Shewanella violacea (strain JCM 10179 / CIP 106290 / LMG 19151 / DSS12) OX=637905 GN=SVI_1518 PE=4 SV=1
MMNSMTNSNKKVQKIVIAGGGSAGWMTAAALSKLLGKNLDICLIESEEIGRIGVGEATIPPIRVFNQLLGIDEQDFMRSVQGTFKLGIEFTNWGALGDDYIHSFGTTGKECWAAEFQHFWLKGKQQGLTAEFGDYCVELQAARAGKFFSSKDSSLNYAYHIDAGLYAKYLHDLSIKHGVQHIEGIIDDVSIDAQNGHITSVTLKDGQLIKGDLFIDCTGFSARLIEGALNTGFESYSHLLPCDAAVAVQTEKSAEPRPYTQSMARDSGWQWRIPLQHRVGNGLVYCSRFISDKDAIASLMNNLESPAITEPRVFKYKTGRRLKGWNKNCVAIGLASGFVEPVESTALHMIMSSILRLMKLFPHDAISHANINEYNKQTKEEMERIRDFIILHYKATSRDDTAFWRYCQNMEIPATLSHRIELFKDTACVCLTETELFRIDSWTQVMLGQGIIPKHYHQIVDNMSDTELKRFLAGLKQMVDKQVTQMPYHQQFIDQYSKSVPITE

SEQ ID NO: 83038 - protein, 501 aa, Massilia sp.
  REGION 1..501: note = tr|A0A085FY88|A0A085FY88_9BURK Tryptophan halogenase; OS = Massilia sp. LC238 OX=1502852 GN=FG94_00251 PE=4 SV=1
MEQGLNGIGKPIRRVVIAGGGTAGWMAAACISKVLGKRLDIKLVESDEIGTVGVGEATIPTLLNFHNLLEINEQEFMAETKATFKLGISFENWRNVNEDYIHSFGLTGTDHWTAGFQHFWHKGRERGLAGDYGDYCLELRASQENKFAHLPRGGMNYAYHLDASAYARYLRKFSERFGVQRIEGKIVDVTTSALSGQVRSITLDSGADIEGDLFIDCTGFRALLIGQAMGVEYEDWSEWLFNDSAAALQTSSVRDAIPLTRSIAHPFGWQWRIPLQHRVGNGIVFSSRYVEEGAAIEALLGNIEGEALMKPRVIRFKPGQRRQIWKNNVVAVGLSSGFLEPIESTSIHLIQRSIIRLMQMFPTSGIVQSDVDEFNRQAWEEVSQIRDFIILHYKVNNRIDAPYWTDARNMEVPKSLQHRIDLFRETGRVFRISNELFAENSWIQVMLGQGIMPYRHHQSADLMGDEELSHFLGSIKGQIDRTVAGLPSHQSYVERYCSTPK

SEQ ID NO: 83039 - protein, 500 aa, Shewanella baltica
  REGION 1..500: note = tr|A0A165IYQ9|A0A165IYQ9_9GAMM Tryptophan halogenase; OS = Shewanella baltica OX=62322 GN=A1L58_04350 PE=4 SV=1
MNKIKDIVIVGGGSSGWMTAAMLARLFKSTLNITLIESEDIGTVGVGEATIPPLQIFNNVLGISEADFINATQATFKLGIQFENWGKPDEAYMHAFGNIGKDIGFTQFHHYWLSTSPTEVNSFWDYSVNYQAAKHNKFQVLQQIPNSPLAGLTHAYHFDAALYAQFLRRFSEQLEVKRIEGQITEVELTPNGDIESVTLGSGQTIKADFFIDCSGFAALLIKKALKVGFDSYQHWLPCDSAYALPCEKTPAITPYTRSIAHDAGWQWRIPLQHRTGNGLVYCSRYISDDAAKQLLLSNLDGKPLAEPKKINFTTGRRIKQWHKNCVAIGLSSGFLEPLESTSLHLVQSAIIRLSKLFPHQGIAQANVDEFNRQSQLEFEQIRDFIILHYHLNQREDAQENGFWHQCRSMLLPESLQQKIALFRATGTVFRHQDELFTEAAWIQVMLGQGIRPRDFNPLAATIQPQALSEFLRNMRTIIDNTVTKLPTHDQYLAHLSTHKA

SEQ ID NO: 83040 - protein, 504 aa, Pelomonas saccharophila
  REGION 1..504: note = tr|A0A4R3VAA0|A0A4R3VAA0_PELSC Tryptophan halogenase; OS = Pelomonas saccharophila OX=304 GN=EV671_1008154 PE=4; SV = 1
MEANKVKQIVIVGGGTAGWMTAAALAKVLKGQYPIRLVESDEIGTVGVGEATIPMVQVFNRMLELDEDEFMRRTQASFKLGIEFVNWGKLGDRYIHGFGVIGQDNWTVDFHQYWLKQYMAGKAKELVHYSINTAACLQNKFVRAQPDMPNSPLSQIAHAFHFDASLYAKFLREFSEARGVERLEGKIVEVRCREGDGHVEALQLQSGQWIEGDLFVDCSGFRALLIEGALKTGYVDWSHWLPCDRALAVPCVSASAEITPYTRATARQSGWQWRIPLQHRVGNGHVYCSKYISDDEAASVLLSNLDGEPLASPRPIKFLTGKRSKTWNKNVVSIGLSSGFLEPLESTSIHLIQMGIGHLLTYFPSAGFDEADRAEYNRIMDQEYEWVRDFIILHYKATERTDSPFWNYCRTMDVPESLAQRMRLFESHGRVYREGNELFTKISWLQVLHGQRIRPKSYHPLVDLLPEAEIQSYLEEVEQVITACVEVMPSHAKFVAENCSSVKM

SEQ ID NO: 83041 - protein, 492 aa, unidentified
  source 1..492: note = Parasphingopyxis lamellibrachiae
  REGION 1..492: note = tr|A0A3D9FEA3|A0A3D9FEA3_9SPHN Tryptophan halogenase; OS = Parasphingopyxis lamellibrachiae OX=680125; GN = DFR46_0900 PE=4 SV=1
MSGEKGPLTSIAVFGQGDALWPVATLLEKALPEYIALILVEDESATIPSGAATLACDNPFFELAGLEARELVTGGNATLGLGTDCLGWQGEGSRFFVAPSGTLPAINDIALHHIMLRAAMMHEGPERLAHLFQPLRFAARVALAGKFADRSDDPGSPLRMLGPTVQFDRADLGVQLKTRFPKGSAEILAGKPVDAAMKPDGDILSIGLDDGREIAADLFVDVSGAISLLERNGEQPLAHSLADILPFDWAIRSVDASNPPVGHLHTVARAKPGGLVIETPLRDGVACEMLFSSAEIEAEGASFPFEPRYCETPWTANLVRLGSAAAQLGPCLSADTMLLLEQARHLTRALPASRAMEIEATEFNRNQLGSARQICDFLALPFVLNGRKEPLWASIREARRPEQLQIRLEQFLSRGRFVEFDHELFEQQSWIETMIGFGATPERYDPRTAYLDMKRLPPILRKMIDDFDRAIEEMPDHADYMRGLRADVRKSQ

SEQ ID NO: 83042 - protein, 503 aa, Massilia sp.
  REGION 1..503: note = tr|A0A085F262|A0A085F262_9BURK Tryptophan halogenase; OS = Massilia sp. LC238 OX=1502852 GN=FG94_03640 PE=4 SV=1
MHTEPIKDIVIVGGGTAGWMTAAALSTVLNGRYNIRLVESDEIGIVGVGEATIPMIQRFNRVLGIDENEFMRETQGSFKLGIEFVNWGKLGDRYMHGFGRLGQDLATLPFDQYWNKMRRAGKAAPLEEYSITRMASKANKFMPPRFDVPNSPLRDIGYAYHFDASLYAKFLRKLSESRGVVRIEGKITRATLREPDGHVDAVELENGTRVEGELFIDCSGFRGLLIEQTLQTGYEDWTHWLPADRALAVPCESAPVITPYTRSTAHKSGWQWRIPLQHRTGNGHVYCSRFISDDEAAATLLANLDGRALAEPRLIRFQTGMRKLAWNRNVVALGLASGFLEPLESTSIHLIQSGIQRLLDFFPDRGWSAIDRDEYNRQSRFDYERIRDFIILHYHLNQRTDSAYWKECANMAIPDTLRHKMAMYRSHGRVVRVDNELFSEVGWIQVFEGQNMPIDGYHPLADAQSDQDIAEYLESVREVIAKCVDVMPSHNDYIARMCAARKM

SEQ ID NO: 83043 - protein, 505 aa, Sphingomonas sp.
  REGION 1..505: note = tr|A0A2U0USH3|A0A2U0USH3_9SPHN Tryptophan halogenase; OS = Sphingomonas sp. CF311 OX=2135485 GN=C7501_3657 PE=4; SV = 1
MTPKNQSSRNIRSILIVGGGTAGWMTAATLSRILGPDYAKITLVESDEIGIIGVGEATIPQMATFNRMLGLDEDQFMRETKGSFKLGIEFHNWGRIGHRYFHPFGGYGLDMKGVSFHAYYLRLRQLGEAPDIDQWSLQAMAARDDKFMRSIDAGNSPLSDIAYAFHFDAGLYAKFLRGYSEARGVTRREGKIVDVKLRGEDGFVQSVRLQDGTELEADLFIDCSGFRGLIIEQALKAGYTDWSQYLPCNRAIAVPCASVDAWTPYTRSTAHTAGWQWRIPLQHRIGNGHVFSSDYMSDDEATAILMSNLDGEPLADPRTVPFKTGHRNKMWVKNCVAMGLSGGFLEPLESTSIWLIQSGLSRFLTMFPDRDFNQADIDRYNRIMTTDYEEIRDFLVLHYHATERTDSPFWNYCRTMEIPERLAEKMRVFRTHGRAFRENEELFNDTSWFAVMLGQLIEPASHDPVADVMPLDETRSRLAHIREAIANSADYMPKHRDFIREHCAA

SEQ ID NO: 83044 - protein, 515 aa, Massilia sp.
  REGION 1..515: note = tr|A0A085EQJ9|A0A085EQJ9_9BURK Tryptophan halogenase; OS = Massilia sp. LC238 OX=1502852 GN=FG94_05135 PE=4 SV=1
MNDKPIRRIVIVGGGTAGWMAAAPLAQRLLGRPEEPCEVILVESPDIGTIGVGEATLPTIRYYNAALGLDADDFVRRTKASYKLGIEFKDWGHLGNRFFHGFGDFGPSLDRHPSHLFWLRMSTQFDNMPALENWSVSSIMARKNKFVPPHKGTPSITDAYSYGYHFDAGLYANYLRDYAVTHGAQRLEGTVVEVEQHPESGFITAVKLRDGRRIEGDLFVDCSGFRGLLIEGALKAGYDDWSEQLPCNSALAVPCASAPALTPYTRSTAKEAGWVWRIPLQHRTGNGHVYSNAFTSDARAREVLLDSLDGAALDEPRQLRFVTGRRRKSWVKNCVAVGLSAGFVEPLESTSISLIETAVGKLVELFPDRDCRPELADEFNRYMGVRYESVRDFIVLHYKLTKRDDSEFWRYCANMPIPDTIRHQIELFRETGRVTILDPHGFAEPSFVAMLMGLGAVPKRYDPFVDAVDIREVHGHFAGVRDMIVQAVDRMPTHDAYIAEQLRTSQLRAASPRAA

SEQ ID NO: 83045 - protein, 530 aa, Planomonospora sphaerica
  REGION 1..530: note = tr|A0A171DNP1|A0A171DNP1_9ACTN Tryptophan halogenase; OS = Planomonospora sphaerica OX=161355 GN=PS9374_06366 PE=4; SV = 1
MDHRIKNVVILGGGTAGWMAASYLGKVLQGGVRITVLEAPAIPRIGVGEATVPNLQRAFFDVLGIPEEEWMPECNASFKMAVKFVNWRTPGAGESTPRTLEDGRPDQFYHPFGILRSHDGLPLSHYWYNEVHEGRTGEPFDYACFREPPLMDARLSPRWLDGRRSTAYAWHFDAHLVADFLRRFATGKQGVVHVQDEMTEPVVDERGFVTALRTKGGLTLEGDLFVDCSGFRGLLINKAMAEPFIDMGDHLINDSAVATSVPHDDEAEGIEPYTSSIAMPSGWAWKIPMLGRFGSGYVYSSQFASRDEATADFARLWNLDPDATSFNHIRFRVGRNRRAWVNNVVSIGLASCFLEPLESTGIYFTYAAIFQLAKHFPDRRFDPALVDGFNREIEEMFDDTRDFLQAHFYYSPRVDTPFWKANKELHLTDNIKGKMAAYKAGLPINQPVTDEGTYYGNFEAEFRNFWTNGSYYCIFAGLGCLPDNPLPSLTYKERSIEQARALFADVKQEQRELLATLPSNREFLRLLHGR

SEQ ID NO: 83046 - protein, 479 aa, Sphingomonas sp.
  REGION 1..479: note = tr|A0A2U0VG35|A0A2U0VG35_9SPHN Tryptophan halogenase; OS = Sphingomonas sp. CF311 OX=2135485 GN=C7501_0057 PE=4; SV = 1
MSTSFTVIVAGRDVPLWLTVAALARALGPSGVAVEAVELPGALTPADAYATFPALEALHNQLRIDEAGLLRATGGSLTLGQNFTDLAGTHPAFLHAHGSAGTQIGGRDFFAHWVKARRFGLNVPLDDFSLTAAAARHGRLMLPDEENEIYGRCDYGYHLPAIPYAGLLRDAAIRHGVTVHPTGQLTVERQGETIAALGLDDGRRLSADLFVDAGNVLGARHQSWRAHFPVDRVLTAAGPAFADPPVYAENRAGPTGWTALHPGRPATFVTHGWSSALATDEQALHAATVAAGLPLADVVIRAIEPGRPVRPWTGNSVALGASFDPVHGLDLLGLQIGLVQLLADFPAGPEFAAERAEYNRVTPQALDRLRDFQSAHYALARYAGPFWEAARATLVSPDLAHAIALFRARAELAPFEEENLPPDSWRALFLGHGVEPESWPPAIDRVPAEDVKAQFRQMLGFVRAQVLRQPTQAEWFAHG

SEQ ID NO: 83047 - protein, 510 aa, unidentified
  source 1..510: note = Parasphingopyxis lamellibrachiae
  REGION 1..510: note = tr|A0A3D9FDQ5|A0A3D9FDQ5_9SPHN Tryptophan halogenase; OS = Parasphingopyxis lamellibrachiae OX=680125; GN = DFR46_0901 PE=4 SV=1
MSDPVGRPVRDIVIIGGGTAGWMAAAALAHRFGGTETSITLVESAEIGIVGVGEATLPQIRYFNRSLGIDEREMMARTSATIKLGIEFCDWGKAGDRYTHPFGAYGETIGPADFHHYWVRQNTGGDAHDFGEYCYPIVAARNDRFALPDEDPASPLDAFSYAFQFDASLYGVFLSDFAKQKGAKRVEGKVVSVQTDGETGFVAGIALESGREIAGDLFVDCSGFRGLLIEQELETGYEDWSEYLPCNRAYAVPCAITDTVGPYTRATARKGGWQWRIPLQHRIGNGHVYCDRYISDQEALDQLMTTLEGEPLADPKQLFFKTGKRRKLWNRNVVAIGLSGGFLEPLESTSIDLIQSGIVNLLALFPERDCDAADRDEYNRLMDLEFERVRDFLMLHYVATQRDDAALWRDMRNMEWPDSLKYKIDAFRRRGIVPEYTHGLFLPPSWLSVFIGQNIVPEAYDPRVDLMSEQELAANLERVRSRIAAAVVQTSRHDDFLENYGATFAGESAS

SEQ ID NO: 83048 - protein, 528 aa, Massilia sp.
  REGION 1..528: note = tr|A0A085FY91|A0A085FY91_9BURK Tryptophan halogenase; OS = Massilia sp. LC238 OX=1502852 GN=FG94_00254 PE=4 SV=1
MASTTIRHVVIVGGGSAGWLTAAVLASGFQALEQGGLRVTLIESPDVPTIGVGEGTWPTMRDTLRAAGLSESAFFRECDAAFKQGSRFNRWVHGGDHDYYFHPFVLPQGWGEADMAGRWLERHTDIPFADLVTYQPHLCVHGRAPKQAATPEFAAVANYGYHLDAGKFGLFLKKHCLEKLGVHYVPDHVTGIRSHEFGEMSGDIAALHTKAHGELAGDLFVDCTGMQSLLLGKHYGVPFIPQRGVLFNDSALAVQVPYLAEDDPIASQTTSTAQEAGWIWDIGLPTRRGIGHVYSSAHTSDEQAERALRAYIRATGGPDDIPAPRKLSFEPGYRERFWHRNCVAIGLSAGFIEPLEASALAMVELSASMLLDEMPTTRAQMEIGARRFNETFTYRWERVIDFLKLHYVLSRREGALDPHGYWRDNRSSETIPQRLADLLALWRHRPPSRYDFNRIQEVFPAASYQYILYGMGFLPEPGQARRERIGEGNGAMADGFLRQAAELTRRMLPALPDNRALIAHIVRHGLPT

SEQ ID NO: 83049 - protein, 516 aa, Pelomonas saccharophila
  REGION 1..516: note = tr|A0A4V2VQF8|A0A4V2VQF8_PELSC Tryptophan halogenase; OS = Pelomonas saccharophila OX=304 GN=EV671_101784 PE=4 SV=1
MDDRLRDVVVLGGGSAGWLVAALLAAVHGGQQGGLRVTLVESSEAPPIGVGEGTWPGMRDTLRRIGLSEADFARRCQVSFKQGSRFDGWLHGGDGAQGDRYYHPFMLPVGFGDADLVAAWLATRPEQAFADAVSPSVQVCEAGLAPKQVQTPEFGAVANYAYHFDAGLFGQVLREHATARLGVRHVVDHVDDVLSHENGDIAALQTRAHGAIAAGLFIDCSGLAARLIGQHFGMPLRSEREVLFNDAALALQVPYARPDAPLPSCTIATAWAKGWIWDIGLPARRGVGAVFSRTHAGEDEALAALQAYLNATGAPAERPAPRLIRFEPGYRERFWVRNCVAIGLSSGFIEPLEASALALVELSAARLCDELPMRRATMDGAARRFNDDFGYRWARVIDFLKLHYALSSRQDEPGSDYWRAHRDPATWPERLREQLAAWQLRPPARHDFGRIDEVFPAASYQYVLYGMGFRPHAQPLPAPKLQAAQACFDEAARQARRFLSGLPGHRSLIDHLHRQA

SEQ ID NO: 83050 - protein, 495 aa, Pelomonas saccharophila
  REGION 1..495: note = tr|A0A4R3UKF5|A0A4R3UKF5_PELSC Tryptophan halogenase; OS = Pelomonas saccharophila OX=304 GN=EV671_102748 PE=4 SV=1
MTAPKHIAIIGGGTAGWMTANLLRHRWARLGIDVTLIESAEIGTVGVGEGSTPYLRRFFATLGLAERDWMPACDATYKCGIRFPGWSRVAGYESYVHPFFNEADRELGNQFFTNACLRRRGQAADANPQDFFLAAELARQRRAPLYAGEGPGTDYAYHFDAGRLGAFLRGHALGLGVRHIVDTVARVERHEGGDIAAVQLKGGTRIAAELFVDCSGFKGLLINETLGQAFLPYRDNLFNDRAIAIPTALVEGEDLPSETVSTALRHGWAWQIPLTTRYGNGYVYSSDFIGDDEAERELRAHLGAAAEGASARRLRMRVGRADKHWSRNCVAVGLSQGFIEPLEATALMLIQFSVEGFIDALEGNGFEPGRRDAYNRRVNEMFEGVRDYVVAHYQLNTRSDTDYWRANRANRHISDRLASLLDVWDGGGDFEAELERHGSALMYLRPSWYALLAGMGRFPAELRPAPQSVTASQARARLHQMARAFSSHRSQLMGG

SEQ ID NO: 83051 - protein, 503 aa, Pelomonas saccharophila
  REGION 1..503: note = tr|A0A4R3VK86|A0A4R3VK86_PELSC Tryptophan halogenase; OS = Pelomonas saccharophila OX=304 GN=EV671_100167 PE=4 SV=1
MNGERRIVIVGGGTAGWMSAAALASRLLGKDGAARWTLRLVESDEIGIVGVGEATIPPIRGFNALIGLDEDEFLRETGGTFKLGIEFFDWGALGERYMHAFGDVGRSLDELPFHQHWLRLGAALPLAEYSINNQAALAGRFMRPRPDMAGSPLAEIAYAFHFDAARYAALLRRHAEARGVQRVEGRITHVERDGGGVRRLRLQDGEVVEGDFFIDCSGLHGLLIDKTLGVAFEDWSHWLPCDRAWAVPTPPSGPLLPYTRATAREAGWQWRIPLQQRTGNGHVFASAFVDEAAARETLLRHLEAEPLAEPRLIRFRAGRRREAWVGNCVAIGLAGGFLEPLESTSIHLIQSAVLRLIEIFPGDRAEPADIAEYNRQTAAEMEAVRDFVILHYKLTRRDDSPFWRHCREMAVPEALQARMARFASHGHILRRGQELFSEPSWLQVLVGQGLRPRHAHPLAGLSAGERVQAFVDNTRDVVRRCVAVMPAHADFIAAHCVAPSQKP

SEQ ID NO: 83052 - protein, 505 aa, Sphingomonas sp.
  REGION 1..505: note = tr|A0A2U0USM2|A0A2U0USM2_9SPHN Tryptophan halogenase; OS = Sphingomonas sp. CF311 OX=2135485 GN=C7501_3656 PE=4; SV = 1
MTAPAPIRQIVIVGGGTAGWMAAAALTRLVPAGVAVTLVESEAIGTVGVGEATIPPIRNFNALLGLDEADFLAATQGTIKLGIEFVNWTRDAHRYVHPFGEFGFDIEGVKFHQIWRKLYEQGRAREIEEYNVCALAMRAGRYQPPVSDPGSILSRMAYAYQFDAGLYARYLRNYAEARGVVRVEGKVAHVPLRAGDGFIEAVVLEGDRRIAGDLFLDCTGFRALLIEQALGAGWESWSHWLQCDRAVAVPTESASAEITPFTRSTAHRAGWQWRIPLQHRVGNGHVYCSADISDDEARETLLANLDGAPLRDPFILRFEAGRRKLAWHRNCVALGLSSGFLEPLESTSIHLIQSGIHKLMALLPDTGFSPVERDEYNRLTDLQMEQVRDFIILHYHANQRQQGDLWRRMREMAIPDSLERKLALFRGRGRFFRYEDELFAESSWIAVLLGQGVFPAGWDPLADGLDEDKLATSLSRLHEMFARAAQAMPRHEDWLARNAPARTPV

SEQ ID NO: 83053 - protein, 514 aa, Pelomonas saccharophila
  REGION 1..514: note = tr|A0A4R3UYN9|A0A4R3UYN9_PELSC Tryptophan halogenase; OS = Pelomonas saccharophila OX=304 GN=EV671_101479 PE=4 SV=1
MSTTQRRILIVGGGTAGWLTAAYLAKALRLGERSHLEVTVLESPDIGVIGVGEGTFPTIRTTLQFLGIDEARFIRETAATLKQGIRFVDWARTPVGGESRHFFHPFEAPFYAEGLNLVPYWLLQDEATRLPFAQALTIQQRVAEAQRAPRRAHEAPYTAPLNYAYHFDALKLARLLAEHARQLGVRHLQGTVTQAGLDATGAIAHVDTPELGRLQADLYIDCTGFRAELIGRALGAQLKSARGILFADRALACKLPVNADDAVMESCTIATAHEAGWIWDIGLNGARGLGCVYSSDHLGDDRAAEILRRHAGAGAGEVALRSIPFAPGYRERQWVKNCVAVGLSAGFLEPLESTGLVLIEAAVGMIAEMVPHSGPMEAPARRFNELMTARFENIINFLKLHYCLSGRREPFWRDNAAPATIPERLAELLEQWRLRPPGRFDFGLDTETFAFFNYQYILYGMGFSTDLGAGRADFTQVEEANRLFAKIQRFTERALVDLPSHSALIRQLTGAPLR

SEQ ID NO: 83054 - protein, 538 aa, Burkholderia ambifaria
  REGION 1..538: note = tr|A0A2S9KMF8|A0A2S9KMF8_9BURK Tryptophan halogenase; OS = Burkholderia ambifaria OX=152480 GN=C6P77_29095 PE=4; SV = 1
MSNPIKNIVIVGGGTAGWMAASYLVRALQQQANITLIESAAIPRIGVGEATIPSLQKVFFDFLGIPEREWMPQVNGAFKAAIKFVNWRKSPDPSRDDHFYHLFGNVPNCDGVPLTHYWLRKREQGFQQPMEYACYPQPGALDGKLAPCLADGTRQMSHAWHFDAHLVADFLKRWAVERGVKRVVDEVVDVHLNERGYISSLSTKEGRTLEADLFIDCSGMRGLLINQALKEPFIDMSDHLLCDSAVASAVPNDDARDGIEPYTSAIAMNSGWTWKIPMLGRFGSGYVFSSKFTSRDQATADFLKLWGLSDHQPLNQIKFRVGRNRRAWVNNCVSIGLSSCFLEPLESTGIYFIYAALYQLVKHFPDTSFDPRLSDAFNAEIVYMFDDCRDFVQAHYFTTSREDTPFWLANRHDLRLSDAIKEKVQRYKAGLPLTTTSFDDSTYYETFDYEFKNFWLNGNYYCIFAGLGLLPDRSLPLLQHRPESIEKAEAMFASIRREAERLRTSLPTNYDYLRSLRDGNAGLSRSQRGSTLATQEIL

SEQ ID NO: 83055 - protein, 499 aa, Asticcacaulis excentricus
  REGION 1..499: note = tr|A0A3G9G8W7|A0A3G9G8W7_9CAUL Tryptophan halogenase; OS = Asticcacaulis excentricus OX=78587 GN=EM6_1364 PE=4 SV=1
MADTIKRIVIAGGGTAGWMTAAALSQIMGEQLSLTLIESEEIGSVGVGEATIPMIAHFNALLRLDENDFLRETKGTIKLGIAFEGWRHEGHSYMHAFGTLGRDLGSVPFHHYWLQAHLDGQDDDLWAYSLNERAAYANRFAPLNQIPNTPLPGIPYAYHFDASLYALYLRRLAEANGARRIEGRIRDIALHAETGHVTRLSLEDGQQFEGDLFIDCSGFRGLLIEGALKTGVESWKHLLPCDRAWAVPCESVSPLTPYTRSIAREAGWQWRIPLQHRTGNGYVFCSDHISEDEAATRLLSRLDGQALADPRLIRFETGRRRLQWNGNVIALGLSSGFIEPLESTSIHLIQSGIARLITLFPHAGFDPAVVAEYNRQSALEFELIRDFIILHYHANERHGEAFWDQVRHMAIPDALAHKMALFRASGLIQPNPNDLFQLPAWLQVMVGQNVRSAAAHPFVAAVPDAARQDYLANLRTIIGRAADGLPTHEAYIAQHCRAV

SEQ ID NO: 83056 - protein, 500 aa, Sphingomonas sp.
  REGION 1..500: note = tr|A0A2U0UT58|A0A2U0UT58_9SPHN Tryptophan halogenase; OS = Sphingomonas sp. CF311 OX=2135485 GN=C7501_3858 PE=4; SV = 1
MQTEQPIRIVIAGGGTAGWMAAAAFARFLDKRFHITLVESEAIGTVGVGEATIPQIRLFNAGLGIDENQFIAATQASFKLAIEFVGWTRGGRYMHAFGDVGRENGLLAFQHSWLRGLAEGGAKPLEAYSLNNQAALANRMQRGPARTARLLPEMPYAFHFDAGLYARFLRGLAESGGVQRVEGKIVSVERDGGSGDVTALKLDGERQLVGDLFLDCTGFRALLIGETLGVGFEAWSDLLPCDRALAVPSERARDFTPYTRATAHGAGWQWRIPLQHRTGNGIVYSSAHLSDDEAASRLLAGLDEKALDDPRPLRFTAGKRTSFWKQNVIALGLASGFLEPLESTSIHMIQSGIERILKLLPGRQVSQAQRDEYDRQAHAEYDRIRDFLVLHYWANDRDEPFWAERRAATLPESLQHKIGLWRASGQIVRGEADLFSEVAWLQVLAGQGIAAASYHPLADAPSRAEIGEYLELIELLNAREVGQMADHAAFVAQHCAGDVV

SEQ ID NO: 83057 - protein, 486 aa, Asticcacaulis excentricus
  REGION 1..486: note = tr|A0A3G9FYT4|A0A3G9FYT4_9CAUL Tryptophan halogenase; OS = Asticcacaulis excentricus OX=78587 GN=EM6_0861 PE=4 SV=1
MAAAALRRSFPALPYTVTLIESDEIGTVGVGEATIPPMIQFNDMLGLDENAFMKAVNGTFKLGIRFKDWSAPGSDYFHPFGVYGVDMGGLNFNHYWMRYHKAGGSADFGFFNPQTLAARANRFGRMKEINPNVPAVNYAFHFDASLYARYLRDVCVQRGVVRKEGRITEVQQNPDNGDVTAVVLASGERIEGDLFIDCSGFRGLLIEQTLKSGYEDWSKWLPCNRAVAVPCDKVDPLTPYTTSTAREAGWQWRIPLQHRTGNGYVFCDSYLSEETASDLLMQRLDGKAQAEPRVIRFQTGHRKQMWNRNVIAMGLASGFLEPLESTSIWLVQEAIATLQLYFPRGGITDTARASFNRAMLDAYTNVKDFLIAHYKVTTREDTPFWAYCKHMDIPDSLQFRLDSFREHNQPLVRPQDLFKEASWFAVLAGQGLMPKSYHPGADLMPEDEFRWRMQKVREGTTGLVNMMPGHEAYIAKTCASPHFISA

SEQ ID NO: 83058 - protein, 515 aa, Pelomonas saccharophila
  REGION 1..515: note = tr|A0A4R3UUV0|A0A4R3UUV0_PELSC Tryptophan halogenase; OS = Pelomonas saccharophila OX=304 GN=EV671_101788 PE=4 SV=1
MNTPTTNPMRRIVIAGGGTAGWMMAALMSKLLGRQLDIKLIESEEIGTVGVGEATIPALLTYHNLLGINEAEFMAATNATFKLGISFEGWKNIGENYFHSFGSTGTDHWSAGFQHFWLKGRAEGIAKAYTDYNPETVAAHANRFAHLPRNGLNYAYHLDAGRYAKYLRAMSEGYGVQRIEGRIAAVLQDGPGGKAGDITALQMQDGSRIDGDLFIDCTGFRSMLLGETLGVGYEDWSYWLPCDRAVAVQTASVREAWPYTRSIAHPFGWQWRIPLQNRVGNGLVYSSRELSDANAPELLTKNVEGELLIQPRVLKFLPGQRDKVWERNCIAVGLASGFVEPLESTSIHLIQRSAIRLMQLFPGGGINPADVDEFNLQSRRELEHIRDFIVAHYHINERSDSALWRHVREMEIPASLRHRIELFRESARVFRPSDELFGENSWVQVMMGQGILPRSHHPVADLMGRPELSNFLGDIQLKVARTVAGLPGHQAYVEQLCAPYRHATTAQLAATPLRA

SEQ ID NO: 83059 - protein, 430 aa, Streptomyces sp.
  REGION 1..430: note = tr|A0A2S4XQ82|A0A2S4XQ82_9ACTN Tryptophan halogenase; OS = Streptomyces sp. Ru73 OX=2080748 GN=C3486_21235 PE=4; SV = 1
MSETQNYDVVVVGGGPAGSTVGALLAKAGHRVLILERERFPRYHIGESLVTGMTPLMEELGLVEQLDARYRHKTGISLRWGKDPQPWRSDFSAAGTDYDHAWHVTRSDFDELMLDNARKLGAEVREEAHVTEILQDESGTVTGVVYTHEGRTHRVSSRYVADASGQSRTVSRRLTETQWQDDLRNVAIWGYYDTYTPLEDEDDILVEAIEGGGWMWGIPLSKSKLSLGYVLSVEKLTEATRQGLSHQEIFAQGLESSIMARTMVDAGVSVPLKSARDWSHLSDRFFGPGWVAVGDAAAFIDPLFSSGVWLGTSGAWLAARALDAALSDPSNEAPALERFEAVYRQLFSDILSYVRFFMEPNRLREEYMERAQQIARVYTRSSRVGFMALVSGIGAVADLVNFDPMGVEGLQEIMVERQKIAAERAAAAAE

SEQ ID NO: 83060 - protein, 493 aa, Sphingomonas sp.
  REGION 1..493: note = tr|A0A2U0VGX8|A0A2U0VGX8_9SPHN Tryptophan halogenase; OS = Sphingomonas sp. CF311 OX=2135485 GN=C7501_0423 PE=4; SV = 1
MEQAPVRRVVIAGGGTAGWIAAAALAKLLGPLLEITLVESDEIGTIGVGESTIPTARTFHQLLGIDERDFLRETLSTFKLGISFEDWARDGDRYIHSFGTIGKSTWMGDFHHFWMEARDEGWGGALEEYCFELQAAKAGRFAIPEQGHINYAYHLDASRYARFLRGFAEPLGVHRVEGRIERVEQHPETGFVTALKLASGERLEGDLFLDCTGFRGLLIEQTLQAGYEDWGHWLPTDSAIAVQTESTGPAMPYTRAAAHQAGWQWRIPLQHRVGNGLVYAKDCLSDDAAHALLDSRIEGAKLIEPRVIRFKAGRRRKIWDKNVIALGLASGFVEPLESTSIHLIMIAITRLVQLFPFGGVGEGVAARFNALSRIEIERIRDFIVLHYHLNERADGGFWDQCRTMAIPDSLAERIEAFRDGAIAWQASDDLFRVDSWVQVMLGQRLEPRSHHHMGRMIVEGELQDALGSLKAGIARTVAQMPPHQQFLERYLAE

SEQ ID NO: 83061 - protein, 517 aa, Sphingomonas sp.
  REGION 1..517: note = tr|A0A2U0UYE0|A0A2U0UYE0_9SPHN Tryptophan halogenase; OS = Sphingomonas sp. CF311 OX=2135485 GN=C7501_3137 PE=4; SV = 1
MNNPDALRKVCIVGGGTAGWIAAAVMAHHMKGKLFEIELVESDDIGTIGVGESTIPPFMELIAKLDINEQDFVREVQASFKLGIEFKDWYKKGERYFHPFGDVGQRIELSDFYQCWRKATLAGHDFDLQDFAPASVMAREGRFMLPFKAQRTPIAGASYALHVDAKRVAQFLRAHAEARGVKRTEGMVTDVALDDRGFVSTLTLKDGRTVEADFFIDCSGFRALLIGKALGTGYTDWSNYLFCDRAIAAQTENVGPPNPYTLAEAQDAGWRWRIPLQHRTGNGHVYASEFMSDEEATRILLDKVEGDVVAGPMVVPFKTGVRQQIWHKNVLALGLASGFIEPLESTAIHLIYRGMDFFFRFLPDRHCDPALADEYNRRMVADYTEIRDFIVLHYCISVRDDTPFWRKVRDMEWPDSLRERVELFRSNGSLREGHDELFRSVSWFSVLDGMGIRPRTYHPLVDRIDETALFAGMDKAREQLAAMVRQLPTHQQFIDAHCRADKVDLARPAQSAMAAGA

SEQ ID NO: 83062 - protein, 513 aa, Shewanella violacea
  REGION 1..513: note = tr|D4ZIJ1|D4ZIJ1_SHEVD Tryptophan halogenase, putative OS=Shewanella violacea (strain JCM 10179 / CIP 106290 / LMG 19151 / DSS12) OX=637905 GN=SVI_1519 PE=4 SV=1
MMHAIKEVTIVGGGAAGWLTAAVIAAEHISHLRDSIHVTLIESPEVSSIGVGEGTWPSMRSTLEKIGISESEFMLCCDASFKQGSKFVAWKNGHHTDSYYHPFMAPQGYGQANLHHAWQEYHPDDTFAHITCVQASICDAGRAPKQLGTPQYAAVTNYGYHLDAAKFAKLLMQHCTAKLGVKHIVDHMTDIISAENGDIAQICTRKSGKISGDLFIDCTGMSSLLLGKHFNIPFIEKRHILFNDTAMALHVPYEDDNIQIASTTLSTAQTCGWIWDIGLPSRRGVGYTYSSSHTCDQQVQDDLITYIAKSIGQKRAEQLSPRKISFTPGHREKFWHRNCVAVGMASGFIEPLEASALALIELSASMISEHLPVNREQMEITAKRYNERFRYRWSRVIDFLKLHYVISERQDSQYWHDNRDQQTITASLKEQLALWKYQPPNRHDLMQNEEIFPSASYQYVLYGMGFNTHISKAKMSDKVEFARQCFGEVSQNKAKYIEGLPSNRDLIKAIKQG

SEQ ID NO: 83063 - protein, 514 aa, Asticcacaulis excentricus
  REGION 1..514: note = tr|A0A3G9G906|A0A3G9G906_9CAUL Putative tryptophan halogenase OS=Asticcacaulis excentricus OX=78587; GN = EM6_2325 PE=4 SV=1
MTGKRRILILGGGTAGWLAAAYLARYFDIKRQPRLEIVLVESPEISSVGVGEGTFPTIRQTLKFIGIDEAPFMRRTTATFKQGIRFADWVKTPVNGRHEHYFHPFEAPYYTEGEGLVPYWLLQDEATRKPFAEAVTFQKRVAEARRAPKRPHEGDFSGPLNYAYHFDAHQLAGVLAERAVTLGVAHKPARLDGVVLDHTGQIDHIVAEGEVLTADLYIDCSGFRAELIGKALGSPFRSVRGTLFTNKALACKAPYERPDAPIESYTVATAHAAGWTWDIGLDGQRGIGYTYSTDHTSDDEAEATLRRHVGSKAALNLREIAFEPGYRERPWIGNCVAVGLAGGFMEPLESTGIVMIEVAVAMIAELFPHAGPIDAPARRFNALMTARYENIVTFLKLHYALSHRSESFWRDNADPQTWPERLRELLEQWRYRPPSRFDFLIDVETFAFFNYQYILYGMGFRTDLSGARDHFPHVEDANRTFAKVHNFGERATLDLPPHRTLIRQIYAEGFAESA

SEQ ID NO: 83064 - protein, 495 aa, Rheinheimera pacifica
  REGION 1..495: note = tr|A0A1H6J8Z9|A0A1H6J8Z9_9GAMM Tryptophan halogenase; OS = Rheinheimera pacifica OX=173990 GN=SAMN05660691_00143; PE = 4 SV=1
MQHHTVKKVVIAGGGTAGWVAAAALSKRLKGLIDVVLIESEEIGTVGVGESTVPPVQLFHNLLGINEQEFMQATDATFKLAISFENWGQQGDHYFHPFGVTGKGSFLSDFQHYYLHGLSQGIAAPFGDYCYELQAAKQHKFAKTEQSTINYAYHLDAGRYARFLRRFSEDLCAVRIEGKIAQVQQHVNGDIRALVLESGQEITGDLFIDCTGFRALLIEQTLKTGYERWDHWLPCNKAVVVQTEPGPTVPPYTRAIAHDSGWQWKIPLQHRVGNGLVYASDYLSDDKARQRLLDGLEAPAIMEPRVLSYQTGRRKKLWHKNCVAIGLSSGFIEPLESTSIFLFMSGIIRLLRLFPFNGVTPALTDEYNQQSITEVEKIRDFIILHYHQTERNDSPFWDYCRTMTIPDSLAHRIALFRESAHAFQTGDEMFRLESWSHVMLGQRLQPQSYHQLVAGLGSGELSRHLQQIRETINSAVHRLPSHRDFLRQYCPSNLT

SEQ ID NO: 83065 - protein, 507 aa, Sphingomonas sp.
  REGION 1..507: note = tr|A0A2U0UR86|A0A2U0UR86_9SPHN Tryptophan halogenase; OS = Sphingomonas sp. CF311 OX=2135485 GN=C7501_3219 PE=4; SV = 1
MANNAPIRKITIVGGGTAGWMTAAMLSKLFVRGYEIRLIESDEIGIVGVGEATIPAIREFNQLAGVDYVEMVKATQATFKLGIEFRNWRDVGSSYIHGFGKIGQDVWWLHAHQLWLKMQALGKAKHFDHYALNCVAARQDKFCFPDPRNPGSPIAGLDYAFHFDASLYGRFLRGQAEARGVTRIEGRIVEAKQRGDGFVDHVVLADGRTVDGDLFVDCSGMRGLLIGQTLGVGYADWSKWLLNDRALAVPCESVEALTPYTRCTAHGSGWQWRIPLQHRTGNGHVYSSAHISDDEAASVLLANLDGKPLADPRPVRFAPGKRDRAWEKNVVAIGLSSGFLEPLESTSIHLIQTGILRLVALFPGQGFDAADIAEYNRQHDFEFGDVRDFIIAHYKVTDREDSEYWRYLKHMEVPDSLAERLALFESSARFFQHGKAELFREESWVQVLIGQGMQMRYDPMVDMIDADELARFMDDMVEVIADVAKAMPTQQAFIDRNCKAPPLPAMA

SEQ ID NO: 83066 - protein, 508 aa, Pseudomonas nitroreducens
  REGION 1..508: note = tr|A0A239KUD3|A0A239KUD3_9PSED Tryptophan halogenase; OS = Pseudomonas nitroreducens OX=46680 GN=SAMN05216209_3895; PE = 4 SV=1
MLNLSNYRRVAVVGGGSAGWFAALELRKLFLDQVEVVLVESETLGIIGAGEGSLPNFNRALDRYEIDRAEFMRETRSTYKLGLTLEGWRTGKKDDIFFHPFSFHSDGVDLNAWIEPNGSYPLASILLNQDLQLHHFPDAWRLYREGASQQQAEAYLQEQLKLYAVPPMAFHFDARKLAEYLREVALKRGVKRVNARVESVRLNERRHVTHLILENGELEVDFVIDASGLHRLIIDKALHSPWESYSDHLLLNQALPFFIPAQGAHPSLVTRAIAMKNGWMWCIPTQDRLGVGYVYSNQHTDKEGALREAQAYWGREIEPVNHFAFSAGHFKEVWIGNVMAVGLSSGFVEPLEATSIGQTLVQLARFNQVVSACDGLIPQQLIDQFNRDITRHWDGIRDFLFLHYDTPRQDTEFWKAASSATPPSTYAELKRTFALRPPRDVDLEPYRGGTFSLFGPTSWMSVAAPLGVLTRKATAADLVPLSKEQRWNIGEFLAKVEPRMTAEAAMSI

SEQ ID NO: 83067 - protein, 511 aa, Pelomonas saccharophila
  REGION 1..511: note = tr|A0A4R3UQJ4|A0A4R3UQJ4_PELSC Tryptophan halogenase; OS = Pelomonas saccharophila OX=304 GN=EV671_101981 PE=4 SV=1
MDNWGRPLRKVVIVGGGAAGWMSAAALSAVLKPPYEIRLVESDEIGIIGVGEATIPPIRLFNSLARIEEADFLKATQGTFKLGIEFVNWGRQGERYFHGFGGIGREKLWPVDFSHYWLRMRALGRALPLDAYAICNMAARAGRFMLPRPEMQNSPLNAINYAYHFDASLYAQALRRIGEARGVRRTEGKVVNALLHEQPGPRQGQLRAVQMEGGELIEGDLFLDCSGFQALLIEKALATGHEDWSHWLPCDRAVAVPSEPAGPLLPYTRSTAHRAGWQWRIPLQHRVGNGHVYASSHVGDDEAADVLLRHLDGRPLAEPRVIKFRTGIRRQAWNRNVVAIGLAAGFIEPLESTALHLIQMGIGDLIERFPHAGFDALEIAEYNQRSRARYESVRDFIILHYHLNKRDDSAFWQACAAMDIPGTLRRRMQLYESSGRLLYGDGDEFREPSWLEVMEGQNQRPRAWLPLVELQDADDTAAYLKSVSDTIAKCVAVMPEHEAFVRRYCAAAPMD

SEQ ID NO: 83068 - protein, 503 aa, Caulobacter vibrioides
  REGION 1..503: note = tr|Q9A835|Q9A835_CAUVC Tryptophan halogenase, putative OS=Caulobacter vibrioides (strain ATCC 19089 / CB15) OX=190650 GN=CC_1529 PE=4 SV=1
MGEAIQSIVILGGGSAGWMAAALLNAALGKRCAVTVVESAEIGVVGVGEATIPAIRQFNAMVGLKEPAFMRATRATLKLGIEFVDWGCSGERYLHPFGVLGGQPTLGVFPQHFLRLMAADPDASLEDYSVCALAARLGRAGPAATDPATPLSQLMSAYHFDAVLYGRFLRRLAEGRGVRRIEGEVVAVDQRPEDGFVERLRLKDGRAVEGELFIDCSGFRGLLIEGALAAGYDDWSRWLPVDRAIAAPCAKVGPAAPYTQSIAQEAGWRWRIPLQHRTGNGYVYSSAFTDDGRAETVLREGLDGALEAEPRKLRFVTGRRRAAWKANVVALGLASGFIEPLESTSLHMVHSGLQALLKFFPDRSFSPVLRAGYNAAVKAEGELIRDFIILHYHATRRSGDPFWDYVRTMPIPDSLAERVALYAERGVLVSGSDELFSPSSWMAVMHGQGLRPRRASPLYDGVSPAALATEYAATARRLRRSVEALPLHEAYLADAGAWAEPEA

SEQ ID NO: 83069 - protein, 502 aa, Brevundimonas vesicularis
  REGION 1..502: note = tr|A0A2X1CF94|A0A2X1CF94_BREVE Geranylgeranyl reductase family OS=Brevundimonas vesicularis OX=41276; GN = NCTC11166_01243 PE=4 SV=1
MSDGSIINRIVIVGGGTAGWMAAAALAHAFEGAGKTVTLVESEAIGIIGVGEATIPEILKFNARLGIDEADFLRETKATFKLGIEFDGWRREGERYFHPFGAFGLDMEGIAFHHFWLKACAEGGAEPLETYSMAWQAARRGRFVHPQGGPQSPLSSLGYAYHFDAALYAAFLRRFAERLGVVRHEGRVVEVQQAADGDIAGVRLDDGRIVEGDFFIDCTGFVGLLIEQALRSGYEDWSSWLPCDSAVAVPCEREGALSPYTRSTACEAGWQWRIPLQHRVGNGYVYSSAHISHQEAEDALMSRLEGKALAEPRRLRFAMGRRKDCWKRNCVAVGLSSGFLEPLESTSIHLIQSAITKLITLFPSHKDSEGLRREFNALMEEEFITVRDFLILHYKVNQRAGPFWSQVRDMPIPDRLAAKIALFEETGRIVRRDHDIFSESSWLAVAVGQGLTPQGRHPISDVIGHDANLGRLSAIRDSIWRTADALPTHEDVLMTTMNRKAF

SEQ ID NO: 83070 - protein, 502 aa, Caulobacter vibrioides
  REGION 1..502: note = tr|Q9A4M5|Q9A4M5_CAUVC Tryptophan halogenase, putative OS=Caulobacter vibrioides (strain ATCC 19089 / CB15) OX=190650 GN=CC_2805 PE=4 SV=1
MDPIRKIVIVGGGTAGWISASGLAAVLKGLPITIELIESAEIGTVGVGEATVPHIRYFNARLGLDEADFMRKTQATIKLGIQFCDWGRKGEAYIHPFGAYGHAIDGLPFHQHWLAARARGEAGPIETYSLPIMAGLAGKFAPPSSDPRSLGSTFNYAYQFDASLYAQYLRAYSEARGVTRTEGKITSVQQRPNDGFVTGVTLEDGRVVEGDLFIDCSGFRGLLIEGALQAGYEDWTQWLPCDRAVAAPCASVEAPTPYTRATADRFGWRWRIPLQHRVGNGHVYCSSYVSDDEAARALVENLDGELQQDPRFLRFVTGRRKKQWFKNVVAVGLSSGFLEPLESTSIHLIQVAVTTLLELFPHRGFDPADEDEYNRVMDLEFERIRDFLVLHYHANQRDDSPFWIERREGPIPDSLAYKMALFRERGAVVGYKDGFFLEPSWLAVYFGQNILPHGHDPLVAASDPARTAKIMADLAAAVTRTVDAMPTHAAFLRAMADARTPA

SEQ ID NO: 83071 - protein, 503 aa, Brevundimonas vesicularis
  REGION 1..503: note = tr|A0A2X1CY05|A0A2X1CY05_BREVE Uncharacterized protein conserved in bacteria OS=Brevundimonas vesicularis; OX = 41276 GN=NCTC11166_01420 PE=4 SV=1
MSDQAEPVRHIAIVGGGTAGWMAAAALGKAFTRSNGLSLKITLVESEQIGTVGVGEATIPPIRQFVQMIGLSEEDFIRSTAATAKLGIAFKDWTAPGSEYFHGFGDYGPTIAGQAWRQYLFRLKAAGRIDTLAPWSMPTAMARAGKFAPPVEDSRSVLSHYSYAYQFDAGLFARRLRTLAETLGVVRREGRITGVDRDGETGLVRAVTLEHGGEVEADLFIDCSGFRGLLIEQTMQAGYEDWTHWLPCDRAVAVPCSSTLPPEPITTARAREAGWQWRIPLQHRVGNGYVYSSDHMDDQTALDDLLGQIESEPLAEPNRLRFVTGRRREAWKGNVVSLGLASGFVEPLESTSINLIQTGIGRLLEMFPDRSFDPALIREYNRRSAQEFERIRDFIILHYHLAGRAGAMWDRCRETAPPDTLMEKIELFRARGEVGLLADESFREDSWAAVFTGLGTWPKQASPLACLDDLETVDRQARQFAQLIARAAAALPDHSTTFTGYAR

SEQ ID NO: 83072 - protein, 502 aa, Sphingomonas sp.
  REGION 1..502: note = tr|A0A2K8MGL2|A0A2K8MGL2_9SPHN Tryptophan halogenase; OS = Sphingomonas sp. Cra20 OX=1327635 GN=CVN68_09115 PE=4; SV = 1
MNAPAIRSVVIVGGGTAGWMTAAALARMVRAGVRVTVVESDAIGIVGVGEATIPPIRAFNAMLDIDESHFLAHTRGSMKLGIEFVDWNASGHRYLHPFGEFGFSIEGVRFHQIWHKLRAAGRAGAIEEYSMCAAAARLNRYAAPAAEQSSPLSQLVQAYHFDASLYARYLRGYAEARGVTRREGKIDRVTLRGEDGFIEAVTLEDGSRVEGELFVDCSGFRGLLIEEALHTGYEDWTHWLPCDRALAVPTVSTGPLTPYTRATARAAGWQWRIPLQHRTGNGYVYSSAHLSDDAAAAALLANLDGEPLGDPRPLRFTAGRRKLAWNRNCVAIGLSSGFLEPLESTSIHLIQAGISRLLGLFPDAGWGDAERDTYNDLTRTQYEQVRDFVILHYKANGRDEPLWRQVRAMAVPQSVSRRIDLFRNRGRIFRREDELFAETSWIAVMLGQGITPAGWDPLADALDSDQLAAMLERVRSTFRNAAEVMPDHAAYLARHCAAQGFA

SEQ ID NO: 83073 - protein, 505 aa, unidentified
  source 1..505: note = Caulobacter radicis
  REGION 1..505: note = tr|A0A2T9JZB7|A0A2T9JZB7_9CAUL Tryptophan halogenase; OS = Caulobacter radicis OX=2172650 GN=DDF65_00885 PE=4 SV=1
MSDQRVRSVVVVGGGTAGWMTAAALAKTLSAQGLKITLVESEAIGTVGVGEATIPPILTFNAMLGIDEPTFMRATKASFKLGIEFVDWGAVGETYHHPFGTFGLDLEGIKFHQVWRKFADLAGPIGDYNLTEAAARRWRFALPDPDPSKVMSSLRYAYHFDAGLYARFLRGFSEQRGVVRIEGRIGRVDQNAGTGFVEAVVLEDGRRVEGDFFVDCTGFRGLVIGQALKVPYQDWGRWLPNNRAVAIGCQLGGDGLTPFTRATAREGGWQWRIPLQHRIGNGYVYSSHHVDDQRALDTLLANLDGAPTDEPNFLRFTPGRRERAWEKNVCSIGLSAGFIEPLESTSIHMIQAGVTKLLALFPRNGVDPLEIDEYNRLTAEQVDRIRDFVILHFHATRRDDTDYWRYLSSMTVPDSLARRMELFAHRGRWFPSEYDLFHEPNWLAVLLGQGIVPEEWDPLVDSLPEDQVRQRLSHLSALIARTAEAMPDHAEFVARYCGAPQGVAA

SEQ ID NO: 83074 - protein, 498 aa, Nostoc sp.
  REGION 1..498: note = tr|A0A318BGU1|A0A318BGU1_9NOSO Tryptophan halogenase; OS = Nostoc sp. 3335mG OX=2204170 GN=DMC47_08140 PE=4 SV=1
MKADERISVVVIGGGTAGWMTAAALSTLASGAADVHLIESAEIGIVGVGEATLPHLRAFVTRLGIDEAAFMAATHATFKLGIEFRDFGKLGDRYIHPFGGYGRALGGVGFHHYWLRRHHAGAAAPIGDYSTAVAAAEARRFTRPGDDPEDLASAFGYAYQFDATRFAPFLRAHAEARGAVRTEGRVEQVERDPTSGDVTAVVLADGRRIEGDLFIDCSGFRALLIGGTMDEAWEDWSHWLPCDRAVAAPCASPPGAIEPFTRATAMSAGWRWRIPLTHRVGNGYVYSSAHLSDQDAQDALVASLESPPLADPRLLRFRAGRRRRSWVGNVVSVGLASGFLEPLESTSIYLVQMAITQLIEHFPGRRVADADRDGFNALVDAEYDRIRDFLILHYHATTRDDSPFWDHVRTMAIPDSLADKMELWRRSAQVSRYSHGLFLEPSWIAVYLGQNIVPDGWDTRADLPDAAALDRALEALRGGIAEAVAAMPDHAAYLKAAA

SEQ ID NO: 83075 - protein, 519 aa, Cellvibrio sp.
  REGION 1..519: note = tr|A0A1U9NAI2|A0A1U9NAI2_9GAMM Tryptophan halogenase; OS = Cellvibrio sp. PSBB023 OX=1945512 GN=B0D95_10690 PE=4; SV = 1
MTSHTLRNVVIVGGGTAGWMTAAALAKFLPPQQYHIQLVESDAIGTVGVGEATVPHIRFFNQVLGIDENEFMQKTNATYKLGIEFSHWGKRGDRYIHPFGIYGQARNDISFHHYWLKLQQSGDPHPIGDYSVGVVAAYAEKFAYPHRDTHSLFSKYSYAFHLDASLYASFLRDYSTTRGVTRVEGKIIRVEQHPDSGFIRAVELDSGAQLAGDLFIDCSGFRGLLISDTLKTDFEEWSHWLPCDRAIAVPSSKTREPLPYTKAIACTAGWQWRIPLQNRTGNGQVYSSHHISDDEVAHNLLHNLDGEPLANLHYLRFKAGRRVQSWNKNCVAIGLSSGFLEPLESTSIYLIQIAIMTLVECFPDAAMEETNRHEFNRTMANEYERIRDFLILHYHATQRDDSAFWNDCRTMIIPESLHYKMQLFREQGHVERYKQGMFLEPSWVAVYMGQGIIPTAYHPAVNALDIQHLRDYLHSLRNTIATGVNAMPSHTNSIQRYCNNPHSETTWPPAAMSLYGVFS

SEQ ID NO: 83076 - protein, 503 aa, Brevundimonas subvibrioides
  REGION 1..503: note = tr|A0A258HIR0|A0A258HIR0_9CAUL Tryptophan halogenase; OS = Brevundimonas subvibrioides OX=74313 GN=B7Y86_08880; PE = 4 SV=1
MTGAPIKSVLIVGGGTAGWMAAAAIKRSVGPNAEVRLVESADIGIVGVGEATVPPIRDFNALIGLDEAEFMRETKATIKLGIEFKGWGAKDSAYFHPFGTFGAGPTLADFPGSYFALKDRGKAGSLESYSITSHAARRGRVGARSNDPRSALSGFHTAYHFDATLYGQYLRKVCATRGIERIEGEIVEVVQKPENGFVDHVVLKDGRTLTADLFIDCTGFRGLLIEGALKAGYEDWSHWLPMNRALAVPCAKVRAVDPYTSSTAREAGWQWRIALQHRTGNGYVYCSDFIEDEAAKQTLLANLDGEALADPRPLRFVTGRRKTLWDKNVVSLGLSSGFIEPLESTSIHLVQSGIVRLLQHWPDTAFSQTNTDGYNRRLTREIELIRDFVILHYHATRRDDTPFWRHVRDMAIPDSLAERVEMFRDRGLLFQVGADEYFSQGSWMAVMMGQGIVPRAHNPLYGYQDLDRVAAGFEQIKQAWATTAENLPAHEDYLKANRMWADA

SEQ ID NO: 83077 - protein, 505 aa, Sphingomonas sp.
  REGION 1..505: note = tr|A0A4V2QNE8|A0A4V2QNE8_9SPHN Tryptophan halogenase; OS = Sphingomonas sp. PP-CC-3G-468 OX=2135656; GN = C8J41_101477 PE=4 SV=1
MTLGSPVRRIVIVGGGTAGWMAAAALARLIPTGASVTLIESDTIGTVGVGEATIPPIRAFNAMLGIDEAAFLAATAGSFKLGIEFVDWGAIGERYLHPFGGFGFDIEGVRFHQHWRRRRAAGVVEDIDAYSLCAVAARAGRFAPPSPDPASILSQMAHAYHFDAGLYAQFLRGRAERDGVIRIEGEIGDVALDGDTGHVRHVTLAGDRRIEGDLFLDCSGFRGLLIEQALGAGYEEWTQWLPCDRAIAMPTANTGTAITPYTRSTAQASGWQWRIPLQHRTGNGYVYSSAHCSDDEAAATLLDGVEGPPLADPRVLRFTAGRRRKQWIGNVVALGLASGFTEPLESTSIHMVQTGISKLLALFPDQGFSPVEIDTYNRLAETQFDQVRDFLVLHYHATRRKDSPFWRDAGARAIPDSLAERIALWRRRGRLFRWEDDLFAEASWVAVLLGQGIVPEGWDRLADAVDARDVDARFDRLRAMFADAAARMPRHEDYLARTSPTRVRA

SEQ ID NO: 83078 - protein, 500 aa, Sphingobium sp.
  REGION 1..500: note = tr|A0A2A3MSG9|A0A2A3MSG9_9SPHN Tryptophan halogenase; OS = Sphingobium sp. D43FB OX=2017595 GN=SxD43FB_16435 PE=4; SV = 1
MSTLPPPRRIVVAGGGTAGWMTAAALARTLGPVAQVTLVESEQIGTIGVGESTIPPLVAYNRILGINEADFMRATQATFKLGINFENWRVPGESYFHSFGGTGKDHWSAGFQHFWMHGQAQGHDAPYGDYCLELKAAEAGRFAHLPDDRMNYAYQLDSGLYARFLRRMAEADGAQRIEGRIAKVELDSESGDIAALRLDGDRRIEGDLFIDCTGFRALLIEGALHVGYDDWTHWLPCDGAVAIQTSSVRPPVPYTRAIAHEAGWQWRIPLQHRQGNGIVYCSGFLDPDAALEKLLASVEGDKLVQPNPIRFRTGARRRQWHRNCVAVGLSGGFMEPLESTSIHLIQRAVLRILRMLPAGTVSPLDIAEFNDQQMTDMEQIRDFLILHYKATDRRDTPFWRHCAAMAVPDSLAHRMELFRQTGRVFRKNEELFAENSWVQVMMGQGITPQSHHPVASKLRPDELTHLLASLKDQVSRTVANLPDHAAYIARYCSAQEPVAA

SEQ ID NO: 83079 - protein, 496 aa, Sphingomonas sp.
  REGION 1..496: note = tr|A0A2K8ME47|A0A2K8ME47_9SPHN Tryptophan halogenase; OS = Sphingomonas sp. Cra20 OX=1327635 GN=CVN68_01435 PE=4; SV = 1
MTEQRVRRVVIAGGGTAGWVAAAALVKQLGPMLDITLVESDEIGTVGVGESTIPTARRFHQLLTIDERIFMRETQASFKLGIAFENWTRDGSRYFHSFGQIGRPSTWMADFHHFWLEAREKGFGGDLGDYCLELQAAAAGRFATGPDATIQHAYHLDATLYARFLRRLSEGAGVRRVEGKIARVEQDPESGFLTALALESGARIEGDLFLDCTGFRALLIEQTLGAGFEDWGHWISTDSAFAIQTRATEDAVPYTRAIAHQAGWRWKIPLQHRVGNGLVFCSEFLSPDAARQQLLDAVEGEVLTEPRLIRYKTGQRRKVWDRNCIALGLSSGFIEPLESTSIHLIQVAITRLIQTFPFSGVGEAQAERFNAQARHEMERIRDFIILHYHLNARDGPFWQRCREMSVPDTLVERLALFGEAAHAYQAADDLFRVDSWVQVLFGQGLAPRGYHQLARMMPPEELRNAFGGIRGDIAAAVQAMPRHGDFLKSYCPAGDA

SEQ ID NO: 83080 - protein, 435 aa, unidentified
  source 1..435: note = Rhodopirellula sallentina
  REGION 1..435: note = tr|M5UJI6|M5UJI6_9PLAN Tryptophan halogenase; OS = Rhodopirellula sallentina SM41 OX=1263870 GN=RSSM_02375; PE = 4 SV=1
MILRTGANTMKTSYDCVVVGAGPAGGTAAAIVASAGHETLLLEREAVPRFHVGESLMPEAYWPLERLGLIDRMKQSGWQQKKSVQFVTHTGKESEPFFFREHDERECSTTWQVERSEFDKMLFDRAAELGAECRDRMRVTDILFDSAETPDQPPRATGVVVRDPDGKEHTINARVVVDATGQQSFIAGRLGLKEVNPNLKKAAIWTYYKDAVRGDGDNEGATIILNTENKNTWFWFIPQSRGITSIGCVADHEYLLKGRGTPEEIFGEELAYCPGLAPRLENATRVGKFTTAKEFSYMTRQHAGPGWVLVGDAFGFIDPVYSSGVYFALEMGVRAGDAIIEGLQSDDLSGEQLGKWSGEFKAGAERIRKLVHAFYDKDFSIGRFMREFPQYRGNVTDLLIGRVFTDDAGRMFPDMQQSIENTRQQKLAAAKEMNA

SEQ ID NO: 83081 - protein, 509 aa, Sphingomonas sp.
  REGION 1..509: note = tr|A0A4R1U3E9|A0A4R1U3E9_9SPHN Tryptophan halogenase; OS = Sphingomonas sp. PP-CC-3G-468 OX=2135656; GN = C8J41_103262 PE=4 SV=1
MKEQNVPANPGCIRRVVIVGGGTAGWMTASALGRYLKSDAPEIILLESSDIATVGVGEATIPSITKFHRALGLDERKLLAATGATFKLGIEFVDWQNIGDRYFHPFGLFGKDVGGVGFHNLYLKISKSVTYDDAWRYSPCAVAAASGRFGPQAANNAKPTGGFPHAFHLDAKLYAAHLRDYAEAKGVFRVEGRVVEVVRRKENGFVQSVVLQDGRTIDGDLFIDCTGGRGLLIGDAMGVDYLDWRDSLPCNRAVVVPSKADSTPALYTRATAKPAGWQWRIPLQHRCGNGYVYSSDHVSDDAAAQELLNDVSDRLETPRILTFRTGRRAEFWRGNVVAIGLSAGFLEPLESTSIHLIQTGVSKLLNLFPDKTFSRALAAEYNKTMINAFEGVRDFIILHYKATKRTDTTFWDRVREMPIPTSLRDRVELFRESGRFVRDENELFSLESWILVMLGQGIVPERYSPLVDAIDDVLVNSAEKEIRAEIADAVRSMPTHEVYLRSLSKTADA

SEQ ID NO: 83082 - protein, 489 aa, Nostoc sp.
  REGION 1..489: note = tr|A0A318B7K1|A0A318B7K1_9NOSO Tryptophan halogenase; OS = Nostoc sp. 3335mG OX=2204170 GN=DMC47_24155 PE=4 SV=1
MTPDRRFVILGGGTAGWITAHLVERAWPDATVTVVESPDIGTIGVGEGSTPSLKRFFEIIGADEAEWMPRCGATYKAGIRFVDWSPAAPWRDYRHPFTTQIDVHTEEAFVLNCRNRRLGHDVPVRPDDFLLNGVLAARGLAPVAPGNFPFRIEYGYHFDAGLLGQYLRERAVARGVVHHAARVTEVRRTENGDIAALVTDRGQDIAGDLFFDCSGFNGLLIERTLGVPFRSFGENLFNDAAIVLPTALPGDPPVETVATALSNGWCWSIPLRHRVGNGYVYASDFQSPDAAETELRRTLGVADTVPARHLTFRVGQVARHWERNCVAVGLSQGFIEPLEATALHLVLNTVEQFIRHYRDGDGTDRHRAAFNAVAAERMDGVRDYIVAHYKLTTRTDTDYWRANAANMALPDPLLHLLDRWFRRGDIAEELARQGQRSHFGNLSWHCLLAGYGAFPPVTMTDRTDLDFYAARRIGAFLDGCSLNFARQAI

SEQ ID NO: 83083 - protein, 508 aa, unidentified
  source 1..508: note = Caulobacter radicis
  REGION 1..508: note = tr|A0A2T9JPL5|A0A2T9JPL5_9CAUL Tryptophan halogenase; OS = Caulobacter radicis OX=2172650 GN=DDF65_06705 PE=4 SV=1
MSEAIRDIVVVGGGTAGWMTAAALAQTVGTRRYSITLVESEQIGTVGVGEATIPMILLFNKVLGLDEDVFIRETNATFKLGIEFVDWRRLGHSYFHPFGLYGADMDGVGFQHFWLRWARESGDWRHDAFNAETLAAADGRFMRTPPAPNLPKINYAFQFDAALYAAFLRRYAEARGVVRVEGKIAGVERDGESGHVSRLVLDDGRTIGGDFFADCSGFRGLLIEETMGAGYDDWSRWLPCNRAAAVPCARAGELTPYTRATAREAGWQWRIPLQHRTGNGYVFCDAFIGEDEAVRLLGQRLDGAALADAKILKFTAGRRRKSWIGNVLAIGLSSGFLEPLESTSIHLIQAAIAKLLTLFPKTGFDPFVVDKFNREMALEYEQVRDFIIAHYKVGERDDTPFWRWCRDMVPPDSLAQRLEVFRARGEVLIDQKELFKETNWFAILAGQGLLPDDYHAVADKISSEELGLRLGRIRAAINERVAGMPPHDLYLEKAGLLGAARAGASIPA

SEQ ID NO: 83084 - protein, 500 aa, unidentified
  source 1..500: note = Fimbriiglobus ruber
  REGION 1..500: note = tr|A0A225DMX6|A0A225DMX6_9BACT Tryptophan halogenase; OS = Fimbriiglobus ruber OX=1908690 GN=FRUB_05798 PE=4 SV=1
MIRSVIVLGGGSAGFLAALTLKTKLPQLNIMVIHSKDIGIIGVGEATTVALPKLLHGYLSFDPGDFYRRVETTWKLGIRFLWGPRPYFDYTFGFQLDWKWANLGKFNGFYCDDDFSYVDTQSALMSHNKAFVRRPDGSPMVGINNYAYHIENQKFVEFLHQKALERGVTVRDETVDEVLQDDAGIAGLRVASGVVRAADLYVDCSGFRSTLLGKTLGEPYTSFKSSLYNDRAVTGGWARGSDEPVKPYTTAESMDHGWCWQIDHLDRINRGYVYSTDFVSDSEAEAEFRRKNPEVTSTRLVRFSTGRYHRSWVKNVVGIGNSAGFVEPLESTGLAVICDESRLLAEALSDADCHPTPSLMAAYNDIFAREWDAIRFFLAIHFKYNTRFDTPYWRACRADIDIGSAAAVVDFYRENGPTPYAKTTVLGTNDIFGMEGYLCLLVGQKVPYNRAHKPTPQERLLWRGIQAENRVKALTAVDVADAYQAVSAPSWQWNTDVFRV

SEQ ID NO: 83085 - protein, 523 aa, Pelomonas sp.
  REGION 1..523: note = tr|A0A5C7VEF7|A0A5C7VEF7_9BURK Tryptophan 7-halogenase OS=Pelomonas sp. OX=1909303 GN=E6Q67_04550; PE = 4 SV=1
MMPIRNILIVGGGSAGWLAAAYLARTLGAGDPEGPRITLVEARGIPTIGVGEGSFPSLRGTLAAIGIAEDRFIRDCSATFKQGIRFDHWVRPPGQPGADHYFHPFSQPSQRPGGPELLPYWLLGEAGEGQAFAEAATLQKRVADASRAPKRPTDADYVGALNYAYHFDAGRFADLLAEQARALGVQHVAATVERVEMGDGGLIAAVHTREAGRLAADLFLDCTGFHAALIGGALGSPFKSLADQLFVDRALAIQLPYPRVDAPIASYTISTAQPAGWIWDIGLQERRGVGHVYSSRHVDDDQAEAQLRAYLGPAADALSARRLELRIGYRETQWVGNCVAVGLSSGFIEPLEASGLGLVEAAVYLIAHLFPHGGELDAAARQFNAQMRTRYERIADFVKLHYGLSQRRDSAFWVDNTAPESFSPLLREQLMMWRQRAPHRLDFIADLEMYPPSSWQYVLYGMEYPTRLARNARAWPRAAEARQEFQTLRQLAPRAIADLPTHRALVQHLCARANAAVAPGVRS

SEQ ID NO: 83086 - protein, 507 aa, Shewanella sp.
  REGION 1..507: note = tr|A0A3Q9E5E9|A0A3Q9E5E9_9GAMM Flavin-dependent tryptophan halogenase RebH OS=Shewanella sp. TH2012; OX = 1965282 GN=rebH_1 PE=4 SV=1
MKVRTIAILGGGTAGWLAANHLGAELAGDAEIEITLIESPDIATIGVGEGTVPYIMKSLKRFGISEAELLVKCDTTFKQGIKFVNWLDPKLHGENHYYHPFDIPYPSGYDVTPYWLTQDGNQPFDEVSIQGRVCELGLAPKKKSSGEYVGDLSYAYHFNAQKFANLLAENAKSRFNVKHQYATVTGGLLDDNGAIKALVTENGQELAFDFYVDCSGFHSVLLDKVLNVPFVDKGHELLTDSVMVQQVPLKEGEALAPYTTATAHKAGWIWDIPLTTRRGTGFVYCSKYMSDDEAHTLFAQYLGVDKASISPRKIPMQIGYRQEFWAKNCATLGLAQGFVEPLEATSILVTDFSAELLAKNFPRDSDDMDIVRPYYNKVLTYAWERVIDFIKLHYCLSDRQDTGFWDDNRNSATWSDELKERLAKFAIRPPQQSDFFTRFDLFDDKNFLYVLYGMKFKTKAKAITLVEIEQSQKLLELNNKMVEAAPKQLLAHKDWLDGLKAAMARAG

SEQ ID NO: 83087 - protein, 496 aa, Streptomyces sp.
  REGION 1..496: note = tr|A0A014MMS2|A0A014MMS2_9ACTN Tryptophan halogenase; OS = Streptomyces sp. PRh5 OX=1158056 GN=Z951_38785 PE=4 SV=1
MSEGRQEYDVVVVGGGPGGSTLAALVAMRGHRVLILEKETFPRYQIGESLLPSTIHGVCRMTGVAEKLAAAGFTPKKGGTFRWGANAEPWTFSFSVSPKIAGATSHAYQVERSKFDNILLEHAVEKGAEVRFRVSVTDVLEDGDRVTGVRYTDADGAEHEVHARYVVDASGNGSRLHKRVGGTREYSQFFRSLALFGYFEGGKRLPAPNSGNILSVAFESGWFWYIPLTPDLTSVGAVVRRENADKIQGDPERALLALIDECPLIKEYLSDATRVTEGQYGQLRVRKDYSYHQTTFWRPGLVLIGDAACFVDPVFSSGVHLATYSALLAARSISSSLAGIVSEEAAFTEFEARYRREYGVFYEFLMSFYDMHVDENSYFWSAKKVTRNQHTELESFVELVAGVSSSEFDLDGAESAALRMKSKSAEFVSAIDEMSADAEGNMTPLFRSSAVRQAMQEGAQVQSRAFLGEDLGPDVPMFPGGLITSDDGMLWQPGPA

SEQ ID NO: 83088 - protein, 516 aa, Rhodanobacter sp.
  REGION 1..516: note = tr|A0A1V3Q0P9|A0A1V3Q0P9_9GAMM Tryptophan halogenase; OS = Rhodanobacter sp. C03 OX=1945858 GN=B0E48_09850 PE=4; SV = 1
MEADPPVRRIVVVGGGTAGWMTALALANSAYGSRLEVTVIDSPQVATIGVGEGSTPFLRRFFEDLGIEEAEWMPACNATYKNGITFDKWSTRPGFESYFHAFASMLDNLTMTQFINNVHSRLNHADVHAHPDRFFIASRLARDCRAPKPAHSFPFDIWHGYHFDATLLGAFLLKKALERGVRHIACHVNEVILKDNGDIGSLHLEGGETLDADFFIDCTGFASLLIGKALKTPFVPYAENLFNNAAIALATPIDGPIMSQTVSTALTNGWAWKIPLTNRYGNGYVYSTDFCSPEQAETELRAHLGVLDADVPARHLKMRVGRVAESWNRNCLAIGLAQGFIEPLEATTLLFVQRTAYMFVAALEKGDLGAEARATFNQTINVQFEGTRDYIVTHYKTNTRTDTDYWRANAANTHLSNPLKHLLTTWLSSKPIIPGLKKGVFGQGYPTMSWYSLLAGVGLFPDSQHMRPPTPEEAQHDLTQIDNMLERSAMNYPDQRELLQRIPLKSREPSLQVYLW

SEQ ID NO: 83089 - protein, 501 aa, Sphingomonas sp.
  REGION 1..501: note = tr|A0A4R1U6F8|A0A4R1U6F8_9SPHN Tryptophan halogenase; OS = Sphingomonas sp. PP-CC-3G-468 OX=2135656; GN = C8J41_102853 PE=4 SV=1
MAEQRIRKVVIAGGGTAGWLAAAALSRQLGQLLDITLVESEEIGTIGVGEATIPTMRAFHTILGLDEREFMRATQATFKLGISFENWARDGDRYIHSFGDIGKSTWMGDFHHFWLAAKADGDTSEIGDYCLELQAAKAERFALPSEGQINYAYHLDAGLYARFLRARSEANGLKRIEGRIASVDRDGETGFIRALVLASGKRVEGDLFIDCTGFRGLLIEGTYAAGYEDWSHWLPTNSALAVQTAATGPAHPYTRAIAHDAGWRWRIPLQHRVGNGLVYASDHLSDDEAHARLLATIDGAPLTEPRLIRFRTGRRRQVWMGNCVALSLASGFVEPLESTSIHLIMTGITRLMQTFPFGGIAPALVKRYNDQAQAELERVRDFIILHYHLNERPEPFWAARRDMPIPDTLVERIALFTEGAQAYQGGDDLFRVASWVQVMLGQRLTPRDHHRLGSIMGGPQLAGVLTNIRSTIADAVAGMPTHQQFLDRYLAAPVTAAARMR

SEQ ID NO: 83090 - protein, 501 aa, Nostoc sp.
  REGION 1..501: note = tr|A0A318BET9|A0A318BET9_9NOSO Tryptophan halogenase; OS = Nostoc sp. 3335mG OX=2204170 GN=DMC47_11310 PE=4 SV=1
MTTADQRLRRVVIAGGGTAGWMAAAAIARTLGRTVDLTLIESEAIGTIGVGESTIPPLVNYNRLLGINEAEFMRATQATFKLGILFDDWKEPGSRYFHSFGLTGKDHWSAGFQHFWLYGRSKGHEQSYDDYCLELIAALKGRFAHLPEDRMNYAYQLDSGLYAKFLRKMAEGDGAARIEGRIARVELDGESGDIAALHLDSGQRVEGDLFIDCTGFRALLIGEALHVGHDDWTHWLPCDSAIALQTESVGPAVPYTRAMAHDAGWQWRIPLQHRVGNGIVYCSRYLDRDAALDRLVGNVEGEVLTEPNFLRFGAGARRKQWHRNCVAVGLSGGFMEPLESTSIHLIQRAVLRVIRMMPLGKISEHDIAEFNDQQHNDMLQIRDFLVLHYKATDRRDSAFWRQCASMEIPDSLAHKIELFRETGRVFRRNDELFAENSWVQVMMGQGIMPRSWHPIAEKLRDDELTRLLTMLRDDVTRTVGTLPEHAAYVARYCGAARPASA

SEQ ID NO: 83091 - protein, 504 aa, unidentified
  source 1..504: note = Caulobacter radicis
  REGION 1..504: note = tr|A0A2T9JZL9|A0A2T9JZL9_9CAUL Tryptophan halogenase; OS = Caulobacter radicis OX=2172650 GN=DDF65_00890 PE=4 SV=1
MTNDRIRHVVIVGGGTAGWMTAAALGRFLKDGVTRVTVIESEAIGTVGVGESTIPQINMFNRMLGLDEDDFLRRTKATYKLAIEFRDWKEIGHTYHHPFGPYGVDMEGVSFHAYWLRYQAMGEAADLSEYSLQSLAAAKARFQRPTGQKNSPLGDIAYAFHFDAGLYARFLRDYAEARSVRRIEGRIVDVALRGTDGFVQSVTLENGTVVEGDLFIDCSGFRGLLIEGAMKSGFEDWSHWLLNDRAVAVPCASGGSTDPVTRATARPAGWQWRIPLQHRIGNGYAFSSQHISEDEATAYLLANLDGEALADPWTLRFKAGRRKKSWNKNVVAIGLSAGFMEPLESQSIHLIQVGISRLLAMFPDRRFQQPDIDRYNRVMTFEYEKIRDFLILHYKATQRSDTPYWDYLREMEIPEYLADKIAVFESHGRIFRENEELFNDTSWFAVMVGQGLKPKGWDPMADIMSDDLLRARMNEIRAVIARSAEGMPDHMSFVAERVAGARAA

SEQ ID NO: 83092 - protein, 495 aa, Sphingomonas sp.
  REGION 1..495: note = tr|A0A4R1U8X8|A0A4R1U8X8_9SPHN Tryptophan halogenase; OS = Sphingomonas sp. PP-CC-3G-468 OX=2135656; GN = C8J41_101478 PE=4 SV=1
MTDALRSVTIVGGGTAGWMAAVAFGRLLGPAGTRVTLIESDDIATVGVGEATIPPIRTFHAMLGIDEDAFLRATGGSYKLGIRFEGWTRPGESYVHPFGQIGTDIAGVPFAAQWLRARQAGAAEPLGAYSLEACAAEAGRFSRPIANGNSPLSRIGYAYHFDAGRYAAFLRTQAEAYGVVRQEGLVERVERGPAGIAAVHLADGSRIAGDLFLDCSGFRALLIEGAMEAGWTDWSEWLPCDRAVAVPSVADAAPLPLTRAIAERAGWRWRIPLQHRTGNGHVFSSRHIGEDEATATLLAGLHGEALAEPRVIRFATGHRNRFWSGNCIALGLAAGFMEPLESTSIHLVQSGLQHLLRMLPTGAPPAPAVVERYNRIMTAEYTRIRDFLVAHYHLNARAEPFWRDRATAAIPEGLAEKLALFRAGGRIFREADELFNETSWLAVLTGQNAPVLGHDPICDCIPIETAANRLARIERVVATSLTHMPSHAHALARLA

SEQ ID NO: 83093 - protein, 485 aa, Shewanella sp.
  REGION 1..485: note = tr|A0A3S9LAY8|A0A3S9LAY8_9GAMM Flavin-dependent tryptophan halogenase RebH OS=Shewanella sp. TH2012; OX = 1965282 GN=rebH_3 PE=4 SV=1
MQQFDLLIVGGGSAGWMAAALCSRLRPQWRIALVESERIGTIGVGEGSTPHFGRLMATLGLAESLWMPECDASFKTGIDFGSWGGDEQRYFHPFLSPMDLKAAEVFYLGANARRRGRGPWTGPDEYFIAARLARAGVDPIAAKPLPAPLEYGYHFDAAKLAVLLRRVAEGAGVQRIAAEVVQVHMQDADTLAGLSLSDGQRLDASRFIDASGFAALLIGDALQVPFESLADKLLCDSAVTVATEAVSGMPFTRAEALEAGWLWQIPLASRTGNGYVYSSAHLSADEAAFRLRARLGLTPDVAVKHLAMKVGVRSRCWQGNVLAIGLAQGFVEPLEATSLMVTQHTLEQYLQQEALDTPLVSRQQAFNQAWRTLMDGIVDYIQAHYLCARRRDSEFWQTASQTPPGPLLSELLTVWRAGGDLDAFLHQHDSKLAYFRPSWYALLAGLDDRNPQLVMPYQPPAADLRAAASAFSQRLMQQFFTAKAG

SEQ ID NO: 83094 - protein, 503 aa, Umboniibacter marinipuniceus
  REGION 1..503: note = tr|A0A3M0AHY7|A0A3M0AHY7_9GAMM Tryptophan halogenase; OS = Umboniibacter marinipuniceus OX=569599 GN=DFR27_2161; PE = 4 SV=1
MVDNSIKKVVVVGGGTAGWMAAALLGKLMGKLVSVELVESDQIGTVGVGEATIPQIRHLTDALQISEQDFLKSVQGTYKLGIEFNDWGKLGDSYIHTFGDVGRRLGVLDYHQVWLRGRELGLTEDFWGASFNEIAARANKFAPVEKIGNTGLLGLGYAFHFDATLVAKYLRNYAEPLGVKRSEGHIQQVLKDPDSGYITQLKLEDGRLVEGDLFIDCSGFRSLLLGEALATPYVNWSHWLPCNSAQAVPTKATEPLVPYTKATARKAGWQWRIPLQHRVGNGHVYASDFISDAEATDILLANLDAEPLMAPKQLRFTTGKRENFWVKNCIALGLASGFMEPLESTSIHLVQSALSRLIDLFPTREFSEADVAEYNTRTHFEYDTIRDFLILHYKATSRDDSEFWNYCRNMSIPDSLQHKFDLWQNHGRFFRNDDELFTQMSWVQVFLGQNIIPSDCHPIAKSLTKDQVQGYSADIRRILLQTVDQMPSHAEFIAQHIAAPRLD

SEQ ID NO: 83095 - protein, 526 aa, Rhodanobacter spathiphylli
  REGION 1..526: note = tr|I4W0A8|I4W0A8_9GAMM Tryptophan halogenase; OS = Rhodanobacter spathiphylli B39 OX=1163407 GN=UU7_09992; PE = 4 SV=1
MSRIQKILVVGGGTAGWLTACYLARTLNGAAPGSIRVELLESPNIGLLGVGEATFPSIRGTLAAIGLDERRFLVGATATYKQGIQYVNWVRPPGAAGADRFFHPFSQPSQRPGSPELLPYWLLGGAPEGMSFAEAVSMQQRLIEQGRAPKRLVDADYQGPMNHAYHFDAACFARVLAEHGQELGVTRHLATVERAELDESGAIARIVTRETGELRADLYVDCTGLRGALIGGTMQSPFHSRRDVLFGDRAVALQVPYARPDAPILPFTRATAQEAGWIWDIGLQKRRGIGYVYSSRHTDATRAEEVIRRYVGEQAAGLEALHIKFETGYRPEHWRRNCVAVGLAGGFVEPLESTGIALVELGAYLIAHLLPGDLDDMERSARHYNQMMVARYERIIDFIKMHYCLSQRRDHAFWIDNADPASIPQTLQDRLALWRHRPPHRLDFVTDLEMFLPCSWQYVLYGMEFRTDLEPMRSAYPQMAAARREFAMIREMAGHALVDLPDHRTLVEQLCREHVQRTAQREGSAA

SEQ ID NO: 83096 - protein, 502 aa, Nostoc sp.
  REGION 1..502: note = tr|A0A318BJ98|A0A318BJ98_9NOSO Tryptophan halogenase; OS = Nostoc sp. 3335mG OX=2204170 GN=DMC47_14865 PE=4 SV=1
MTDNRIRTIVVLGGGSAGWMAAAALATYLGRGVSVRLVESEEVGIVGVGESTVPHMKTFNSETLGIDERAFVLRTNATFKLGIRFTDWARIGDSYIHGFGTIGQGLGPLPFHQLWLRRFLAGKAAPLGDYSLQTVAAPAGRFRWDGPAGTPLANIAYAYHLDAVLYARFLRDLAERRGVERIEGKVEGVEQHPESGHVAALTLADGRRVEGEFFIDCSGFRGLLIERTLKTGYIDWRHWLPCDRAFAVPSAAVGPPMPYTEAAARPSGWQWRIPLQHRVGNGHVYSSAHESDEQAMATLLQTVQGSPLDSPRQLRFTAGRRAKAWNGNVVALGLAAGFLEPLESTGIYLAQAGIRRLLGLFPGRDLDPALAERFNRETAFEYERTRDFLILHYKATTRDDTSFWRYCRTMDVPDPLREAIELFRADGRYFRNGGDFFALPSWVQVMIGQGIVPGDYHPIVDAMPEGHLDQYLARVRGEIAATVAAMPPHHEFIDKHCKAMIA

SEQ ID NO: 83097 - protein, 200 aa, Nostoc sp.
  REGION 1..200: note = tr|A0A318B3I6|A0A318B3I6_9NOSO Tryptophan halogenase (Fragment) OS=Nostoc sp. 3335mG OX=2204170 GN=DMC47_27930; PE = 4 SV=1
GLDGAPLAGPNFLRFTAGVRRKAWDRNVVALGLASGFLEPLESTSIHLIQTGIARLLTNFPDRSFNQPDIDYYNRRTRLEYEQVRDFLILHYKATARDDSPFWRRCRDMTVPDTLAERMAIFRENARLYRHDNELFSETSWLAVLHGQNIHPKRHHPIADILSEEELDRRMTHIAAAMDSGVRAMPDHMAFIDRYCRSPS

SEQ ID NO: 83098 - protein, 515 aa, Sphingomonas sp.
  REGION 1..515: note = tr|A0A4R1U4D7|A0A4R1U4D7_9SPHN Tryptophan halogenase; OS = Sphingomonas sp. PP-CC-3G-468 OX=2135656 GN=C8J41_10211; PE = 4 SV=1
MTGNATAGNGAGRVTKVVIVGGGTAGWMTAAALSRLVPSGVSVTLVESEEIGTVGVGEATIPPLLDFNRMLGIDEDAFVRATGATFKLGIEFRDWARLGDAYLHPFGTHGRDIGGVPFHQLWLRQAALGNPDPGPIGDYCLSAVAARRGRFTRPSANPESVLSTLFYAFHFDAALYAKFLRDMAEQDGVVRVEGRVVAVERDAGTGFIEAVRLEGDHRIDGELFIDCSGFRSLLLGDALDVPFTSWKHWLPCDRAWAVPSQRQGGLTPYTRATADTAGWRWRIPLQHRVGNGYVYSSAHIDDDDARRALLAGLEGEALGEPRQLRFEAGRRDRLWERNCVAIGLSGGFLEPLESTSIHLIQSGITRLMSLFPDLGFGVTEIDEYNRVMLREYEQVRDFIILHYHATERSDSPFWDQCRTMAIPASLSAKLALWSGKARVFREQGELFTPDGWIAVLLGQGIRPASFDPLASALPADESARFLAHVRDVIDKTAAAMPTHEAFIAQNCAARTHQAA

SEQ ID NO: 83099 - protein, 532 aa, unidentified
  source 1..532: note = Kaistia algarum
  REGION 1..532: note = tr|A0A2S5TXU2|A0A2S5TXU2_9RHIZ Uncharacterized protein OS=Kaistia algarum OX=2083279 GN=C3941_11710 PE=4; SV = 1
MENGAQRPRHTTRPNRGCPMPEPARFIVVGGGTAGWLAAFVLQDKIRRLKLDARVVVVESSKIPTVGVGEGSTAALRVLMQYFNLNEFEFFRETGATFKLGIRHKDWRRKGFTYDGPIDDPHQVVKAPDGAPSDYLNVFCVAAGRKLQDMHLFGPLLEQKKAPYALKEDGGLVPLGPFHHAFHFDQALVGRFLKSKSRGVHVVDAAIDGVMRDGESGHITALKLDTGETLEGDFFVDASGFRKRLIVKELNAPWISYAKELPVNRALPFWIDIKPGEEIANYTLAWAQEAGWMWQIPTQTRYGCGYVYSDEFKTPEEAKLEIERALGHEIDVRDDIRFQIGRLETPWLGNCLAVGLASSFLEPLEATSIHGTVVQLMLFAERYLKHPDRMNNDDRADYNRRIGRQVDDFRTFINTHYVTQRDDTPFWRNVRAERLHSETRERLARWKKEMPRREHFPTFLDGLPHVETQLHYPVLDGLGLLDPAVARAEMAKDPALRAFARDTVDSLVKEYRWAADRAIGHAAFLEHVRRMA

SEQ ID NO: 83100 - protein, 536 aa, Pelomonas sp.
  REGION 1..536: note = tr|A0A5C7VH97|A0A5C7VH97_9BURK Tryptophan 7-halogenase OS=Pelomonas sp. OX=1909303 GN=E6Q67_02615; PE = 4 SV=1
MTDTATVFNQQLAPRTASAATDATPPVQHVCIVGGGTAGWMTALMLASSAYGPRLKVTVLESPQVGIIGVGEGSTPWLRGFFDGLGIEESEWMPACNATYKSGITFEGWSTKPGFERYFHPFASMLDNLTMHQFVDNVHARLQGADVYAHPDRFFVAAALARQGKGPRAQHSFPFDVWYGYHFDATLLGQFLADKARQRGVQHLPRHVTQVQLSERGDIARLQLDGGDTLDADFFVDCSGFASLLIGQALQTPFVSFADNLFNDAALALPTPLDGPLPSQTVSTALRHGWAWQIPLTGRCGNGYVYSSAHCSADAAETELRRHLGLLDADVPVRHLKMRVGRMSKIWHRNCVAVGLSQGFIEPLEATALLFVQRTAAMLVEALEKGDLGPAAQQDFNEALRQRLENTRDYIVAHYKTNSRTDTDYWRANAENMRLSDSLQQVLMTWMSRQPLAPVLRAGRCGQGYPIVSWYALLAGMGIFPDVADLQPPTPQQARHRLDAVDDFVARSALNFPDHRALLADIPPRVGDRTLQLYLW

SEQ ID NO: 83101 - protein, 502 aa, Sphingomonas sp.
  REGION 1..502: note = tr|A0A4R1TWC3|A0A4R1TWC3_9SPHN Tryptophan halogenase; OS = Sphingomonas sp. PP-CC-3G-468 OX=2135656 GN=C8J41_11811; PE = 4 SV=1
MKRVQRLVILGGGTAGWMTAAAMSATFGDLVNISILESDAIGTIGVGEATIPTIQWFNQLIGLDEEAFVAATKASFKLGIEFVDWARPGTRYFHPFGRYGVDLGPVPFHQHWLRAKGDGLDRPLSTYSLAAQLAAAGRFAKPVDDPRSILSTLGYAYHFDAGLYARHLRQLAEKRGVVRHEGLLRDIERDPKTGFVTALTSDRGERLEGDLFIDCSGFRALLIGETMGARFEDWSHWLPCDRAVAVPCARIAATTPFTRSTLRPAGWQWRIPLQHRTGNGYVYASSFVSDDEAVATLLSNLDGEALADPRMLRFTAGFRREAWRGNVVAIGLSSGFLEPLESTSIHLIQSGIAKLITLFPDADCDPVLARQFNTLFARDMDGIRDFLILHYHATQGHDAPLWQHTRHMTPPPTLVDKIAQYTRAGRLMLSADELFREASWLAVLEGQGVGALGHAPLADTLDAATNRRQLNQIETVIARATPTLPLHDAAIAALVAPQVAGR

SEQ ID NO: 83102 - protein, 504 aa, unidentified
  source 1..504: note = Caulobacter radicis
  REGION 1..504: note = tr|A0A2T9K9M4|A0A2T9K9M4_9CAUL Tryptophan halogenase; OS = Caulobacter radicis OX=2172650 GN=DDF62_05460 PE=4 SV=1
MVDQRIRKVVVVGGGTAGWMAAAAFSRLLVGDAVSVEVVESEAIGTVGVGEATIPTIRNFNQTLGLDEVEFIRATQASFKLGIDFRDWGRVGHRYFHGFGDFGADHEAVQAHQLWRRLKALGDPSGLEDWSLPTAAAALNRFIPPSPDPRSPLHDYAYAYHFDAGLYAAFLRRFAEARGVTRTEGRIVDVALRGEDGFVEAVVLEDGRRVEGDLFVDCSGFRALLIEGALKAGFEDWSRWLPCDRALAVPCKLGGDGLTPYTRSTAREAGWQWRIPLQHRIGNGYVYSSAFVDDERASRTLMENLDGQALDDPRPLRFLAGRRRKFWDRNVVAVGLSGGFLEPLESTSISLIQNGVARLLEFFPDRRCDPLLADEFNRVSAQEYERIRDFIILHYCINQRDEPMWRQVREVELPDSLQAKIALYKARGHVAIHEGDGFARPSWIAIYNGLGVVPEAYDPLADRIPEAELRKLMEHRRALIRHTAQSMPTQDAFIARHCAAPPLS

SEQ ID NO: 83103 - protein, 504 aa, unidentified
  source 1..504: note = Caulobacter radicis
  REGION 1..504: note = tr|A0A2T9JQT2|A0A2T9JQT2_9CAUL Tryptophan halogenase; OS = Caulobacter radicis OX=2172650 GN=DDF62_17855 PE=4 SV=1
MSNDRIRHVVIVGGGTAGWMTAAALGRFLKDGVTKVTVIESEAIGTVGVGESTIPQINMFNRMLGLDEDDFLRRTKATYKLAIEFRDWKEIGHTYHHPFGPYGVDMEGVSFHAYWLRYQAMGEAADLSEYSLQSLAAAQAKFQRPTGQKNSPLGDIAYAFHFDAGLYARFLRDYAEARSVRRIEGRIVDVALRGTDGFVESVTLENGTVVAGDLFIDCSGFRGLLIEGAMKSGFEDWSHWLLNDRAVAVPCASGGSTDPVTRATARPAGWQWRIPLQHRIGNGYAFSSEHISEDEATAYLLANLDGEPLATPWTLKFKAGRRKKSWNKNVVAIGLSAGFMEPLESQSIHLIQVGISRLLAMFPDRRFQQPDIDRYNRVMTFEYEKIRDFLILHYKATERSDTPYWDYLREMEIPDYLADKIAVFESHGRIFRENEELFNDTSWFAVMVGQGLKPKGWDPMADVMSDDLLRARMREIQAVIARSAEAMPDHMSFVADRVARAQAA

SEQ ID NO: 83104 - protein, 567 aa, unidentified
  source 1..567: note = Rhodopirellula sallentina
  REGION 1..567: note = tr|M5U9C7|M5U9C7_9PLAN Tryptophan halogenase PrnA; OS = Rhodopirellula sallentina SM41 OX=1263870 GN=RSSM_00662; PE = 4 SV=1
MRTSSQLGTIFPEQDEPHDCHIVIVGGGTAGWMSAATLKRRVGCRVTVVESDRVPPIGVGEATIPAMVDWIENMGIDEDEFIRRTGATYKLAIRFDDWIEPSHRYWHPFGICGCSIEGVDLIHAWQRGVREGWLPNDSQYTDYSFQKELCDHGCGPRQPGMPSIAENYAFHLDAGKLAVFLREVALAEGVQHRVGDVEDAPLDEHGNIACLCLADGSPLQGNLYVDCTGFASVMIENAMNSPWEDWSEQLICDRAITFRIAGNTSQQDDGAVDVGRRALAPYTISTGMNAGWSWQIPLAENTGCGYVFSSKHISDEAAKSELCALVGADPDMVSAKTVPMRIGMRPRQWIGNCVSIGLSAGFVEPLESTGIFLVQRALDELFECLPPATPLAFHAGHFDHATFNGRMTEVYRQVRDFVLMHYVVSRRRDTPFWIDAATVDQPESLRGLLDEYVSTGRVRLPQRDPTFAEANHHFILSPAGVRAGTHEFGHPGESPAIPGVPAGQYQPVHPSVIFDSIRASHRELCAALPAHDALIQSIHGVKTTCDDRDDATHFPPKLYPPTANLLS

SEQ ID NO: 83105 - protein, 471 aa, Maricaulis sp.
  REGION 1..471: note = tr|A0A2D8BWW7|A0A2D8BWW7_9RHOB Uncharacterized protein OS=Maricaulis sp. OX=1486257 GN=CMF74_13645 PE=4; SV = 1
  VARIANT 398: note = Xaa can be any naturally occurring amino acid
  VARIANT 427: note = Xaa can be any naturally occurring amino acid
MKNICIVGAGTAGLISALIFKQSLNVNITVIKSNKIGIIGVGEGSENKFTQFLKFCNISKEEIIKETGATLKYGILFEGWTNKDYLHEVSPKIFNVKKEQYLAAFGYAITNNLSVDKYTQLNQLKNNKVVNKYISDQFHFNTFKLNDYLIKKCKERNIKIIDDEITNIQIKNKKIISLNKKYKFDFYIDATGFKKLLIKKLGGKWDSYSKYLPMNEAIAFPTKGTKEYPAYTLAKAMNAGWMWRIPVQDRWGNGYVFDNRYINAEQAKQEVEKYLGYKIEIGKNIKFNAGAIDKPWIGNCVAIGLSANFIEPLEASSIGSCIQQSFLLINYLPNYDSTAIKQYNKSCTALFENIRDFVLIHYLCNKKDSRFWKNLKIKIPESLKTNLQKWKQRLPIEXDFKSSYILFYETNFALILKELNLIKLNEXKKEYKTKIQDADEKAIENYYKIFYKYRQDLINHKKYIKEINEYV

SEQ ID NO: 83106 - protein, 500 aa, Sphingomonas sp.
  REGION 1..500: note = tr|A0A2K8ME30|A0A2K8ME30_9SPHN Tryptophan halogenase; OS = Sphingomonas sp. Cra20 OX=1327635 GN=CVN68_09110 PE=4; SV = 1
MTDNRIRNIVIVGGGTAGWMAAATLARILGRDYASITLIESDDIGIIGVGEATIPQMATFNRMLGIDENEFMRATQGSFKLGIQFVNWGRQGHTYFHPFGKYGVDMQGVSFHAYFLRLHQLGEAPDVDLWSLQAMAARSNKFMRAIDAGRSPLSDIAYAFHFDAGLYARFLRSYAEARGVVRCEGKIVDVKLRGEDGFVQSVVMENGSEVEGDLFVDCSGFRGLIIEQALQAGFTDWSQYLPCDRAIAVPCASVETWTPYTRSTAHKAGWQWRIPLQHRTGNGHVFCSEFMSDDEATAILLANLDGAPLAEPRTVPFRTGHRNQFWVKNCVAMGLAGGFIEPLESTAIWLIQSGLSRFLTMFPDKQFNQADIDRYNRIMATDYEEIRDFIILHYHATEREDSPFWEHCRNMAIPERLAEKMRVFRSHGRAFRENEELFNDTSWFAVMHGQLLQPQGFDPVAEVMSLEETRSRLAHIREAIANSADYMPSHRDFIRENCAA

SEQ ID NO: 83107 - protein, 530 aa, Frankia sp.
  REGION 1..530: note = tr|A0A1V2IWQ8|A0A1V2IWQ8_9ACTN Tryptophan halogenase; OS = Frankia sp. BMG5.30 OX=1834514 GN=BL254_03235 PE=4 SV=1
  VARIANT 130: note = Xaa can be any naturally occurring amino acid
  VARIANT 239: note = Xaa can be any naturally occurring amino acid
MEDQRITKVVVLGGGTAGWMSASYLGKVLGPAVQITVLEAPSVPKIGIGEATVPNLHKTFFDFLGFAEEEWMRECNASYKMGIRFVNWRTDGTGEADARPFGDSIDHYYHLFGLLPNHGNLPLSHHWTYXKLNGQTSEPFDYACYREPPVMDKKLSPRFADGTKWTNYAWHFDANLVADFLRRFAVNKQGAVHVEDVMTEALIDHRGYVTGLRTKSGAVIEGDLFVDCSGFRGLLINQXMKEPFLDMSDHLLNDSAVATQVPHDDEANGVEPYTSAIAMSSGWTWKIPMLGRFGTGYVFSSRFQSRDDATLEFCRLWGLDPETQPLNQIKFRVGRNRRTWVKNVVSIGLSSCFLEPLESTGIYFIYAALFQLAKHFPDKRFDQILIDRFNAEIETMFDDSRDFIQAHFSFAPRNDTPFWRACKDLVLADDITEKIKMYRVGLAVNMPSTDESTYYANFEVEFRNFWNNSNYYCIFAGLNFLPDHPLPALAARPEEVESAEPVFDQIKRTQEKLISTLPSTYDYLKSLHGA

SEQ ID NO: 83108 - protein, 510 aa, unidentified
  source 1..510: note = Caulobacter radicis
  REGION 1..510: note = tr|A0A2T9JPM6|A0A2T9JPM6_9CAUL Tryptophan halogenase; OS = Caulobacter radicis OX=2172650 GN=DDF65_06715 PE=4 SV=1
METSAPLDIVIVGGGTAGWMVGTALVSGLRPHQARVRLVESDEIATVGVGEATIPAMRDYNRFVGIDEVEMMRETNGTFKLGIEFLDWGFKGSSYHHPFGVHGAAIGGAGFHHHWNRARLAGHDFDIEQFSYAIAAARDDRFEFPNPDPDKIDSTYSYAYHFDASLYAKYLRKVAEGRGLKRTEGKVVDVARDPLSGDVASITLVSGEVIRGDFFVDCTGFRGLLIGQTLNSPFEEWTDWLPCDRAWAVPCARADRFTPFTRSTAREAGWQWRIPLQHRTGNGYVYSSRYISDDEAAATLMANLDGEALAEPRQIRFKAGRRTASWTRNVMAAGLASGFLEPLESTSIYLVQIAVMNLLKLFPGKRVEPALVEEFNRRVDMEYDRVRDFLILHYHANTRTDGELWKHCREMEIPESLKHKLELFRHRGVAPNYHDGLFALPSWISVLLGQGVLPGGYDRMVDNVPLPQALAEMERQRSAIARRVPAMPTHADFVASHCAIPERPVAETMA

SEQ ID NO: 83109 - protein, 538 aa, unidentified
  source 1..538: note = [Pseudomonas] mesoacidophila
  REGION 1..538: note = tr|A0A2A4EVC7|A0A2A4EVC7_9BURK Tryptophan halogenase; OS = [Pseudomonas] mesoacidophila OX=265293 GN=BZL54_31975; PE = 4 SV=1
MSNPIKNIVIVGGGTAGWMAASYLVRALQQQANITLIESAAIPRIGVGEATIPSLQKVFFDFLGIPEREWMPQVNGAFKAAIKFVNWRKSPDRSRDDHFYHLFGSVPNCDGVPLTHYWLRKREQGFQQPMEYACYPQPEALDGKLAPCLPDGTRQMSHAWHFDAHLVADFLKRWAIERGVKRVVDEVVQVHLNDRGYISSLSTKEGRTLEADLFIDCSGMRGLLINQALKEPFIDMSDYLLCDSAVASAVPNADARVGIEPYTSAIAMNSGWTWKIPMLGRFGSGYVFSSKFTSRDQATADFLNLWGLSDKQPLNQIKFRVGRNGRAWVNNCVAIGLSSCFLEPLESTGIYFIYAALYQLVKHFPDTSFDPRLTDAFNAEIVHMFDDCRDFVQAHYFATSREDTPFWLANRHDLRLSDAIKEKVQRYKAGLPLTTTSFDDSTYYETFDYEFKNFWLNGNYYCIFAGLGMLPDRSLPLLRHRPESIDKAEAMFARIRREAERLRTSLPTNYDYLRSLREGDAGLSRSQPGPTLAAPEIL

SEQ ID NO: 83110 - protein, 517 aa, Mitsuaria sp.
  REGION 1..517: note = tr|A0A2G9C6A5|A0A2G9C6A5_9BURK Tryptophan halogenase; OS = Mitsuaria sp. HWN-4 OX=2049333 GN=CS062_17755 PE=4 SV=1
MTPIQDILIVGGGTAGWLTAAFLARQLGTAQGGVRITLVESSDIGIIGVGEGTFPSIRGTLSAIGIGEAEFLQACSATYKQGIRFDHWVRPPGTPGADHYFHPFSQPSQRPGAPELLPYWLGGEAGPTRAFAEAVTLQKAVADARHGPKRVGDGDYLGPLNYAYHFDAGRFATLLATHGQALGVRRVIATVDRVDLDEQGAIAAVHTREAGTLTAGLYIDCSGFRARLIGEALGSPFSSMRDVLFVDRALAMQVPYARPDAPIASYTIASAQESGWIWDIGLQERRGIGHVYSSRHCDDSDAERALRRYIGPAADDLSPRRLTLDIGYRETQWVKNCVAVGLAGGFLEPLESSGIGLIETAAYLIGQLFPFNGDTAPVARHFNAFMKERYARIVDFIKLHYGLTQRTDTAFWRDNADPASFTESLKEKLAMWRCRPPQRLDFITDVEMYLPASWQYVLYGMEFKTEPGAWMAPLNRGEEARREFATIAQLGAHALRDLPPHRTLIEQILARSDRRAA

SEQ ID NO: 83111 - protein, 542 aa, unidentified
  source 1..542: note = Dehalococcoidales bacterium
  REGION 1..542: note = tr|A0A2E9M978|A0A2E9M978_9CHLR Uncharacterized protein OS=Dehalococcoidales bacterium OX=2026733; GN = CL877_10045 PE=4 SV=1
MWTTGCLVWSRDNRENHLSKVLRNIRLVYVGMSEPLHNIVVLGGGTAGWLSAYMLQDFCRQHGISAKLTVVDSSKIPTIGVGEGTTAIFKTFMESFGLEEQEFLRETHGTIKYGIRHRDWKRLGHQYDGPIDDPHFLIPKEEPDDFEFINAYCIASGRCVSEAHLFQKLLSEGLAPVRKIPDGSLEPNHPFLHAFHIDNIAVGRYLRKKAKGIEIIDGVFEEVQRDPQSGNINALKLDGQRKIEGDFFIDCSGFSRLLVEQVFQSDWISYKDELPVNRAMPFFLDHDPAREIPPYTLAWAQGSGWMWQIPTQDRMGCGYVYSDEFLSPDEAHSEIESVLGESVEPRQDLRFEVGRVQDSWKGNCLAIGLSAGFLEPLEATSIHSTLVQLILFSKEYLEDVLHGNDRGRERFNQRIGRQFDDFKTFLNIHYRGERDDTPFWQHVHDHCLGEESARRLEMWKRELPMISHFQHYLSGLPHVETQLYYPVLDGMGLLNQQKAREEMARRKLKRKAQQQFQQLKDEYKQMTTGSLGHREYLLKLTH

SEQ ID NO: 83112 - protein, 507 aa, Hyphomonas jannaschiana
  REGION 1..507: note = tr|A0A059F712|A0A059F712_9RHOB Tryptophan halogenase; OS = Hyphomonas jannaschiana VP2 OX=1280952 GN=HJA_16360; PE = 4 SV=1
MGIPEQRAGMVQSILVVGGGSAGWITANLLNAHIRRAGRPTTVTLVESPDIPTIGVGEATVPTIRRTLSDIGLPEQDLLTSAEATFKTLIRFRDWNPGESYDHPFDRRQRPHTDAAVRGWTAQNGQAFDRAFSTLTQLADFNIAPKSPHAPPYRGNFPYAYHLDAIKLAKRLSKFGQARGIRHKLANITEVKVSPEGQISSVETDQGETLTADLYVDCTGFRSALLGKALDVPMKSYAKYLLCDRAVTMRVPYEVYKPERILTYTLATAREAGWQWDINLQSRRGIGYVYSSQFLSDDAAEAALRRYEGPHSDTLEARHIKFTSGKREMSWKGNCVAVGLSDGFLEPLESSGLYFIEFAALAVASMLEDYAAAPEATVRYYNRISNELFQEILGFINLHYVTSKRRDTPFWQAATADEAVLDDLRDRLELWKRRSPTQFDFPGADRLFAQDSYEFILHGMKYVEGPAGTAPMPPDLSGMVAKSRSELPEHEAFLALVQKAAAARPAG

SEQ ID NO: 83113 - protein, 507 aa, unidentified
  source 1..507: note = Sphingomonadaceae bacterium
  REGION 1..507: note = tr|A0A257DPC2|A0A257DPC2_9SPHN Tryptophan halogenase; OS = Sphingomonadaceae bacterium PASS1 OX=2015579; GN = CFE36_01620 PE=4 SV=1
MSNSGQKPIHVIVLGGGTAGWMAATGVAVMLGDQVRVTLVESEDIGIVGVGEATLPHLRSFVESLGINESDFMRETHATYKLGIDFRDFGKIGDSYIHPFGSFGEELAGISFHHYWLAAQQRGDAGPISDYSMGVAAALANRFRPPANDHTLGSTYGYAYQFDATLFGPYMRTFALSKGVERIEGKVIEVRKDSETGNVTTLLLDNGQCVNGDLFVDCSGFRSMLLGEAVGAEWEDWSHWLPCDRAVAMPCAAASEIIEPYTRAIAMPAGWRWRIPLQHRVGNGYVYASSFIDDEKAADAIVAAAEGTSLADPRILKFRAGRRKNSFVKNVIGVGLASGFLEPLESTSIYLAQMAITYLIELFPKDGKIENADRAEFNRLVDMEYDRIRDFLILHYHATTRDDSPFWDHVRTMQVPDSLAGKIELWKRTGRVAKYSEGLFYDASWIAVFLGQNIIPNGIDPRVSIPDPGGMARALSSLKHAIDMEVATMPDHRAYLHSRSERLAPQL

SEQ ID NO: 83114 - protein, 526 aa, Rhodanobacter sp.
  REGION 1..526: note = tr|A0A0Q8MCA8|A0A0Q8MCA8_9GAMM Tryptophan halogenase; OS = Rhodanobacter sp. Root179 OX=1736482 GN=ASD82_08225; PE = 4 SV=1
MSRIQKILVVGGGTAGWLTACYLAKTLNSAAPGSIRVELVESPNIGLLGVGEATFPSIRGTLAAIGLDERRFLVGATATYKQGIQYVNWVRPPGEAGADRFFHPFSQPSQRPGSPELLPYWLLGGAPEGMSFAEAVSMQQRLIEQGRAPKRAGDPDYQGPMNHAYHFDAACFARVLAEHGQELGVTRHLATVERAELDESGAIDRIVTREIGELRADLYVDCTGLRGALIGGAMQSPFHSRRDVLFGDRAVALQVPYARPDAPILPFTRATAQEAGWIWDIGLQKRRGIGYVYSSRHTDATRAEEVIRRYVGEQAAGLESLHIKFETGYRPEHWRRNCVAVGLAGGFVEPLESTGIALVELGAYLITHLLPGDLDDMERSARHYNQMMVARYERIIDFIKMHYCLSQRRDHAFWIDNADPASIPQTLQDRLALWRHRPPHRLDFVTDLEMFLPCSWQYVLYGMEFRTDLEPMRSAYPQMAAAQREFAMIREMAGHALVDLPDHRTLVEQLCREHAQRTAQHEGFAA

SEQ ID NO: 83115 - protein, 511 aa, Sphingomonas sp.
  REGION 1..511: note = tr|A0A2K8MHW2|A0A2K8MHW2_9SPHN Tryptophan halogenase; OS = Sphingomonas sp. Cra20 OX=1327635 GN=CVN68_09190 PE=4; SV = 1
MVTGGSAANAIERVVIVGGGTAGWMAAAALSAHLAGSGVSITLVESSDIGTVGVGEATIPTIRRFYGQLGMSDAEVMQACQATAKFGIRFVDWLRDGHDFVHPFGRFGQDLKGVDFHHYWLRARAAGDRAPLGDYSLGSLLAGEGHATLPAPDPGSQLGIFDWALHFDAALFAQHMRRFAERMGVARVDARIAHVSLWGEDGFIEGLTLDNGARIGGDLFVDCSGFRSLLLGEALGVGYEDWSHWLLCDGAFAVQSERAGPPPSCTIVTARRAGWQWRIPLRTREGNGLVFSSRFQSDDDARDELLAQVPGKPVMEPRRLRFTPGRRKVAWTKNCVGLGLASGFLEPLESTSIALIETGIERLKQLFPDKDFDPAVIAEYNEQSAEEIERVRDFLILHYKLNGRPGAFWQTCRDMELPDSLNAKRALWRARGAFIRYRWEMFSPASWLAIYAGFENIPARIDPAIAGLDTDQLRRSLEAMRRSVRETLADTPTHQEFLEIMDGAAAKGRAA

SEQ ID NO: 83116 - protein, 507 aa, Nostoc sp.
  REGION 1..507: note = tr|A0A318BMM8|A0A318BMM8_9NOSO Tryptophan halogenase; OS = Nostoc sp. 3335mG OX=2204170 GN=DMC47_02955 PE=4 SV=1
MDTSEIERVCIVGGGTAGWMTAAAIANKFAGLGVQVQLVESDEIGTVGVGEATLPHIRAFNATLGIAEADLMRATEATFKLGIEFCDWGRIGDRYIHPFGNYGPSEDGVAFYHQWLRLRALGDATRLDDYSFPVIAAEQNRFRHPGTDTTKVESSFGYAYQFDASLYAAFLRRYAEARGIERVEGKVVDVALDGERGHVRDVTLADGRVLAADLFIDCSGFRGLLIEGALQSGYDDWSRWLPCNRAVAVPTQSRGPLGPYTRATARTAGWQWRIPLQHRVGNGHVYCSSFISDDDAEAQLVANLDTPMQASPRRLRFTTGRRRVFWKRNVVAIGLAGGFLEPLESTSIHLIQDGITELLALFPDRSFDAGGIDEYNRRMALHFERVRDFLLLHYVATQRDDSEMWRHFRALTMPDSLRSKIDAWLSRGYVVPYQFGLFLPPSWVAVMLGQGLMPGGYDPRVLSDDDATIAARAAALRGAVARAVQATPDHEDYLRRSPAAAALAVRV

SEQ ID NO: 83117 - protein, 496 aa, Nostoc sp.
  REGION 1..496: note = tr|A0A318BKQ1|A0A318BKQ1_9NOSO Tryptophan halogenase; OS = Nostoc sp. 3335mG OX=2204170 GN=DMC47_06850 PE=4 SV=1
MTDPIRHVVIVGGGTAGWMTAAAAGRYLDDGQRRITLIESDAIGTVGVGEATIPTILNFNRLLGIDEDEFLRETRGSFKLGIEFAGWHRPETGYFHPFGSFGRDIDGVHFHQLWAKLKGRAGVGPIGDYSPTTVAARANAFGPAHPDPRSPLSGMVHAYHFDATLYAQFLRRRAEADGVARVQGRIVAVERGEHGHVTAVRLDDGHRVEGDLFIDCSGFRSLLLGEAMGVGFEDWSHWLPCDRAIAVPTERTEPVLPYTRATAHAAGWQWRIPLQHRTGNGVVYASRYMDDDAAEALLLSRLDAAPTAEPRRLSFTAGRRDAMWAGNVVAIGLSGGFLEPLESTSIHLIQQGISKLFALFPDRGFSAVERDEYNRQMADSYRSIRDFIILHYHATARNDSPFWNHVRTMEVPDSLTRKIELFRQKGRVFRYDDELFTLPSWVAVLMGQGIEPVGHDPIADALDEERLLPAIRQMRSATAAAVATLPQHGAVLARLR

SEQ ID NO: 83118 - protein, 149 aa, unidentified
  source 1..149: note = Deltaproteobacteria bacterium
  REGION 1..149: note = tr|A0A4Q3KLL1|A0A4Q3KLL1_9DELT Tryptophan 7-halogenase (Fragment) OS=Deltaproteobacteria bacterium; OX = 2026735 GN=EOO40_11480 PE=4 SV=1
RLCDELPLTRASMDVVARRFNDDFSYRWARVIDFLKLHYALSQRDDSDYWRAHRDPATWPERLRELLPMWRLRAPARHDFGRIDEVFPSASYQYVLYGMGFRPDAPTPPAAKLQAAQACFDEAARQARRFVSALPGHRSLIDHIHRSAP

SEQ ID NO: 83119 - protein, 500 aa, Sphingomonas sp.
  REGION 1..500: note = tr|A0A4R1U7I8|A0A4R1U7I8_9SPHN Tryptophan halogenase; OS = Sphingomonas sp. PP-CC-3G-468 OX=2135656; GN = C8J41_101475 PE=4 SV=1
MSARIQVVIIGGGTAGWMTAATLAMSFAGRLADVTLVESEDIGTVGVGEATVPHIRFFNQRLGIDEADFIRRTNATFKLGIEFRDWGRIGDSYIHPFGDFGHDIDGLPFHQYWAHATRGGADGLPTLENCSLPIVAARDNRFTPPLEDPRSIGSTYSYAYQFDATLYAAYLRDYSEARGVVRIEGRVDAVEQSAGGIAAVRLADGRRIAGDLFIDCSGFRALLIDGALKVGHEDWSHWLPCDAAWAVPTANAGALTPYTRATAREAGWQWRIPLQHRTGNGHVFSTRFTDPETARSVLMDSLEGEALAEPRMLRFRTGRRHRQWVGNCVAIGLSAGFLEPLESTSIHLIQLAIGKLIELFPSGGVFDPADEAEFNRAMALEYDRVRDFLVLHYCATDRDDTPFWRYMRTMTLPSSLTEKIAEFRERGIVASYREGMFLPASWLAVYYGQRIMPGRVNPLIADIPMATSRDHVARVAAACASAAKAMPLHEDYIARVKAAA

SEQ ID NO: 83120 - protein, 499 aa, Sphingomonas sp.
  REGION 1..499: note = tr|A0A4R1TSI1|A0A4R1TSI1_9SPHN Tryptophan halogenase; OS = Sphingomonas sp. PP-CC-3G-468 OX=2135656 GN=C8J41_11813; PE = 4 SV=1
MNDTSEPPRTRVVVAGGGTAGWIAAAAIVRQLGSLVDVTLVESDEIGTVGVGESTIPTARSFHAFLGIDEAAFMRATQATFKLGIAFENWRQVGDRYFHPFGSIGRSVAIADFQHFWLEARARGFGGAYGDYSLEQQAAGAGLFGHDEQHSLAYAYHLDATAYARFLRTLAEPWGVRRVEGCIERVERDGEGSDIAALVLASGERIAGDLFVDCTGFRALLTEGTLETGFEDWSEWLTTDRALAVQTETVGPPVPYTRAIAHGAGWRWQIPLQTRTGNGLVYSSAHMSDDEAHETLIGALDGRPLFEPRPLRFRSGMRRLAWNRNCIALGLAAGFIEPLESTSIHLIMNAVIRLIQLFPFRGDDHGALASRFNAQSRHEWEHVRDFIVLHYHVTQRDDSAFWRDCARMTIPDSLAERIALFTKTAGAWQGQDDLFRIDSWVSVMLGQGVVPRAHHRIASIIKGQELRTSFEDLSRGIASTVRLLPRHCDFLARYCPADG

SEQ ID NO: 83121 - protein, 500 aa, unidentified
  source 1..500: note = Gammaproteobacteria bacterium
  REGION 1..500: note = tr|A0A424LQU9|A0A424LQU9_9GAMM Tryptophan 7-halogenase OS=Gammaproteobacteria bacterium TMED243; OX = 1986753 GN=CBE03_005390 PE=4 SV=1
MEHQKVHKVVVAGGGTAGWMAAASIAKLLGKTLDVTLIESDEIGTVGVGEATIPTLQTLHELLQIKEQDFVAAVQGTFKLGISFENWRDKGDDYIHSFGYTGQDCWAAGFQHFWLKGKQLGLSEEFGNYCTELVAAQDNRFAVLPNNGLNYAYHFDASLYAKFLRGIAEENGAVRKEGKIRQVEQHAGNGFISAVELESGERIEGDLFIDCTGFRGLLIEQTLHTGYDDWSHFLPADSAVAVQTESAGPPVPYTRSIAHESGWQWRIPLQHRVGNGMVFCSKFWSDDEATSKLLGNLAGEPLTDPRVIKFTTGTRRKHWNKNVIAMGLASGFMEPLESTSIHLIQRAVIRLMQMFPYDGVRQPDVDEFNNQMKFEIDNVRDFIILHYHVTNRRDTKFWRHCSSMPIPDSLQHRIDLFRETGRVFKVPTELFGENSWIQVMLGQGMEPEQYHPIVNMMDKRELDGFLKGIRANVGKVVGQLPAHQRFIDHYCKAEPPMMAR

SEQ ID NO: 83122 - protein, 498 aa, Cellvibrio sp.
  REGION 1..498: note = tr|A0A1U9NBQ1|A0A1U9NBQ1_9GAMM Tryptophan halogenase; OS = Cellvibrio sp. PSBB023 OX=1945512 GN=B0D95_11585 PE=4; SV = 1
MNSIKKIVILGGGTSGWIAAAMLAAHVRRDLCSIELIESDDIGAVGVGESTIPPVVRLITSLGIDEEDFIRETQACYKLGIKFVDWRHRNQSYFHPYGAIGQRIGSQDFYQCWLKATMAGESYPLQDFSPCSVMAAQGRFFLPSQSMNTPIGGAGYAIHLDAKLVAAYLRRYAEARGVTRSEGNYVAVERRDNGFISALVLADGRKIEGDFFIDCSGFRALLIDGAMAAGFEDWSHYLPCDRAIVVKTEAAGSRMPYTTATARKAGWSWRIPLRNATGHGYVYSSRFCTDADAKTTLLSNLDAPRINDPRLISFTAGRRLEFWKNNCLALGLSGGFVEPLESTAIHLITRGMDYFLRFFPDLECDPSLRREYSRRMGADYEEVRDFILLHYCTSERSDSDFWRWCQTMPLPDSLRERIELFKAHGIVREEHDELFRSTSWQSVFEGMGIRPAKYSPRVDNIELAQITEKLALARSAILNMVKTLPTHDEYLDHRFGER

SEQ ID NO: 83123 - protein, 448 aa, Roseateles sp.
  REGION 1..448: note = tr|A0A1H7QVY8|A0A1H7QVY8_9BURK Tryptophan halogenase; OS = Roseateles sp. YR242 OX=1855305 GN=SAMN05216359_110140; PE = 4 SV=1
MNTRHAIVVGGGTAGLIAAISLVRLAGIRVTVIRSSDIGHIMVGEGTFSSTPRLLHDVLGIPRPEFFDKVNPTWKLGIHFLWGNRPYFDFPFSFAVSHDNQILPGTEKPWGYYNLDEHLGRYTTVSNTDPAVLAKMQSGIGYHFENQRFVEYLEGFFTASGGQLLEGKVTDVVTGDHGIAYLRTADGRQLDADLFIDASGFSGRLIHGAMAEPYVPMSDRLFCDTAVVGGWRRGEDEPIKPYTTAETFSSGWCWQIEHETIVNRGYVYSSKYQTPEAAAAEYLSKNPKVDPGRLRTVPFESRRIRRAWVKNVVAIGNSCGFVEPLEATNIQLICEQSIELARLLTQEDVSKASDEYNGRVVEQWNDICDFLSLHYKFNDRLDTPFWRMAQEKTSLGKLDAYVQRYLTHGPMLYDDAAGQKYMFGADGNLAILLGMGVPWAESPAVRRR

SEQ ID NO: 83124 - protein, 518 aa, Cellvibrio sp.
  REGION 1..518: note = tr|A0A1U9N8Q9|A0A1U9N8Q9_9GAMM Tryptophan halogenase; OS = Cellvibrio sp. PSBB023 OX=1945512 GN=B0D95_07910 PE=4; SV = 1
MSNSIKKIIIVGGGSAGWLAAGLLAAEFKHAESSIEITLIESPDVNTIGVGEGTWPSMRATLRKIGISETELVRECFVSFKQGSKFVGWRTGASDDVYHHPFSIPHGYAESNLAAAWQAKFADHPFAEIVSSQFVVAEHGCAPKQVATPEYAGVLNYGYHLDAGKFAVILQRHCTANLGVKHILDHVTKVVSADNGDIAAVDTKATGIISGDLFIDCSGLSCLLLGQHFGVPFVDKKHLSLNDTALAMQVPYPEKNSPIESCTVATAQSAGWTWDIGLSSRRGVGYVFSSGYISEEQAERELRAHIAKSVGAAVADSLSSKKLSIRAGHRQEFWHKNCVAVGMSAGFIEPLEASALALVELSMNMICEEFPVDRSAMSVVAKRFNEVFCYRWERIIDFLKLHYALTERRDSDYWRDMSSPEALPDRLRELLVLWKSRPPHRNDFIQVEEIFPSASYQYVLYGMGFKMDASALPRTSDNLPTALARIRETAEKTRKFLAGLPSNRDLIDHVMLHGMPLI

SEQ ID NO: 83125 - protein, 447 aa, Streptomyces yokosukanensis
  REGION 1..447: note = tr|A0A117PZL7|A0A117PZL7_9ACTN Tryptophan halogenase; OS = Streptomyces yokosukanensis OX=67386 GN=AQI95_34940; PE = 4 SV=1
MAKETTDVVVIGAGPAGAVSAYVLAKQGHSVVLLEKETDPRFHIGESLLPYMMGLFERIGLRDVVASQGYVPKFGGEFIDPTEKKFFEGVFRADFTKQGPGRHDNAFQVERRRFDRMLAEQAEAAGAQVVFGAHVNELLMEGDRMVGVRYERDGESHEVRSTYVIDASGRTGKIAHRFGLRKTLEKLRMVAVFRHYTGLDESHNLGVEGDIQVAAHDDGWVWAIPLSKDTISVGTVMPRDVLRASTPEKVFEEHLARVPRIVSRLTGTQPSMDFKIETDYCYHTDTVTGPGWLMVGDAGCFGDPMFSGGVLVATATAVRAAETLGEALADPSAEERLLDRYAGYFKTGYDTYIRLIHAYYDGELVAMAADAARSTDRDTLEKYLIRLIGGDFWSEHNSVAQEMRRRKEWDTFEPFQRVYGCPSYPHLDEVDRKERSESRVRRVTAGR

SEQ ID NO: 83126 - protein, 478 aa, Streptomyces sp.
  REGION 1..478: note = tr|A0A014MEF1|A0A014MEF1_9ACTN Tryptophan halogenase; OS = Streptomyces sp. PRh5 OX=1158056 GN=Z951_25695 PE=4 SV=1
MNSAGQSDYDVVVVGGGPGGSTLSTLVALQGYRVLLLEKEEFPRHQIGESLLPSTVHGICRLLGVTDELANSGFMKKHGGTFRWGLNAEPWTFDFSVSEKFSGPTSYAYQVERMKFDKILLDNARSKGVDVRERSEVVGVLEEEGRICGVRYDDAEGVRREVRARFVADASGNKSRIHKRIGGARKYSDVFQNIALFGYFTGGRRAPAPWTGNITCASFDLGWFWYIPLSDELTSVGAVLRREALARLQDGPRDKVLEGLIDECPLIADYLSEAERVTEGPYGQVRVRKDYSYIQENFWRPGMVLVGDAACFIDPLFSSGVHLSTYSALLAARSINTTLRGAIDEAYCFREYETRYRREYDVFHDFLVAFYDLQKDEHAYFRKAKSVIGSSAPAAESFAELVGGGASNEEALIGTAPSVSQERRADLLERSRKIHWQGSRVQVQALFGESVGDAPLYEGGLVESPDGMHWAHPEQPAS

SEQ ID NO: 83127 - protein, 509 aa, Shewanella sp.
  REGION 1..509: note = tr|A0A3S9L4F1|A0A3S9L4F1_9GAMM Flavin-dependent tryptophan halogenase RebH OS=Shewanella sp. TH2012; OX = 1965282 GN=rebH_2 PE=4 SV=1
MTEKHSAITSVLIVGGGSAGWMSAALLARVFKGRLAITLVESSEVGTIGVGEASIPPLTLFNQALGIDEAEFLRHTQGSIKLGIEFQGWGDKHSCYMHAFGAMGKDLGLIPFHQLWLKRFLGSGDTGNSANPASDFWRYSLNSQAAKANRFAPMAQIHGTPLSGLTHAYHFDAGLYGAFLKDYSTARGVTHIEGHIASVDLEHSHHERRIASVSLTNGEVLSADFYIDCSGMKALLIEEALGAGFDDYSALLPCNRAIAVPSERTEPLTPYTQSIAFEAGWRWRIPLNHRTGNGVVYSSEFISDDEAEARLLASLDGKPLGEPRRIRFTTGRRKQQWAGNCVAIGLSSGFLEPLESTSIHLVQSALLQLVRFFPASSDFKASRDGFNRASQQEFEEIRDFILLHYVLNRRDEPFWRARAALTLPESLARRMALFAENGSLERHSDELFSALAWQQVLLGQGLVPISHAPIADTVPGPELAEYLENIHKIQQRALSSLPLHSEFLAKLSR

SEQ ID NO: 83128 - protein, 498 aa, Cellvibrio sp.
  REGION 1..498: note = tr|A0A1U9NEE8|A0A1U9NEE8_9GAMM Tryptophan halogenase; OS = Cellvibrio sp. PSBB023 OX=1945512 GN=B0D95_16805 PE=4; SV = 1
MQKPQKIVIVGGGTAGWMTANLLAARWGGIEIGLLESSDIGIIGVGEGSTPHLKFFFDEVGIEESEWMPRCNATYKNGISFVNWSSIPGFESYFHPFPAQTDDIFTVPAFLSSIHARMQGYNVNAHPDSYFLETYITQKNLGPIPTENFPFGVAYGYHFDSGLLGQYLAEKAVSRGVKRIFGTVTEVLMNESGELSSVRLDDDSQLAADFFIDCSGFKSLLLQSALKVTYKSFKENLFNNAAVVMPTAMAEIIPPETKSTALSNGWAWKIPLTNRFGNGYVYSADYITPDQAEAELRQHLGMLDSDVAARHLQMKVGRVEKHWAKNCVAVGLSQGFIEPLEATALALSFNTVSAFIKCYEKGAYTNQYEDEFNKEMNARFDGVRDYIVCHYKANQRKDTDYWKDNAANTHLSDVLKQVLHFWQAGGDFAKNMYANNLIGSYQPKSWACLLAGYGVFPPLRASENDDHYKSLHDMAQLADFIRRCGLNFKKHNELLRLT

SEQ ID NO: 83129 - protein, 496 aa, Cellvibrio sp.
  REGION 1..496: note = tr|A0A1U9NBW5|A0A1U9NBW5_9GAMM Tryptophan halogenase; OS = Cellvibrio sp. PSBB023 OX=1945512 GN=B0D95_13540 PE=4; SV = 1
MHANSVKRLVIAGGGTAGWMAAAAFAKKFGELLEITLVESDEIGTVGVGEATIPPMRVFHKLLGIDEQEFMRATKATFKLGISFENWARQGDKYIHSFGKTGKETWLGDFHHFWLRSRELGMDFEFGDFCLEFQAAQANKFFTGPGADINYAYHLDASRYATFLRAMSEKYGAKRIEGKVIEVKQDHDTGFISALVLASGVVVEGDFFIDCSGFRGLLIEQTLRTGYEDWSQWLPCDTALAVQTESVGPAVPYTRAIAHHAGWQWQIPLQHRVGNGLVYCSNFMTDEEARATLLQNINGPRVNEPRLIKFRTGRRRKSWNKNCVALGLASGFIEPLESTSIHLFIMAITRLMRFFPFSGVEPVLVDEYNRETLAEIEPIRDFVIMHYKATERDDSPFWRYCRNMEVPATLAHRMKLFKKTGHAYQAQGELFRIDSWTQVLFGQRVMPEQYHHIAQLMSEQELRQFLMRMKESIRDATEKLPLHEEFVRQYCRAQME

SEQ ID NO: 83130 - protein, 508 aa, Nostoc sp.
  REGION 1..508: note = tr|A0A318BBB2|A0A318BBB2_9NOSO Tryptophan halogenase; OS = Nostoc sp. 3335mG OX=2204170 GN=DMC47_21595 PE=4 SV=1
MIDDNRLRHILIVGGGTAGWMTAAALSRFLVDGFTKVTLIESDAIGTVGVGESTIPQIRIFNRLLNLDEDDFVRRTKATFKLAIEFVDWRRIGDRYYHPFGPYGVDMGGVSFHPYYLRALKEGHGGRLDEYSLQSLGAADAKFSRPVPDAGNSPLADIAYAFHFDAGLYASYLRDYAEARGVVRREGRIADVAQHAETGFVESVTLEGGETIEADFYVDCSGFRGLLIEQTLKAGYEDWSHWLMNDRAVAVPCTLGGSLNPVTRATARPAGWQWRIPLQHRLGNGHAYSSVHMSDDEATALLLANLDGEPLADPLALRFTAGRRKKSWDRNVVAIGLAAGFMEPLESQSIHLIQVGISRLMTLLPTRSMGQPEIDLYNRWMTWEYEKIRDFLILHYHATERDDTPYWDHCRTMEVSDYLKEKIAIFRSTGRVFREHDELFNDTSWFAVMMGQGLTPGRYDPIVDEMPEPVFLDRMSQIRRAIRNSVDWMPNHFDFIAKHCASEGFTRP

SEQ ID NO: 83131 - protein, 503 aa, Cellvibrio sp.
  REGION 1..503: note = tr|A0A1U9NDP9|A0A1U9NDP9_9GAMM Tryptophan halogenase; OS = Cellvibrio sp. PSBB023 OX=1945512 GN=B0D95_16795 PE=4; SV = 1
MQNNLNSICIVGGGTAGWMAASLLSSSLQGTGIKITVVESPDIAIIGVGESTVPSILEFLRVCRINLKEFVQATSASFKLGIRFEDWLKPGEHYFHPFGRVGQDLHGFEFYQAWLKTCADGHVSRWVDHSPCAIMAENHRFMLRPPQEQNWVLRNTGHALHFDAVLVARYLREFSLARGVERIEATVDNVIVDERQFISALELNNGTTITNDFFVDCTGFKGLLIAEALNVGYEDWTHYLPCNRAIAVQTTNTGEPSPFTTATAREAGWTWKIPLQHRTGNGYVFSGEHCSDEKAIDTLLKAVDGELLIEPRVIPFTTGRRKKVWHNNCLSVGLASGFLEPLESTAIHLVYKVLLRFISHFPDKDFDLRVEQAFNQKINLDYQEVRDFIILHYCTTNRDDTEFWRWCQNMPIPDSLNEKIHLFRERGELEHSYGQFFSQDSWCSILEGMNVRPKKYHPLMDGFDSQGLAKTLRENVQDIYSTVMQMPKHGDFIRQHCAAKKVL

SEQ ID NO: 83132 - protein, 530 aa, Sphingomonas sp.
  REGION 1..530: note = tr|A0A4R1U623|A0A4R1U623_9SPHN Tryptophan halogenase; OS = Sphingomonas sp. PP-CC-3G-468 OX=2135656; GN = C8J41_102930 PE=4 SV=1
MAGRLTPPRICPAMAAPDGFEAGTRTMANHPLRIVIAGGGTAGWMAAATFARFLETGYEIDLIESDAIGTVGVGEATIPQIHLFNDALGLDEDAFLRATGGTFKLGIEFVDWFKPGHRYMHAFGDVGRDVGLLPFHQYWLRARSLGLAGDLGAYSLNTHAALAERMQRGPARTARTLPSMPYAYHFDAGLYARYLRRYSETRGVNRIEGKIVRVTRDGESGDVSGLVLENGTTVAADLYIDCTGFRGLLIEEALATGYEDWTHWLPCDRAIAVPSARSEKFTPYTRSTAHAAGWQWRIPLQHRIGNGVVFSSAHMSDDEATATLLAGLDTPAMADPRTISFRTGRRRQMWNSNVVALGLAAGFMEPLESTSIHLIQSAISRLLKLLPGRVIADADRTEFNRQSDFEYERIRDFIILHYKATARDDTPFWRQCRDMAVPDTLAAKIDLWRGNGHIVREHEELFTEVGWLQVLAGQGIMPTGHHPLADAISTSDLGEFMDTIDKLNAREAGQMQDHAAFVAQHCASPAGLGA

SEQ ID NO: 83133 - protein, 504 aa, Cellvibrio sp.
  REGION 1..504: note = tr|A0A1U9NBL8|A0A1U9NBL8_9GAMM Tryptophan halogenase; OS = Cellvibrio sp. PSBB023 OX=1945512 GN=B0D95_11375 PE=4; SV = 1
MHDNNIRRIAIVGGGTAGWMTAAALSKLIKPDYCQIRLIESEDIGTVGVGEATIPQIQLFNKLLDLDENEFVRKTQGTFKLGIQFVNWKKIGHKYIHAFGEVGKDMEGVQFYHYWLKMRAQGKAEELDNYTIGGLASDRGKFMRPIDAGNSPLSNIAYAFHFDAGLYARFLREYSEARGVLRTEGKIVDTILRASDGFIESVQLASGERVEADFFIDCSGFRGLLIEQALNTGYEDWAHWLPCDRAWAVPCESVGEPTPYTRSTAHSAGWQWRIPLQHRVGNGHVFSSRFMSEDEACSILLNNLDGKPLAEPRLLKFVTGKRKKVWNKNCVAIGLASGFMEPLESTSLHLVQSTIARLMSFFPNKSFDQEDIDEFNRQASFEVEKIRDFLILHYHATERNDSDFWNYCRTMSIPEDLTQKIEQFKKNGRIYRNNTEMFNELSWFEVMHGQGIHPHAYHPLVDRMSNDEIAKRLEGIRGVIEKSVDYMPTHAEFIAEHCKAIKIY

SEQ ID NO: 83134 - protein, 498 aa, Nostoc sp.
  REGION 1..498: note = tr|A0A318B3T8|A0A318B3T8_9NOSO Tryptophan halogenase; OS = Nostoc sp. 3335mG OX=2204170 GN=DMC47_24150 PE=4 SV=1
MAAAIERVVIVGGGTAGWMTAALIAKVIGPQLRITLIESDDIGIIGVGEATIPPIQHVNAVLGIDEAEFLRETRATIKLAIRFDDWGAIGQSYYHSFGAAGRNTAFCSFHHYWTRAKRAGIAADYWDYDLNYLCAREGKFAKIQVDDPLWHLPYAYHFDSALYGRYLRRYSEARGVERVEGLVERVGRDGETGHVTALTLRGGREVAGDLFIDCSGARGLLIQLQLNVGYEDWGHWLPCDRAMAVPTARHDETPPYTRSTARSAGWQWRIPLQHRVGNGLVYSSRHLSDDAAADLLLGNLDGAVLADPRIIPFRTGRARRQWDRNVVAIGLSSGFLEPLESTSIYLIQSAIVRLLHLFPHAGFDERQIAEYNRQSRIEFETVRDFIILHYHATRRDDSDFWHHVRTMALPDRLADKIALFRATGTLTQDPLDIFMEASWVQVLMGQGIEPADYHPLADGPTDAELAEQLRQLAAMKREPVPNMPGHDRWLRGFGGAMA

SEQ ID NO: 83135 - protein, 490 aa, Nostoc sp.
  REGION 1..490: note = tr|A0A318BJM8|A0A318BJM8_9NOSO Tryptophan halogenase; OS = Nostoc sp. 3335mG OX=2204170 GN=DMC47_08150 PE=4 SV=1
MNSAPISRVVIVGGGTAGWMAAAAASRFLDDGQRTITLIESDAIGTVGVGEATIPPIRGFNARLGIDEAEFLRATGGTAKLGIEFVNWGNRGDRYIHPFGTHGRDIQGLNFHQLWLRLRDEPGIGEIEDYSISAVAARAARFAPPVSDPRSPLSRIEYAYHFDAGLYAAFLRRRAESQGAQRIEGRIIGVEQDERGHVSAVRLEGDRRVEGDLFIDCSGFRSLLLGETMGVGFEDWSHWLPCDRAIAVPTERTRPLLPYTRATAHDAGWQWRIPLQHRTGNGHVYSSAFVSDDDAERVLTANLDAPATGELRRLSFKAGRRERMWSGNVVALGLASGFLEPLESTSIHLIQDGISKLFALFPDMRFTDIERNEFNRLMGNQYAAIRDFIILHYCATQRDDTPFWDHVRTMELPDTLAHKIALFREKGRVFRYDDELFSIPSWVAVMLGQGIMPTGYDPVVDALDADRVAAELRQMRAGYAAAAQKMPLAG

SEQ ID NO: 83136 - protein, 510 aa, Sphingomonas sp.
  REGION 1..510: note = tr|A0A4R1U6N5|A0A4R1U6N5_9SPHN Tryptophan halogenase; OS = Sphingomonas sp. PP-CC-3G-468 OX=2135656; GN = C8J41_102933 PE=4 SV=1
MIDGLGQHIVILGGGTAGWMTACLIAHRWRDRGVRVTLVESPEIGIVGVGEGSTPQLKHFFDTLDIKEAEWMSACDATYKLGIGFDGWSDREGHERYFHPFPTALDGHTAPQFFYNSRARRTGRNVDAHPDQFLLPARLAAAHRAPQPAANFPFEVSYGYHFDAYKVGAFLAAHATETLGVVHLQRRIASVERALTGEITALIDTDGGRIAGDFFIDASGFRSTIFGALDVPFVSYADALFNDRAVVMPTAHNTGAPIPSQTRATALSAGWAWHIPLTSRNGNGYVYSSRHLTEAQAEAELRAHIGAEAGGARHLKMRVGRVRDSWSHNALAVGLAQGFLEPLEATALHLVIATVEAFLDMVDHGGATDAVRTAFNTRIAARYDGVRDYIVAHYRLNQRHDDPTGYWAEARGVDVLSDDLKMLMSTWFTGADIVAAIDRAGLGRYYSATSWHCLFAGYGTFPDAARLIPPGADIDPIDLPKIDDFLTRCASNFRSHASRLRAAADHKDHV

SEQ ID NO: 83137 - protein, 523 aa, Cellvibrio sp.
  REGION 1..523: note = tr|A0A1U9N7P1|A0A1U9N7P1_9GAMM Tryptophan halogenase; OS = Cellvibrio sp. PSBB023 OX=1945512 GN=B0D95_05870 PE=4; SV = 1
MADHVTRVVIVGGGSAGWLAAGIIAATSPNHVQVSLIESPDVAPIGVGEGTWPTMRATLQSMGISETDFFRECDASFKQGSKFSRWTSLSKDDDYYHPFTLPAKYHEINLAPFWLPFKEKIPFASAVCPQAAVCDLGYAPKQITSPEFSAVLNYGYHLDAGKFAPFLHKHCVEKLGVNYISANVTVINSHENGDIRSVNTDTQGEVVGDLFVDCTGLSSMLLGQHYKVPFVSQQHVLFNDSALAVQIPYIENADAIASHTLSTAQTNGWIWDIGLQSRRGIGHVFSSRYTTDELAERELRNYIAPSVGEKMAEELSVRKISFNPGHRDTFWHKNCVAIGLAAGFIEPLEATALVLIEISAKMIAEQFPVNRSTMDIVAKRFNNTLGHHWRRIIDFLKLHYVLTKRTDTEYWRDNCLAGTIPDSLQELLALWKVQSPWLHDEMRREEMFPSASYQYVYYGMRGMTESAGVDRYALGGKPLCDRKLRKAEALFMENAQHIQQLRKILQPNRELIEKIKLYGLQTI

SEQ ID NO: 83138 - protein, 507 aa, Rhodanobacter sp.
  REGION 1..507: note = tr|A0A1V3Q3U2|A0A1V3Q3U2_9GAMM Tryptophan halogenase; OS = Rhodanobacter sp. C03 OX=1945858 GN=B0E48_06520 PE=4; SV = 1
MTDPRIKNIVIVGGGTAGWMAAAAFAKVLGPAYSIRLVESEEIGMVGVGEGTVPHLKLFNDLLGVHDIEFMQNTQGTFKLGVQFNDWGRLGDSYIHGFGTIGHDVSLLPFHQFWIKAMQKGVASEIGAYSINTLAAPRGKFMTSATDVPASSPLADIAYSYQFDATLYAKFLRGYAEKRGVRRTEGKVAQTVLRPDDGFVEAVVLESGERIEGDLFIDCSGFRGLLIEQALHTGYIDFTHWLPCDRALAVACEKVEEPTPYTRSSARPAGWQWRIPLQHRTGNGYVYSSAHVSDDEAAATLLKHLDGKPLGDPRLLRFTTGVRKKSWNKNVVALGLASGFLEPLESTSIYMIQSGIARLLNLFPQRDFSEVVVDRYNAQAKFEYEHIRDFLILHYHATERDDTPFWNQCRTMSIPAQLQDNIRLFRDSGRFFRDAEEMFATTSWVQVMLGQRIVPRGYHPLVDQMPDQELAKFMAGVGQVVASCVDAMPSHQAFIDRHCVAPSLAVA

SEQ ID NO: 83139 - protein, 496 aa, Streptomyces yokosukanensis
  REGION 1..496: note = tr|A0A101NJV3|A0A101NJV3_9ACTN Tryptophan halogenase; OS = Streptomyces yokosukanensis OX=67386 GN=AQI95_43495; PE = 4 SV=1
MQVEDDHEFDVVVVGGGPGGSTVSTLVAMQGYRVLLLEKEEFPRYQIGESLLPSTVHGICRLLGVSEELEKAAFMPKRGGTFRWGSSPEPWTFSFSVSATFSGPTSLAYQVERMKFDQILLDNARDKGVEVREKSSVVDVIEEDGRVCGVLYSDVDGVRHEVRSRFVVDASGNKSRIQSRIGGTRHYSDFFQNIALFGYFEGGKRLPAPNSGNILCAAFNSGWFWYIPLTDELTSVGAVLRREALERVQGDREKALMGLIEECPLIAEYLSEARRVESGPYGEVRVRKDYSYCQDTFWRPGMVLVGDAACFIDPVFSSGVHLATYSGLLAARSINSSLSGDFEEKKCFEEYEARYRNEYSLFHDFLVAFYDMHQDEDSYFWTAKKVMNSSAPGLESFVELVGGGASHEGGLVNAASYTEQRESTFREFSELVDRPAGESGTDRDLFDSMLVQSVLEEGAKIQVHAALGEAVDDEGPMREGGLVPSADGMRWADFGY

SEQ ID NO: 83140 - protein, 598 aa, Microcystis aeruginosa
  REGION 1..598: note = tr|A0A552DRY0|A0A552DRY0_MICAE Tryptophan halogenase; OS = Microcystis aeruginosa Ma_SC_T_19800800_S464 OX=2486257; GN = EWV81_12990 PE=4 SV=1
MVATNTNEYDVVIMGAGFAGVCQARHLLLNVPNIKIALIDPRPEERTNKDLKIGESMVEIATLFVCKELGLYEYMIENHPPKFGLNFHWPKKKEKTTTTDDYYHIWNNRQPPLASFQMNRARFERDLLKMNKAMGATFYQGRVVDVDLTSKDELKTVIAKVENEQITLKAKHVIDAAGRKFIIGKKTDNLLFGADNLFGLDTGSVWVRVNNIDRTIFHDGYDPYGTTCSHYYATNHWFGHGHWLWMIPTEKDSQEISIGIAYHRSAIADHQINTKEKFYDFLKANHEILYRLVNSGENIDFHYLPRPSHTSKTMFSADNWYVIGDAACIFDPFYSLGSSMISYQIECTTEIIRSKLVGEAIGEKKQAAYNDFILTYTRFNNHLIKHHDKQLGNASIMSWRIYHDYIWWFGVQVPMYTGKWFLDLDFLARYTLGLKEHQTGYCEHLYQQFNEVIKQGKNLGFMDCYRGDQLWRDYHTLKHFDNFVENTKLEPKRSNVFASMKWTNFYTAIWYAKFLWKGFGWRGFLNGKNLYYLAEHFVHMLQAMIGEMFYKHFTKGIPDNSQIELTRQEFTNYRYRPQLNTWVTESVAKSPEKVPVNV

SEQ ID NO: 83141 - protein, 538 aa, Burkholderia ubonensis
  REGION 1..538: note = tr|A0A105YSW6|A0A105YSW6_9BURK Tryptophan halogenase; OS = Burkholderia ubonensis OX=101571 GN=WK95_22430 PE=4 SV=1
MSNPIKNIVIVGGGTAGWMAASYLVRALQQQTNITLIESAAIPRIGVGEATIPSLQKVFFDFLGIPEREWMPQVNGAFKAAIKFVNWRKPPERSRDDHFYHLFGSVPNCDGVPLTHYWLRKRELGFQQPMEYACYPQPGALDGKLAPCLPDGTRQMPHAWHFDAHLVADFLKRWAIERGVKRVVDEVVEVHLNERGYISSLSTKEGRTLEGDLFIDCSGMRGLLINQALKEPFIDMSDYLLCDSAVASAVPNADARVGIEPYTSAIAMNSGWTWKIPMLGRFGSGYVFSSKFTSRDQATADFLNLWGLPDNQPLNQIKFRVGRNGRAWVNNCVAIGLSSCFLEPLESTGIYFIYAALYQLVKHFPDTSFDPRLTNAFNAEIVHMFDDCRDFVQAHYFASSRDDTPFWLANRHDLRLSDAIKEKVERYKAGLPLTTTSFDDATYYETFDYEFKNFWLNGNYYCIFAGLGLLPDQSLPLLRHRPESIDKAEAMFARIRREAERLRTSLPTNYDYLRSLREGDAGLPRSQPGPTLAAPEIL

SEQ ID NO: 83142 - protein, 522 aa, unidentified
  source 1..522: note = Deltaproteobacteria bacterium
  REGION 1..522: note = tr|A0A2E9KXK4|A0A2E9KXK4_9DELT Uncharacterized protein OS=Deltaproteobacteria bacterium OX=2026735; GN = CL921_00150 PE=4 SV=1
MQIRNVLIVGGGTAGWMTATALVKLCPHIQVSLIESKDQPIIGVGESTLGQINDFFALLDLKDEEWMKETGSTYKSNIRFTDFYKKGETWDYPFGKSTIVNDLPHGWMSWFALNIEKPEKFTRDTFARSMNIIGHLAYANKLTRCDKFPFDHDTAYHMDAVKFGQWLRDNRCQEVNHMYGHITGCVKDEHGNIDILYAGSKELKYDLYIDCTGFNSVLLEGIMNVPFKSFHVNEGGCLLNDTAVTCHMPHEQPEIEVTNTTTCTAIDNGWVWDVPLWQRSGCGYVHSKDFAKNPEEELYQYLVRRSGKTRADQAKFRTVPFRNGKHEKAWEKNVVAVGLANCFVEPLEATGLLTTHEQIIRICNTLKGREGFVPKVEADMLNLVNDLEIEGFKNFIAAHYAFSARETPYWQTVANDVEYDFTTASLDNLFVKYSSEKHVTYEWSGDQNYNDGLRYIGAGMGFNPLNKHTLKLTRLQNQLSEAADKIELDKAELLFDGWNKAMYHWCDDLPSSYEFQKQTIYS

SEQ ID NO: 83143 - protein, 505 aa, Xanthomonas translucens
  REGION 1..505: note = tr|A0A1M4IQ16|A0A1M4IQ16_XANCT Tryptophan halogenase; OS = Xanthomonas translucens pv. graminis OX=134874; GN = XTGNCPPB3709_3308 PE=4 SV=1
MIAAPLRNLVIVGGGTAGWMAAAALARVLGPDYRITLIESEQIGIVGVGEATVPHIKAFNNLLGINEAEFVRQTQGSFKLGIEFVDWHRPGTSYIHGFGTEIGHSLGLLPFQQYWFKQALAGKAKPLGAYTLNTVAARRGKFMTSASDAPPNSPLGNIAYAYHFDASLYAAFLRRFSEQRAVTRREGIVEQVQLHPESGDVLSVRLASGDTIAGDLFIDCSGFRGLLIEQALHTGYHDFTHWLPCDRALAVPCAKVGPPTPYTRATARAAGWQWRIPLQHRTGNGYVYSSVHISDDEAAATLLANLDGAALADPRPLRFVTGRRKQVWNRNVVALGLASGFMEPLESTSIHLIQSGISKLLELFPREGISPVLVQRYNDRIAFEFDRIRDFLVLHYTATERDDSDFWRQCRAMAITPELQATLDLFGDSGRFYRNGDEMFAEISWVQVMVGQGILPRAYHPLVDQVPAADIERFVASIEQTIGHCVDAMPPHQAFIDRYCAAAPR

SEQ ID NO: 83144 - protein, 509 aa, Stenotrophomonas maltophilia
  REGION 1..509: note = tr|A0A1A6Y0Q8|A0A1A6Y0Q8_STEMA Tryptophan halogenase; OS = Stenotrophomonas maltophilia OX=40324 GN=A9K58_06290; PE = 4 SV=1
MDTASATEGRVRKVVIAGGGTAGWLAGCALSHQFRDQLDITLVESEQIGTVGVGESTVPPIRTFHRFLQIDEQEFLRAVAGTFKLSISFENWRVPGDRFFHPFGTIGQGTWAAPFHHYWLDSLRRGMASDLGDFSVESVASRGDRFSLQTQPQASYAYHFDAGLYARFLRGKAEGHGLRRVEGRIAEVRQHAHDGSVQSLVLEDGQVIEGDLFIDCTGFRGVLTEQALHTGYEDWHEWLPCDRAVAVQTESIEPPVPYTRAIAHEAGWRWHIALQHRVGCGLVYASRHMSDDEAQARLLRDVGAPPLREPWRVPFRSGRRLKAWNRNVVALGLASGFIEPLESTSIHLTISAVVRLIQLFPFDGIRDSLVELYNDVSRQEMEHVRDFIILHYHATQRDEPMWKACREMAVPASLQNRLRAWRDRAHAWQDPGELFRVESWASVLLGQGIQPGSPHPLARALSDADLRTLLKGIQRPVQQAVAQMPSQAAFIDGYCRSAPQVWRTGMAMA

SEQ ID NO: 83145 - protein, 505 aa, unidentified
  source 1..505: note = Sapientia aquatica
  REGION 1..505: note = tr|A0A4R5W2D3|A0A4R5W2D3_9BURK Tryptophan 7-halogenase OS=Sapientia aquatica OX=1549640; GN = E2I14_08530 PE=4 SV=1
MTQQPSSPAATKPIRRVVIAGGGTAGWSVAAAISKVLGKILDITLIESDEIMTVGVGEASIPAMLAFHNLIELNEQEFMAATQATFKLGINFENWRDVKQDYFHSFGHTGIDHWTAGFQHFWHKGVERKLASDFGDYCLELKAAMAGRFAHLPNNKLNYAYHLDATLYAKYLRKMSESFGIKRMEGKINKVETDAATGHITSLRLDSGVNLEADFFIDCTGFRALLIGDAMKVGYQDWSNWLFCDSAVAVQTESVADAIPYTRSIAHEAGWQWRIPLQHRVGNGLVYSTKYINDEDAQKTLLANIQGPLVTQPRIIRFKPGQREATWRGNCVALGLSSGFLEPLESTSIYLIQRNVIRLLQMFPTNGISPTDVAEFNRQSDQEMEHIRDFIILHYHVTNRRDTQFWRDCSSMSIPPSLQHRIDLFRETGRVFRAPNELFAENSWIQVMLGQGIMPQQHHQSADLMGDAELSGFLNNIRSNVSKTVAQLPPHLDYVKRYANGQMRK

SEQ ID NO: 83146 - protein, 506 aa, unidentified
  source 1..506: note = Metallibacterium scheffleri
  REGION 1..506: note = tr|A0A4S3KKC0|A0A4S3KKC0_9GAMM Tryptophan halogenase; OS = Metallibacterium scheffleri OX=993689 GN=B1806_11825; PE = 4 SV=1
MQKPALESVAILGGGTAGWMAAALLAKALGSRVRIALVESADIGTVGVCEATIPQIRHINAFLGLDENAVMRAAQATFKLGIQFNDWLRPGHSYIHAFSDIGLPYGLLPFQQYWLRARALGQTHGLWAYSINAQAAAQNRFARMERVGSSPLTGVRYAYHFDAGLYAQHLRGVAESLGVVRHEGKVAHVEQRPEDGFIDALVLESGARIAAELFIDCSGFRALLIEGALRAGYDDWRRWLPCDRALAVASARVTPLRPYTQANARTAGWQWRIPLQARSGNGHVYCSEFISDDEAASVLLANLEGPALGEPRALRFTTGMRKQTWLRNCVALGLAAGFMEPLESTSIHLIQSGISRLLSLWPDRDFDPALRDEYNRQTRFEYERVRDFLVLHYCTTQRDDTPFWRHCAHIDLPDGLARKLALFRANGQIVRDGDELFAEVAWLQVMVGQGIEPQRHHALADGMEVARLDEFLGGMRMLIKRAVAGMPTHAQYVAEQCPASAQSATR

SEQ ID NO: 83147 - protein, 514 aa, Sphingobium sp.
  REGION 1..514: note = tr|A0A2A3MSG0|A0A2A3MSG0_9SPHN Tryptophan halogenase; OS = Sphingobium sp. D43FB OX=2017595 GN=SxD43FB_16505 PE=4; SV = 1
MVHPVRNIVIVGGGTAGWLTAGIIAARHRTRIGQGFSVTLVESPNTPIIGVGEGTWPTLRTTLSRMGVSESDFFRECDAAFKQGARFDRWTTGAVDDGYYHPLMLPQNFGQVNLAPHWLASNQGESFCDSVSAQGRICDDGLAPKTIATAEYDALANYAYHLDAGKFAPFIQRHCCETLGVRHVLADVEQVLMHENGDIRAIQTAQAGEIEGDLFVDCTGFKALLIEGAMNVPFKDCNDVLFCDTALAMQVPYEQPDSPMASHTISTAQTSGWIWDIGIQTRRGVGHVFSSSHISDEEAERELRAYIGPAADGLNARKIKIRSGHRETFWKGNCVAVGLAAGFLEPLEASAIVLIELSAKIIAEQMPACREVMDIISSRFNATTHYRWGRIIDFLKLHYVLTKRTDSDFWRDNVRDETIPDRLKELLLLWRYQSPWFHDEFDRVEEVFPAASYQYVLYGMGYHTEVDPASLSRDHRLADRARRENAALTDKLCAGLPRHRDLINKIVAHGLPPV

SEQ ID NO: 83148 - protein, 466 aa, Sphingomonas sp.
  REGION 1..466: note = tr|A0A4R1U7G5|A0A4R1U7G5_9SPHN Tryptophan halogenase; OS = Sphingomonas sp. PP-CC-3G-468 OX=2135656; GN = C8J41_101476 PE=4 SV=1
MSQTVAILGANLCGWMTAAALARRLPRDAYRVVVIDDGTTGDGLGDFAPVIAVPPALGGFHADLGIEPTALVRATGGGHALGVAFGGWRKDGAAAFLSYGETGAPLQGIAFHQLGGRLRKDGIHVRLADYAPSAVAAQSGRFALEAPIAHALHLPVERYTAVMRAAAMNFGASCANAPFADAQIDANGIVETLELTDSTSIAPLLVLDCSGSSARIASRTAPAFEDWSAWLPCNRTHTQTLSATGAPPPYTQVDAQGSGWTATWPLGGADVRLTCAAGGEGTPFRAGRRVEAWRGNCIALGAAAGLIEPLHPTALTVLLRSLAQLIQLWPAERRAPVEAKAFNRFTANAMTGARNFVIAQKAAGRGSNAIGDEPGGTMLPDAVEAKRTLFAARGRLPMFDDEPFEEEDWAAMFDAMGLMPRRYDALADALPLATIQQHFADHRARIIAQVRALPPYAHAMAELAAA

SEQ ID NO: 83149 - protein, 504 aa, Cellvibrio sp.
  REGION 1..504: note = tr|A0A1U9NEU4|A0A1U9NEU4_9GAMM Tryptophan halogenase; OS = Cellvibrio sp. PSBB023 OX=1945512 GN=B0D95_20010 PE=4; SV = 1
MNKPIKKIVIAGGGTAGWMSAALLTKVLKQRVDIELVESEEIGIIGVGEATIPPIQTFNSVLGVDEAEFLRETKATIKMAIRFDNWKQQGHSYYHTFGAPGATIGFSAFQHHWLRARQQGLNTTIWDYDLNYLCCEAGVFGKFDGKDPMYQMPYAYHFDSALYGRYLRKRSEQAGVVRTEGKIRAAHLNPDTGFVQSLLMEDGREIHGDLFVDCSGMRGLLIQGALHTGYEDWNHWLPCDRALAVPSERFEKTLPYTRSIAHKAGWQWRIPLTHRNGNGLVYSSQYLSDDEATNTLLNNLDSAALADPKPIKFRTGRTLQQWNKNVIAVGLSSGFLEPLESTSIHLIQSAVVRLLKNFPNRGISQAQVDEYNRESKLEYETVRDFIILHYHANERDDSDFWRNLRTMDIPDRLAHKLALFRETGTLFNDHGDIFLDSSWLQVMLGQGIMPRDYHPSADILDAAQLQSMLARIAAAKRQPLTQLPTHDAFLQHYTGVVSAGVHRG

SEQ ID NO: 83150 - protein, 449 aa, Polaromonas sp.
  REGION 1..449: note = tr|Q127S0|Q127S0_POLSJ Tryptophan halogenase; OS = Polaromonas sp. (strain JS666 / ATCC BAA-500) OX=296591; GN = Bpro_3311 PE=4 SV=1
MTEQSSPTPSFPETLSECDVLVIGGGPAGATAGALLAQRGHKVVVLEKEHHPRFHIGESLLPANLPLFEKLGVADAVKAIGMEKWGAEFVSPWHEAKSQTFKFGDAWDKSMPFSYQVRRSEFDEILIRNAARLGAEVIEGCRVKDVAFAADHGSATVHAQHEDGRTQHWRARFVVDASGRDTLLGKQFDVKRRNPKHNSSALYGHFTGAIRHPGQDEGNITIFWFEHGWFWLIPLADGFTSIGAVVWPHYLKSRTKPVRDFFLDTIAMCPALSERLAHATLASEVEATGNFSYACDRTHGPNYVMIGDAFTFIDPVFSSGVMLAMQGGFVGAETVDTCLREPAKAASALAHFDQQVRLGPKEFSWFIYRVTNPTMRDMFMAPSNVWRVKEALLSMLAGDIFGKTPIWGSLAVLKGIFYIASALNFKRSWQAMRLRKANIRVVDGPGLAR

SEQ ID NO: 83151 - protein, 491 aa, unidentified
  source 1..491: note = Proteobacteria bacterium
  REGION 1..491: note = tr|A0A1W9HBK2|A0A1W9HBK2_9PROT Tryptophan halogenase; OS = Proteobacteria bacterium SG_bin6 OX=1827383; GN = A4S16_02840 PE=4 SV=1
MRIVVLGGGTAGWMAANLFATAWPQARVSVIESPEIGIIGVGEGSTPQLKAFFDRIGLAERDWMPRANATYKTGIAFHGWSERSGCESYFHPFPSDLDLHTNDAFFSHCAARRGGVDFVAHPDRFYLPARLAAEARGPHPAEDFPFEISYGYHFDAYLVGAVLRDHAVARGVAHLPLKVTEVRVSAEGQVAALVTEDRQAIKADLFVDSSGFRSVIAQEALGVKFRPFADNLFNDSAVVMPTPRAGQAIAPQTRATALSAGWCWAIPLTNRTGNGYVYSSRYIDAAAAEAELRAHLGLGPDDPPARHLKMKVGRVENSWTANCLTVGLSQGFIEPLEATALHIVQATVEGFIAAYEAGGFTPKHRDDFNARTNARYEGIRDYIVCHYRVNRRTDTQYWRDNAANQAASDTLRRLLHFWYTGADLAAEIDRLGLNRYYSAVSWHCLLAGYGVFPDRIEPRGQGFDMARIDAMLAKSARHFAPHHEQLAALER

SEQ ID NO: 83152 - protein, 508 aa, Sphingomonas sp.
  REGION 1..508: note = tr|A0A1R1Z494|A0A1R1Z494_9SPHN Tryptophan halogenase; OS = Sphingomonas sp. Sph1(2015) OX=1628084 GN=BSZ14_00430; PE = 4 SV=1
MDDRPTADHIAQRVVIVGGGTAGWMAAAALARFVPATTRITLIESDAIGTVGVGEATIPGIRLFNQMLGLDEAEFLRATNGSFKLGIRFEGWSGEGSGYLHAFGSIGRGLGLVPFHHYWLRGGGAANPASLWGHMASAQAAMAGRFAPDPGRPDLPSGLAWAYHFDASLYAALLRRHAEAAGVERVEGRIASVARDMAGRIDHVVLDGGEAHAGDLFIDCTGFRALLIGETLAEPFDDWSQLLPCDSALAVAGERTSPLPPYTRAIAHGAGWRWRIPLQHRTGNGLVYDSRHLSDDEAANRLLTALNGEAMGEPRRLRFTTGRRARAWVGNCVALGLAAGFLEPLESTSIHLIQSGLARLLDYWPGQTLQPVEVDAYNRETAAEWLAIRDFLILHYHANARSEPFWTERRAVPLPDSLAARIALFRANGRFRREGDELFAEPAWVQVMIGQGIVPAGYQPLADTLSADELDDFLSLTRRHAAQVAARLPTHDAFLAAHCAAPAPKVFA

SEQ ID NO: 83153 - protein, 511 aa, Sphingomonas sp.
  REGION 1..511: note = tr|A0A2U1G205|A0A2U1G205_9SPHN Tryptophan halogenase; OS = Sphingomonas sp. URHD0007 OX=1298856 GN=H952_1973 PE=4; SV = 1
MNEHSIREVVIVGGGTAGWMAAAALSRFLNNGYTRTTLIESEEIGTIGVGEATIPPLISFNSLLGINENDFVRETKATFKLGIEFVNWGSLGKRYFHPFGTLGQDLQGITFHQLYLRERQRRVLPDISAWAMSAVAAANGRFGRPGRGAQYPLNQLLYAFHFDAGLYAKFLRNYAEQSGVRRIEGKVVDVRLRGEDGHVESVQLGDGQVIEGDLFIDCSGFRGLLIEQALETGYEDWSHWLPCDRAIAAPCSHAGRLDPFTRSSAHSSGWQWRIPLQHRMGNGHVYCSAFISDDEAEQVLRSNLEGELLGDPRRLSFTTGRRKLAWNRNVVSLGLSSGFVEPLESTSIHLIQAGISRLLSLFPDKRFNPIERDEYNKRMQSLSEWVRDFIILHYKATTRDDSEFWKRCGAMDIPDSLSGRIEQFRNKARVFADAELFNTVSWVAVMLGQGIVPDDYEPVVDGLDENKVAQALEQMRLSMLETAQRLPSHEEFVAQCCTATSAAPQPAEIVL

SEQ ID NO: 83154 - protein, 516 aa, Sphingomonas sp.
  REGION 1..516: note = tr|A0A1R1Z3P7|A0A1R1Z3P7_9SPHN Tryptophan halogenase; OS = Sphingomonas sp. Sph1(2015) OX=1628084 GN=BSZ14_01220; PE = 4 SV=1
MVPQPVREDVRVVEGQARSILIVGGGTAGWLTAAYLARFLGPETRITLLEDPAIGAIGVGEGAFPTMRSTLRFLGIDEAQFIRAAGATFKQGIRFDDWRHAPDGGRRHRYVHPFEPPFQADGVDLVAHWLAQDPAARAPFAEAVTIQHRVAAAGRGPKRAGEGAFDGPLSYAYHFDAHRLVALLADRAMGLGVGHLEGRLTGAVVGADGLIDHVVTDRQGMLTADLYVDCTGQRAELISGALGEPLASVRDQLFTNRALACRLPYDTTRGHALPTMTIASAHRAGWTWDIGLAEGRGIGTVYSDAHMDDEAALATLAAYLGRNPDRLKPRLLTFEPGYRQRPWIGNCVAIGLAGGFLEPLESTGIVLIEAAVAMLAELFPHRGPIAAPAARFNTLMTARYRTIVDFLKLHYCLSSRDEPFWHDNGAAGTISDRLRDLLEQWRYRPPGRFDFTLDVESFAHFNYQYILYGMGFADGDARPTRASGEAERLFRKLQMFGDRAVADLPSHDELVAAMRG

SEQ ID NO: 83155 - protein, 510 aa, Stenotrophomonas maltophilia
  REGION 1..510: note = tr|A0A317BZA2|A0A317BZA2_STEMA Tryptophan halogenase; OS = Stenotrophomonas maltophilia OX=40324 GN=DKY64_07095; PE = 4 SV=1
MSDTESTPAGRIRKVVIAGGGTAGWLAGCALAHQFRDQLQITLVESEQIGTVGVGESTVPPIRTFHRFLQIDEQEFLRAVAGTFKLSISFENWRLPGDRFFHPFGTVGHGTWAAPFHHFWLDSLRRGMPSDLGDFCLESIASRGDRFSLHTQPQASYAYHFDASLYARFLRHRAEAHGLRRIEGRIALVRQHAHDGSVQALVLDDGQVIEGDLFIDCTGFRGLLIEQALGTGYEDWHEWLPCDRAVAVQTEAVAPPVPYTRAIAHEAGWRWHIALQHRVGCGLVYDSRHLSDDEAAAKLLRDAGAPPLRDPWKVPFRSGRRLKAWNGNVVSLGLASGFIEPLESTSIHLTISAVVRLIQLFPFDGIRASLVKLYNDVSRQEMEHVRDFIILHYHATQRTEPMWKACREMRVPESLQQRLQAWRERAHAWQDPGELFRVESWTSVLLGQGIAPGPAHPLARAVSDADLRTLLKGIQQPVQQAAAQMPTQAEFIAQYCRSRVDVWRSTAANA

SEQ ID NO: 83156 - protein, 512 aa, unidentified
  source 1..512: note = Proteobacteria bacterium
  REGION 1..512: note = tr|A0A1W9HLC0|A0A1W9HLC0_9PROT Tryptophan halogenase; OS = Proteobacteria bacterium SG_bin6 OX=1827383; GN = A4S16_06780 PE=4 SV=1
MRDSERPGRLRRVVILGGGTAGWMTATALAKSFGPRLSITLLESAEIGTVGVGEATIPTIHWFNELIGLDEAEFLRATKASFKLGIEFVDWTRPGHRYFHPFGTYGVQLPGVAFHHRWLKARAEGLDLPLSAFSLATRLAAENRFAKPQGDARSILSTLGYAYHFDAALYAQHLRGIAEAAGVTRVDGKLRDIERDGESGHVTALTTERGDRLAGELFIDCSGFRALLIEGAMGAGFEDWSHWLPCDRAVAVPCERLAETTPYTRSTARAAGWQWRIPLQHRTGNGYVYARALLSDDEAAATLLANLDGAPLAEPRFLRFTAGMRRRCWVGNVVAIGLSSGFLEPLESTSIHLIQSGIAKLLTLFPDADMDPGLAARFDRVFAADMDDIKDFLILHYHATHDKPEPLWAQCRHMQLPETLVEKEAQYRRSGRVMIEGDALFREASWLAVLNGQEVLAGDYNPLADTLDPAVNRAQLEQIAAVVARAAPTLPKHDAAIAALIGAPSPQVALAG

SEQ ID NO: 83157 - protein, 505 aa, unidentified
  source 1..505: note = Proteobacteria bacterium
  REGION 1..505: note = tr|A0A1W9HBX0|A0A1W9HBX0_9PROT Tryptophan halogenase; OS = Proteobacteria bacterium SG_bin6 OX=1827383; GN = A4S16_02815 PE=4 SV=1
MPEAPLREIVIIGGGTAGWMAAAALARFLGHQARVTLIESEAIGTVGVGEATIPQIKLFNQGLGIAEPDFVRQTQASFKLGIEFVGWGAPDQRYIHAFGAVGWPLGLLPFHHYWLRHRAEGGASGLWDYSAGARAAARNAFQPPADRPGQPAAGYDYAFHFDAGLYAAFLRRHAEAAGVVRIEGRIGAVRLRDDGFVAGVTLDDGRAVGGELFIDCSGFRGLVIEQALHAGYEDWTHWLPCDRALAVPCARVEPLTPFTRATARAAGWQWRIPLQHRTGNGIVYSSAHLSDDQAAAILLDGLDGAPLAEPRPLRFTTGKRRAMWVKNCVALGLAAGFMEPLESTSIHLIQAGIARLLHLFPRAGFDPADIAEFNRQSDFEWRAIRDFLILHYHANGRPEPFWADCREMRIPDSLAHKLALFRANGRITREHEELFTELGWLQVLIGQGVTPAGYSPLADALPAADFARFLGDARAHAERVAAALPSHADFIARHCPALPQEVIAA

SEQ ID NO: 83158 - protein, 511 aa, Sphingomonas sp.
  REGION 1..511: note = tr|A0A2U1G210|A0A2U1G210_9SPHN Tryptophan halogenase; OS = Sphingomonas sp. URHD0007 OX=1298856 GN=H952_1972 PE=4; SV = 1
MRGDRIRRIVIVGGGTAGWMAAAAMSQILGDMPDLSIELVESDEIGTVGVGEATIPQINLFNALLGIDERDFVRATNATYKLGIEFRDWTRIGHSYVHPFGFYGLDMLGIEFHHHWLKGRMAGDATPLDAYSLGVVAGLQGRFSHPRPDQPGSPLSRIAYAFQFDASLYARYLRQRAEALGVRRTEGRIVDVVQNGETGFIEAVVLADDQRVSGDLFIDCSGFRGLLIEQTLQSGFEDWSKWLPCDRAVAVPCESSNDQQPLTRSTARPAGWQWRIPLQHRTGNGYVFSSAHISDDEAADVLLANLDGTVLADPRVLRFKAGYRKQAWIKNVVALGLAGGFLEPLESTSIHLIQTGIARLMTLFPTRRFDDLEIERYNRLTVEEYTDIRDFLVLHYHANERTDSELWRYCRELTPPEGLSYKLDMFRRTGRVIREHEELFTETSWLAVMVGQGIEARDYHPAADALPDSETLQRLAHIREVVAQTAALMPMQNDYLASSGSASGLSLRRAS

SEQ ID NO: 83159 - protein, 515 aa, Sphingomonas sp.
  REGION 1..515: note = tr|A0A1R1YYU0|A0A1R1YYU0_9SPHN Tryptophan halogenase; OS = Sphingomonas sp. Sph1(2015) OX=1628084 GN=BSZ14_10255; PE = 4 SV=1
MVQPVQNIVIVGGGTAGWLTAGVIAARHQGRRPHGFTVTLVESPNVPIIGVGEGTWPTLRTTLKRMGVSETAFFRECDASFKQGARFNRWTTGAADDGYYHPLMLPQSFAQVNLAPHWLTSEDKEVSFCDAVTPQGRICDAGLAPKTIATPEYEAIANYAYHLDAGKFADFLRRHCCEQLGVRHVLANVEEVLLTENGDIRSVRTAQAGEVAGDLFVDCTGFRSLLLGEAMEVPFQPLNDVLFCDTALAIQVPCDDPEAPIASHTISTAQSSGWIWDIGLPTRRGVGHVFSSSHIDRDDAERELRAYLGEAGRDLPVRELKIRAGHRTRFWERNCVGVGLAAGFLEPLEASAIVLIELSAKLIAEQMPACREVMDTVAKRFNETTLYRWGRIVDFLKLHYSLTKRTDSDFWRDNCRPETMPDRLQELMELWRYQAPWMHDEFDRVEEVFPSASYQYVLYGMGQRTDIAPGSLIAESVAAERARRENDVQTGRLLAGLPKHRDLIRKIVERGLPTI

SEQ ID NO: 83160 - protein, 505 aa, unidentified
  source 1..505: note = Rhodanobacteraceae bacterium
  REGION 1..505: note = tr|A0A2Z6E976|A0A2Z6E976_9GAMM Tryptophan halogenase; OS = Rhodanobacteraceae bacterium Dysh456 OX=2010829; GN = ALSL_2664 PE=4 SV=1
MIPANLERILIVGGGTAGWMAAAALARVLGTACRITLVESDEIGTVGVGEATVPHLKLFNNLLQIDEREFVRQTQGTFKLGIQFNGWGRPGDSYVHGFGGIGRELGSQPFHQYWIKAFLAGRAKDIGAYSLNTAAAPRGKFMTSASDVSPSSPLANIAYAYHFDAGLYARYLRRYAEARGVRRHEGRIDQVRLDPESGFVTSVVLADGQALSADLFIDCSGFRGLLIEDALHTGYHDFSHWLPCNRALAVPCEKVGPPTPYTRSTARAAGWQWRIPLQHRTGNGYVYSSAHVSDDEAAATLLAHLDGRPLGDPRLLRFVTGRRKKFWNRNVVALGLASGFLEPLESTSIYLIQSGIAKLLSLWPRRDFNPVLIDRYNAQSAFEFDRIRDFLILHYRLNDRAEPFWRACRYMDIPIELADNIALFHDSGRFYRHAEEMFAEPSWVEVMLGQGLMPRAYHPLVDQVPEAELQAFIAHVEEVIASCVAAMPPHEAFIARHCAAAAQAA

SEQ ID NO: 83161 - protein, 524 aa, Luteibacter rhizovicinus
  REGION 1..524: note = tr|A0A0G9HH59|A0A0G9HH59_9GAMM Tryptophan halogenase; OS = Luteibacter rhizovicinus DSM 16549 OX=1440763; GN = BJI69_18130 PE=4 SV=1
MARLKKVLIVGGGTAGWLAACYLAKAVNAVDPRSVQVHLVESPDIGLLGVGEATFPSIRGTLAAIGLDERRFLVGATATYKQGIHYRHWVRPPGTPGPDHFFHPFNAPSQRPGGPDLLPYWLLGAAPEGTSFADAVSMQSFLVDHSRAPKRPKDADYQGPMNHAFHFDAACFARVLAEHGQETLGVVRHVATVERTELDEHGAIARVVTKEEGELTADLYVDCTGLRGMLIGNAMQSPFRSRADVLFADRAVAIQVPYETPDAPIPSYTISTAQEAGWVWDIGLQKRRGSGYVYSSRHTTDDRAEEVFRRYLGKAGEGLKAFHIKFETGYRPEHWRKNCVAVGLAGGFVEPLESTGIALIELATYLLTHLLPGDTDDMESAARHFNEMMVARYDRIIDFIKMHYCLSQRRDSPFWIDNTDPASIPQTLQEKLEKWKLRPPHRLDFVSDLEMFMTSSWQYVLYGMEFRTDLEPMRSAYPDMDVARKEFAVIRQAGSLALDDLPDHRAFVEQMCREHRQRSEAVGV

SEQ ID NO: 83162 - protein, 506 aa, Pseudoalteromonas sp.
  REGION 1..506: note = tr|A0A0M8KJB1|A0A0M8KJB1_9GAMM Tryptophan halogenase; OS = Pseudoalteromonas sp. SW0106-04 OX=1702169 GN=W04_3132; PE = 4 SV=1
MKKLRKVVIVGGGTSGWLAANHIGKRLLGSDIEVCLIESPTIPTIGVGEGTVPMMVSTLQSFGISEQTFITQCDATFKQSIKFINWLDKHHHGEYNYYHHLFEYPFPNNQDVTQTWLSDTTAASFAETVSFQHMLCEQGVGPKAITQAQYTGHASYAYHLNALKFAQLLKDNATSRFNVKLLKTNVTAVKCNDEGHISELQTDDSGQVSGDFFVDCSGFSSILHRQALGVKSVDVSDQLPIDKAITAQVPTPADDAIPPYTLATAHQAGWIWDIALTTRRGTGFVYASDYLTKEQAYTKFERYLGQPLSGLKVREIDMKAGFAERAWHKNCVALGLAQGFVEPLEATSILLTDFSAKLLAENLPVQHHALALAAKKYNEIVDYAWRRVVDFIQLHYYLSDRQDSAFWRAMKSTDSMSVVLKERLALWQYQVPKKSDFNSKYEVFELENYLYILYGMHFKPCAHLVAKPEHKELIAMLTSYGEQLLKQLPKHRALLNNIAQHGLQKI

SEQ ID NO: 83163 - protein, 529 aa, Mycobacterium sp.
  REGION 1..529: note = tr|A0A557XQJ9|A0A557XQJ9_9MYCO Tryptophan 7-halogenase OS=Mycobacterium sp. 16-83 OX=2592811; GN = FPZ47_14435 PE=4 SV=1
MTRPDAVSPAGGGCLPDQAVGRTESREAMIQSVLVVGGGSAGLLTALALKQQAPALEVRVVRSKDIGVIGVGESTTPQIVNLLFDYLKLPQKQFYSTVRPTWKTGIHFLWGPRTSFDYGFAFQLDGFYTDLDRYNGFYCGDDFDSVDMNAALMAQGKAFEKHPSGQGPLITPNTALHLFNPALVEALESASVARGIEIVDARITGVPVDEQGVRAVVLDDGRTFSADLYVDATGFRSELLGRALGTPFLPYDSSLFCDRAIVGSWDRTDEYIYPYTIAETMEAGWCWQIDHEHAINRGYVYSSHFLSDDQAREEFVQKNPKAKTWDHVVKFRSGRYEKGWVKNVFAIGNACGFVEPLEATALMVASSQIKAMVEMLVQSQLDPTPSLKALYNTLFVDWWDGIRDFLSVHYRFNTRLQNEFWTACCNEVDVTPVQPLLDFYRENGPTGFCRHYVTSTIGQDNQFGLEGYLVMLVGQKVPYRDAHPPSEADMAIFRRHCADNRARAASGLTVAEALQYVHRPDWRWNSDAQ

SEQ ID NO: 83164 - protein, 538 aa, Burkholderia ubonensis
  REGION 1..538: note = tr|A0A3N7Q410|A0A3N7Q410_9BURK Tryptophan 7-halogenase OS=Burkholderia ubonensis OX=101571; GN = DF011_09980 PE=4 SV=1
MSNPIKNIVIVGGGTAGWMAASYLVRALQQQANITLVESAAIPRIGVGEATIPSLQKVFFDFLGIPEREWMPQVNGAFKAAIKFVNWRKSPGGSRDDHFYHLFGNVPNCDGVPLTHYWLRKRELGFQQPMEYTCYPQPGALDGNLAPCLPDGTRQMSHAWHFDAHLVADFLKRWAIERGVNRVVDEVVEVHLNDRGYISSLSTKEGRTLEADLFIDCSGMRGLLINQALKEPFIDMSDYLLCDSAVASAVPNDDARVGIEPYTSAIAMNSGWTWKIPMLGRFGSGYVFSSKFTSRDQATADFLNLWGLPDKQPLNQIKFRVGRNGRAWVNNCVAIGLSSCFLEPLESTGIYFIYAALYQLVKHFPDTSFDPRLTDAFNAEIVHMFDDCRDFVQAHYFASSREDTPFWLANRHDLRLSDAIKEKVERYKAGLPLTTTSFDDATYYEAFDYEFKNFWLNGNYYCIFAGLGLLPDRSLPLLRHRPESIDKAEAMFARIRREAERLRTSLPTNYDYLRSLREGDAGLSRSQPGPTLAAPEIL

SEQ ID NO: 83165 - protein, 525 aa, Alteromonas sp.
  REGION 1..525: note = tr|A0A2E9PGH0|A0A2E9PGH0_ALTSX Tryptophan halogenase; OS = Alteromonas sp. OX=232 GN=CL591_05510 PE=4 SV=1
MMSEVNRIVIVGGGTAGWLTAGLLAATHSGADNNGQRLSVTVIESDAVPPIGVGEGTWPTMRRTLATIGISEAELVTQASATFKQASKFVNWYSDNGRNQDNSYYHPFSAPQGSATLDITPYWLTTAQTHSHYAQDVCFQPALCDAGLAPKLTANGKQSFTANYGYHLDAGQFISLLRRHCVNRLGVTHLVDKVTQVNTQADSPEAGIVSLQTQQSGKIEGDLFVDCSGFSGLLINKALGVKLKDASHRLFANSALVCQAPFENETAPIPCHTLSTAQEAGWIWDIGLQHRRGTGYVFSREHQDVDRAADTLSRYLSQVAPSMATPDAFREIQFKTGYRETFWHNNCVAIGLSSGFLEPLEASSLMLIEQSAMLLAEQLPANTTIMSKVSQRFNSRLTYLWERTIEFLKLHYVLSNRPEAFWQDNKQRGSIPERLADLLEEWRYRPILDSDFPQANEAFSAQSYRYILYGMGPKTDFNWDMSTTERSLKHHNFATKQGQLNQTLIGQLKERLPSHRGLVESFFQS

SEQ ID NO: 83166 - protein, 532 aa, Streptomyces malaysiensis
  REGION 1..532: note = tr|A0A291T144|A0A291T144_9ACTN Tryptophan 7-halogenase OS=Streptomyces malaysiensis OX=92644; GN = DNK48_09680 PE=4 SV=1
MAQQGQGETTARVDKVVIVGGGTAGWMTASYLVAAFGGRVDVTLVESGRVGTIGVGEATFSDIRHFFEFLQLEEKDWMPACNATYKLAVRFENWREPGHHFYHPFEQLRSVDGFPLTDWWLRHPTTTRFDTDCFVMASLCDANRSPRYLDGTLIDQDFVESGERRLARSTIAEFQGAQFPYAYHFEASLLADYLRGYATERGVRHVVDDVVDVERDHRGWIERLRTQEHGTVEGALFVDCTGFKGLLINKALGEPFESYQDSLPNDSAVALQVPLDMDRELLRPCTTATAQDAGWIWTIPLISRLGTGYVYARDYLDPEEAERTLREFVGPAATDVPANHIRMRIGRTRRSWVNNCVAIGLSSGFVEPLESTGIFFIHHAIEQLVRFFPGGDWDPTLRTLYNNSVAHVMDGVREFLVLHYRGAKRADNEYWRDTKTREIPDALAERMERWRSKLPDSETVFPYYHGLPPYSYNCILLGTGGIPVRPSPALDIADEKAALLEFQAIRDKARRLVAELPTQHEYFAAMRAQAQG

SEQ ID NO: 83167 - protein, 503 aa, Rheinheimera sp.
  REGION 1..503: note = tr|A0A0U4VJ53|A0A0U4VJ53_9GAMM Tryptophan halogenase; OS = Rheinheimera sp. F8 OX=1763998 GN=ATY27_06455 PE=4 SV=1
MTAQPIEKFVIAGGGTAGWIAAATLARIFAGSNVRIELVESAEIGIIGVGEATIPPLLATLESLGIDLVEFIKATQATFKWGIRFEDWHTKGQGYFHPFGVLGKQIDGHDFYQCWLKCRAMGDPSSLMSHSPEAVLAEANKFFLPHQAVNTPLAMAQYALHLDSALVGQYLRRYAENLGVVRHEGKIAAVQQHPCGDIKELLLDDGRVLTGEFFIDCTGFRGLLIEQTLKAGYEDWSYMLPCNRAVTVQTENVADPRPYTIARAQDAGWTWQIPLQHRAGNGYVYCSDFISDEQAKQTLLQTVEGTPLIEPRVIPFVTGIRKQPWQRNCLALGLAQGFLEPLESTAIHLVSKTLALFVRMFPDRGDNSALRNEFNRRVYSDYQEIRDFLALHYCETNRSDTEFWRWCQQMPVSDSLRYKLDYFRHSGSIIPGAEELFQPTSWYAVFTGMGVLPTRYNPTVDALNAQKLQQSLQAGQQGILRYAQTQPSHGDFLRQYCAAPKLM

SEQ ID NO: 83168 - protein, 502 aa, Pseudoalteromonas rubra
  REGION 1..502: note = tr|A0A0L0EVY3|A0A0L0EVY3_9GAMM Tryptophan halogenase; OS = Pseudoalteromonas rubra OX=43658 GN=AC626_03630 PE=4; SV = 1
MNKKRIVILGGGTAGWMAANLMAKSWQDQPIEIALVESPDIGIIGVGEGSTPQFKGFMDFMGISEAQWMPACNATYKNGIRFIDWSTRPGFSSYFHPFPSQPDDYSAPAFFHNSFVRRKAIDVAGHPDPFFLTTYLAEQAKAPIAAHHFPFEINYGYHFDAGKLGLFLAQTARDLGVEHIQANVSDVRKHTNGDIAALVCEQGTEITGDVFIDCSGFRSLLMQQHLDVGFESFANNLFNDAAVVLPTEQGDVISSETQSIARKFGWSWHIPLTNRIGNGYVYSRRYCDPDKAETELRTALGLLDSDVEARHLTMKVGQVKKHWHKNCLAIGLSQGFIEPLEATALHIVQETVQSFIECYQDGEFTDKLKTRHNQSLDARYQAIRDYIVAHYRVNSRADTQYWRDNANNNQLSRSLYDVLQTWVSGKNLSDELHRQDIDKYYPSVSWHCLLAGYGIYPEQSQLIAGNEAANKYDLSQVQDYIARCGLNFEDHRAQLERLAQMR

SEQ ID NO: 83169 - protein, 502 aa, Rheinheimera sp.
  REGION 1..502: note = tr|A0A0U4VEP1|A0A0U4VEP1_9GAMM Tryptophan halogenase; OS = Rheinheimera sp. F8 OX=1763998 GN=ATY27_06460 PE=4 SV=1
MAKPISSVVIVGGGTAGWMAAISLARMTRTEPLQITLIESSRIGTVGVGEATIPGIVHFNHQVGLEEIAFIKATQASFKLGIQFENWYQQDSRFFHPFSDFGLPIDQVAFHHYLNRLALAGHPVNFEDYSFASVLARHDKFAQPHPQPSSPLADFNYAYHFDASLYAAYLKQHAMAAGVKHLDAEISQVVLQPTTGFIDQLVLDNGETLSAELFIDCSGFRSLLLGEALGVGYQSWQQWLLCDAAQAVQTVRTGPILPYTRSIAMDAGWQWRIPLQHRMGNGHIYASAFCSDESARQTLLDTVEGEVLNSPRKLSFTPGRRDVIWHKNCFALGLASGFLEPLESTSISLVQTALAKLQAFFPDQDFAPAAIAEVNRLHNAELENIRDFLILHYKLTDRRDSEFWRYCAAMQVPDTLQHKMDLYRERGHLVQYDQESFKGASWLAMYNGYRFQAQGYDPRAGQVPLDLMQQRLTQLKQSIQQAAGSAVSHQDFISRHCAATPL

SEQ ID NO: 83170 - protein, 487 aa, Mycobacterium pseudoshottsii
  REGION 1..487: note = tr|A0A100IGX5|A0A100IGX5_9MYCO Tryptophan halogenase; OS = Mycobacterium pseudoshottsii JCM 15466 OX=1136880; GN = MPS_5479 PE=4 SV=1
MDDNLIKKVVVLGGGTAGWMTAAYLGKALQGNVEITVLEAPSVPRIGVGEATVPNLQRVVFDFLGIPEDEWMRECNASFKTAVKFINWRTPGEGSPVARHWRGRPDHFYHPFGLLPSPQHIPLSHFWARNQLKGGTSEPFDYACFREPAIMDAMKAPRYLEGTQATYYAWHFDAALVADFLRRFATKNLGVVHVQEKMTLAEKDSNGYITALRTEEGRRLDGDLFVDCSGFRGLLINEAMNEPFIDMNDHLLCDSAVATPIRHDDAANGIEPYTSAIAMKSGWTWRTPLLGRFGSGYVYSSQFASQDEAIRDFCNLWQFDPEDTPLNKIRFRVGRNRRSWVKNVVSVGLSSCFLEPLESTGIFLIYAALYQLAKHFPDRRFDPVLIDRFNRKIDTLFDETRDFPQAHFYFSPRTDTEFWRANKELTLTDSIKEKVAMYKAGVPVNPPIATESSYYSNFDAEFENFWTNGSYYCIFAGLGVLPGLRRC

SEQ ID NO: 83171 - protein, 517 aa, Microbulbifer thermotolerans
  REGION 1..517: note = tr|F1SWD2|F1SWD2_9GAMM Dehydrogenase (Flavoprotein); OS = Microbulbifer thermotolerans OX=252514; GN = SAMN05660479_02363 PE=4 SV=1
MSQPVKSVVILGGGTAGWITAGTLAARFKRDQAEPVSVTLIESPNVPTIGVGEGTWPTMRNTLKRMGVRETDFIRECNVGFKQGAKFARWSTGAKEDFYYHPLVLPEGFNSHNLAPHWLAGDRSVSFSNTVCPQEALCQRNLAPKTIDTPEYAAIANYAYHLDAGKFSRFLQEHCTENLGVRHILADVSGVRESETGDIAALQTDTAGEVSGDLFIDCSGFRSKLLGEHFGIPFHSCKSVLFIDTALAVQVPYEHENSPMATHTISTAQSAGWIWDIGLQNRRGVGHVYSSAHSDESSAYRELASYLNMSEPQLDELGVRKIPIVPGHREKFWHRNCVAVGLSAGFLEPLESSALVLVEISANMIAEQFPASRAAMDVVARRFNESFLYRWDRIIDFLKLHYVLTKRKDSEFWLDNCDPVSVPDSLKELLTLWRYQPPWHDDFDRAVEVFPAASYQYVLYGMGYETKPRPGGISAPNLEMAAQLFEQKNRGLEKMLRLLQPHRDLINKIRKFGLQKI

SEQ ID NO: 83172 - protein, 67 aa, Mycobacterium pseudoshottsii
  REGION 1..67: note = tr|A0A100IBL4|A0A100IBL4_9MYCO Tryptophan halogenase; OS = Mycobacterium pseudoshottsii JCM 15466 OX=1136880; GN = MPS_3775 PE=4 SV=1
MLPGHTLPAINYQSEAIHEADALFLDVKQKQRHLVETLPSNYEYLLKLHGKDMEPNDPMEPEVTFVA

SEQ ID NO: 83173 - protein, 513 aa, Alteromonas sp.
  REGION 1..513: note = tr|A0A2D5LGT6|A0A2D5LGT6_ALTSX Tryptophan halogenase; OS = Alteromonas sp. OX=232 GN=CL592_01365 PE=4 SV=1
MITRVVVVGGGTAGWLTAGIIAAKNPLVGENSHTEVILVESPDVKNLGVGEGTWPTMRDTLRLLGIAEKQFLSECDASFKQASKFVGWQQGGEDKYYHPFTAPAGFGAVNLVEAWHDEGCPGDFESWVCAQGMACERYQAPKMPQLPEYAYNFNYGYHLSADKFVALLHRHCTEQLGVQYKSAHVAGIQSHPDGAIAAIELAQGEPLAGDLFIDCSGFSARLIGQHYNVPFVSKRHILFNDTAVAAQVNHVGDQTPIASCTVATARPHGWVWDIALQSRRGIGHVFASELTTESQAEDALRAYISSDQSLSQKAIMPRTIRFDPGHRARFWEHNCVAIGVSAGFVEPLEATALVLIEKSAEWIAEQLPRSRAAMAVLRKRYNDMTDARWDEIIDFIKLHYVLSERRDSPYWQAHADPASWTDSLQEALQLWQSQPPGLLETNLRQELFSSASKQYVLYGMGFRSRDWQPGGITSLRKPLIERVRREFLHNGDKLLAQLPTNRDYFNRLKATSA

SEQ ID NO: 83174 - protein, 505 aa, Xanthomonas campestris
  REGION 1..505: note = tr|A0A0A3WE36|A0A0A3WE36_XANCH Tryptophan halogenase; OS = Xanthomonas campestris pv. phaseoli OX=317013; GN = AC609_15265 PE=4 SV=1
MTQAQIRKVVIAGGGTAGWIAACALSHQFRNLLDITLVESEQIGTVGVGESTVPPIRTFHRFLQIDEQEFLRAVAGTFKLSISFEHWRRQGERYIHPFGITGQSTLVCAFHHLWLESQRRGMPGSFGDYCLETVASRVDRFALHGEPAVNYAYHLDAALYARFLRARSEACGVKRVEGRIQQVTVQPHSGDVASLVLEDGQTIEGDLFIDCSGFRGLLIEQTLHTGYEDWSHWLPCDRAVAVQTQALGPPVPYTRAIAHEAGWRWHIPLQHRVGNGLVFSSKHLSDDEAHAKLLRDVAAPAVKDPWMVPFRTGRRLKAWNKNVVSLGLASGFIEPLESTSIHLTISAVVRLLALFPAEGIASSQVQLFNDVSRAEMEHVRDFVTLHYHATQRDEPLWQQCRQMELPESLALRLRAWRERAHAWQGADELFRIDSWTHVLMGQGIAPDQHHPLTRAFSDHDLRRLLDGIAQPIQHAVRQMPSQQDFIEHYCKAGEQVWGMRSPVPA

SEQ ID NO: 83175 - protein, 531 aa, unidentified
  source 1..531: note = Streptomyces alfalfae
  REGION 1..531: note = tr|A0A1P8TQL9|A0A1P8TQL9_9ACTN Tryptophan 7-halogenase OS=Streptomyces alfalfae OX=1642299; GN = A7J05_33480 PE=4 SV=1
MDQRVKEIVILGGGTAGWMSAAYLAKKLGETVRVTVLEAPSIPRIGVGEATVPNLQRVFFDQLGLSEEEWMPECNAAYKVAVKFINWCTPGKGEARAREIDGRPDHFHHPFGLLPEHEGLPLSHYWVYNRKHGVTGKPFDYACFPGVAIMDALKAPRDHGGEPVTRYAWHFDAHLVADFLRRHATEKQNVTHVQDEMVEARRDGRGFVTALRTKSGAVIEGDLFIDCSGFRGLLINQAMEEPFVDMSDHLLCDRAVAYALPNDDEANGVEPYTSAIAMESGWTWKIPMLGRFGTGYVYSDAFADQDRATTDFCRMWGLDPDEVGDRLNHVRFRVGRNRRAWVKNVVSVGLASCFLEPLESTGIYFITAALHHLAKHFPDQRFDAVLADRFNAEIEAMFDDTRDFIQAHFALSPRTDTPFWKANKDLHLPEGIKEKVAMYRAGLPINQPASTEGAYYDNFDVEFRNFWTNGSYYCVFAGLGLEPDHPLPALMHHPDAAEGAQHLFDRVAEEQRKLADTLPLNHEYLRRLHGA

SEQ ID NO: 83176 - protein, 528 aa, Alteromonas sp.
  REGION 1..528: note = tr|A0A2D6HXI3|A0A2D6HXI3_ALTSX Tryptophan halogenase; OS = Alteromonas sp. OX=232 GN=CL591_14935 PE=4 SV=1
MNKLVKHVVIVGGGTAGWLSAGILAAKLKPDYKVTLIESPNVPTIGVGEGSWPSLRDTLLDIGINEREFLTACKGTFKQGSSFVNWRACAANSQTFAHQYHHPFTVPTAYNELDIHACWQSIAKHESYENSFSLQSLMCTQGKAPKQATTPDYAHVLNYGYHFDATALANLLKKHCLESLGVHYVSAHVSKVEEHPNGYIRQLLTDNGQAISGDLFIDCSGKSGLLIQQHFNVPWLSLETTMLNNRAMAVQAPYAPDDQAISSTTVATAQRVGWTWDIGLQHRRGVGLVYASEFCNEDAAIDILFKQVSQRLRHAKAQDLSVRTLSFEPGYRKDFWVKNCLSLGMSSGFVEPLEASAIAMVELGLRMLCESFPHNAEHMEHVSQRYNQRFEYRWQRVVDFLKLHYVLSERNEPYWLAQRHESRTPPSLSTLLEIWKYQSPSRLDLIENEEIFPSASYQYVLYGMGYNTALPAIALSDADLSKAKAIRSKMTQMKQAYLHALPNNRALLDELCGLNEEKGNKEHNHVHI

SEQ ID NO: 83177 - protein, 518 aa, Microbulbifer thermotolerans
  REGION 1..518: note = tr|A0A143HIF4|A0A143HIF4_9GAMM Tryptophan halogenase; OS = Microbulbifer thermotolerans OX=252514 GN=A3224_00665; PE = 4 SV=1
MTEQTHDNNIRHIVIAGGGTAGWSAAAALARVLAGSGSTITLVESEAIGTVGVGEATIPTIHTFHRMLGIDETEFVRATQATFKLGIEFRGWGSADNRYFHPFGHYGREFDSIPFHQYWLYGSRFEDCGNLSEYSLCTLAAERGRFLPANSDPRSILSQLGYAYHFDAGLYAKFLRNYAERLGVRRQEGQVVDVTLRKEDGAIRELVMASGQRVEGDFFIDCTGFAGLLIGGALNVGYEDWSHLLPANSAVAVPSENVGPTAPYTRSTAAAGGWQWRIPLQHRTGNGFVYSSRFLSDEQAVETLLQNLEGRALAEPRQLRFTTGRRKKFWHKNCVALGLAAGFMEPLESTAIHLVQTSISRLLLLFPGRELHPADIEEFNRQTAREYEYIRDFIILHYHANQRSEPLWQYCREMPVPETLTHRIALFRNRGRFFEREEDLFKTASWLAVLMGQGIQPQGYHPVMEGKTPQKVLGMLREMRELLRSGAEAMPTHDEFIAQNCRAPSPSEPLVNSHSRSR

SEQ ID NO: 83178 - protein, 519 aa, Alteromonas sp.
  REGION 1..519: note = tr|A0A349Z747|A0A349Z747_ALTSX Tryptophan halogenase; OS = Alteromonas sp. OX=232 GN=DCW59_13485 PE=4 SV=1
MRKSVLIVGGGTAGWITAAYMARMLAADTPGGVSITLVESEEIGILGVGEGTFPIIRKTMGRIGLDESDLIKHADATFKQGIRFNNWKKNPADDPNDSYFHPFQVASQHTDMDLLPYWLLGVAGDVPWSECCTVQERAVEAKLAPKLISHPNYEAPLNYAYHFDATKLAALVRRRAMEMGVKLLIDTIDDVKLDEDGAIAAVTARQHGDLTADLFIDCTGFRATLIGETMGSEFTSYKNELFCDRAVALQVPYEQAGGPIPSCTYTTAKDYGWIWDIGLHERRGLGYVYSSKYCDEETAVATLKAHIGPAADKLQHRLLKFEPGYRKTQWHKNCVGIGLSVGFIEPLEATGISFAEVAALMLCNLFPWSGDYERSATQFNNAMSKRFEHVKDFIKLHYYLTERDDTAFWRDNQDPATASEYLKGKLEQWRHRPPSFLDIDASHDIFDENSWQYILYGMGFKTDISAREGALRFFDDARNEFASIRQQSENAKRAVPTHRDLVNEICQSGFKPQPRRARR

SEQ ID NO: 83179 - protein, 512 aa, unidentified
  source 1..512: note = Caulobacter flavus
  REGION 1..512: note = tr|A0A2N5CNB4|A0A2N5CNB4_9CAUL Tryptophan halogenase; OS = Caulobacter flavus OX=1679497 GN=C1707_10580 PE=4 SV=1
MSEDVRNGRIRSIVIVGGGTAGWMAAASLRRHFGKAPIDITLVESSEIGTIGVGEATIPTIRNFYQSLGLDDLEVLRATQGTCKLGIRFKDWMAPGSAFIHPFSLYGQDLGGIPFQHYWLKARAFADVGEMGEYSLGASLAAAGKFTVPAANPPSSLSVFDWALHFDAALFAQLMRRVAEANGVRRIDAKVVKVNLRPEDGFVASLSLHTGQVVEGDLFVDCSGFRGLLIEEALQTGYEDWSQWLFCDRALAVQSQPPEGAEPPPYTDVTAHSAGWRWRIPLQHRYGNGYVYSSRHIDDEAAKAELVAAVPDRLLHEPRLIRFTPGRRKQVWNRNVVALGLASGFLEPLESTSIALIETGIEKLKALFPDRRFDPAVVDEFNDWSRREMERVRDFVVLHYKAAQRGDTPFWRTTRDAEIPETLARKVELFRSRGHIARYRWEMFQPPSWLAIFAGFDILPEGWDPALDGVDGAALAASLNQMRAGVARVVANAPGHGDFLHRYVGQAPAAAE

SEQ ID NO: 83180 - protein, 509 aa, unidentified
  source 1..509: note = Caulobacter flavus
  REGION 1..509: note = tr|A0A2N5CSV5|A0A2N5CSV5_9CAUL Tryptophan halogenase; OS = Caulobacter flavus OX=1679497 GN=C1707_15850 PE=4 SV=1
MSGAIRNIVVVGGGTAGWMTAAALAQTVGTRRYSITLVESEQIGTVGVGEATIPMILLFNKVLGLDEDVFIRETNATFKLGIEFVDWRRLGHRYFHPFGLYGADMDGVGFQHFWLRWARESGDWRYDAFNAETLAAADGRFMRTAPTPNLPKINYAFQFDAALYAAFLRRYAEARGVVRVEGKIAGVERDGESGHVSRLVLDDGRAIEGDFFVDCSGFRGLLIEETLGAGYDDWSRWLPCNRAAAMPCERAGELTPYTRATAREAGWQWRIPLQHRTGNGYVFCDAFIAEDEAVRRLGERLDGAAMADARILKFTAGRRRRSWIGNVLAIGLSSGFLEPLESTSIHLVQAAVAKLLTLFPKTGFDPIVVDKFNREMALEYEQVRDFIIAHYKVGERDDTPFWRWCRDMVPPDSLAQRLEVFRTRGEVLIDQKELFKETNWFAILAGQGLLPDDYHAVADTLSSEELRLRMGRIQAAINERVAGMPPHDVYLDKAGLLGAAARAARSVPV

SEQ ID NO: 83181 - protein, 501 aa, unidentified
  source 1..501: note = Caulobacter flavus
  REGION 1..501: note = tr|A0A2N5CT68|A0A2N5CT68_9CAUL Tryptophan halogenase; OS = Caulobacter flavus OX=1679497 GN=C1707_24765 PE=4 SV=1
MDRAIGSIAILGGGTAGWMAAAVLAQVLRGTGTTITLVESAEIPTVGVGEATIPPIVDFLRLLEIDQGQFMAATEGSFKLGIRFDDWRVLGERYWHPFGTFGPSVDRRPFHHMWHRLRAAGEDPRVEAYSLATALGDAGRMAFADGQGQGPLGGMRHALHFDAGLVARFLRTYSEQRGVRRLERRVEGATLKDDGFVEALVLEGGERLAADLFIDCSGFRGVLIEGALKTGYEGWSAFLPCDRAVAGLTVRDANPPPFTQAAARPAGWRWRIPLRHRTGNGYVYSSAHVSDDEALADLEREAGKLLTEPRVLKFTGGRRKAFWNRNVIALGLASGFIEPLESTSIHFVTSGLMKLLDHFPDKDFDAANIADYNAALVAEYEAARDFIVLHYQPTRRDEPFWRERAAAALPPDLAERLALYRGTGRIPHRPTELFTELSWFYVLEGMGVRPAAYDPLVGLSNLSQVREGLSGWRRRVAEIVQAAPAHDAALDLVAGRRRPAA

SEQ ID NO: 83182 - protein, 528 aa, unidentified; identical to SEQ ID NO: 83176
  source 1..528: note = Alteromonas australica
  REGION 1..528: note = tr|A0A350NYN8|A0A350NYN8_9ALTE Tryptophan halogenase; OS = Alteromonas australica OX=589873 GN=DCW74_00285 PE=4; SV = 1

SEQ ID NO: 83183 - protein, 521 aa, Xanthomonas campestris
  REGION 1..521: note = tr|A0A0A3WK23|A0A0A3WK23_XANCH Tryptophan halogenase; OS = Xanthomonas campestris pv. phaseoli OX=317013; GN = AC609_20460 PE=4 SV=1
MPDTTPSDPQQRPVRRVVIAGGGTAGWMAAAALSKLLGRHLQITLVESDEIGTVGVGEATIPSLVTFHRLLEIDEAMFMAATQATIKLGIAFEHWRDVDQHYIHSFGHAGTDHWSAGFQHFWLKGRQRGVARDFGDYCLELRAAQEGRFAHLPNGGMNYAYHLDAGLYARFLRRFSEGFGVQRIEGRIGQVETDPESGFLTALTLHNGARVEGDLFIDCTGFAGLLIGKTLGVGSDDWSRWLFADSALAVQTESMGPPVTYTRSRADQAGWMWRIPLQHRVGNGIVYSSRYMDQDGARAVLERNLTGRALTEPRPLRFTPNQRHRVWEKNCVALGLASGFLEPLESTNIHLIQRGIIRLLQTFPQVINAVDIAEYNRQAAQEITHIRDFVILHYHATDRRDTPFWRDCAAMDIPDSLRHRVELFRQSGRVFHQANELFAENSWVQVMLGQGIVPQQHHPVADLMGDVELGRFLETIRTRVEAALVRLPAHADFLQRYCPAPPLPEPAARVPAPQVMATPAG

SEQ ID NO: 83184 - protein, 504 aa, unidentified
  source 1..504: note = Caulobacter flavus
  REGION 1..504: note = tr|A0A2N5CUT3|A0A2N5CUT3_9CAUL Tryptophan halogenase; OS = Caulobacter flavus OX=1679497 GN=C1707_01455 PE=4 SV=1
MTNDRIRHVVIVGGGTAGWMTAAALGRFLKDGVTKVTVIESEAIGTVGVGESTIPQINMFNRMLGLDEDDFLRRTKATYKLAIEFRDWKQIGHTYHHPFGPYGVDMEGVSFHAYWLRYQAMGEAADLSDYSLQSLAAAQARFQRPTGQKNSPLGDIAYAFHFDAGLYARFLRDYAEARQVRRIEGKITHVAQRGTDGFVESVTLENGTVVEGDLFVDCSGFRGLLIEQTLKSGFEDWSHWLLNDRAVAVPCASGGSTDPVTRATARPAGWQWRIPLQHRIGNGYAFSSEHISEDEATAYLLANLDGEALADPWTLRFKAGRRKKSWHKNVVAIGLSAGFMEPLESQSIHLIQVGISRLLAMFPDRRFQQPDIDRYNRVMTFEYEKIRDFLILHYKATERSDTPYWDYLREMPIPDYLADKIAVFESHGRIFRENEELFNDTSWFAVMVGQGLKPKGWDPMADVMSEDLLRARMNEIRAVIARSVDGMPDHMAFVADRVARAQAA

SEQ ID NO: 83185 - protein, 515 aa, Streptomyces thermoautotrophicus
  REGION 1..515: note = tr|A0A132N5D1|A0A132N5D1_9ACTN Tryptophan halogenase; OS = Streptomyces thermoautotrophicus OX=1469144; GN = TH66_02755 PE=4 SV=1
MENAIRNVVIVGGGTAGWMSATYLKAAFGDRVSVTLVESDRVSTIGVGEATFSTIRHFFDYLDLPEEKWMPHCSASYKLAIRFENWRKPGHHFYHPFERLRVVDGFHLAEWWLQLGEDTAAFDRACFLTPWLCEAKRSPRNLDGSLFVAGLDGPLGRSTLAEQRAQFPYAYHFDADLLAKFLARFGIERGVRHVVDDVIAVGQDERGWITHVRTKGHGDLTGDLFIDCTGFRGLLINQTLGEPFRSFQNVLPNNRAVSLRVPRDIERVGIAPYTTATAMEAGWIWTIPLYGRIGTGYVYSDEFCTPEEAEQTLRKFAAPGQDDLEANHIRMRIGRNERSWVANCVAIGLSSAFVEPLESTGIFFIQHGIEELVKHFPDATWNPVLVDSYNRRVARVVDGVKEFLILHYRAAARDDTLYWKETKTREIPESLAERLALASTMLPDENNIYPYYHGFEPYSWVTMVLGLGGVRTKARPALASMDPSAARRQFAVLRREADLLTASLPSCYEYLATLN

SEQ ID NO: 83186 - protein, 477 aa, Streptomyces malaysiensis
  REGION 1..477: note = tr|A0A291T4B6|A0A291T4B6_9ACTN FAD-dependent oxidoreductase OS=Streptomyces malaysiensis OX=92644; GN = DNK48_03950 PE=4 SV=1
MTHPTDGKVYDVMVAGGGPAGSSVAAFAAMQGHRVLLLEKEEFPRYQIGESLLPSTVHGICGLLGVTEELESAGFVRKRGGTFRWGSNSEPWSFDFALSEKFAGPTSYAYQVERAKFDQLLLDNARRKGVEVRERCAVRDVLEDDGRVRGVRYTDPDGAEREVHAQFVVDATGNQSRLQRYIGGQRRYSDFFQNIALFGYFEGGRRLPSPNSGNITCVAFPSGWFWYIPLSDTLTSVGAVVRKECADQVRGDRAEALSALIADCPLIADYLSDARRVTSGRYGEVRVRKDWSYLHDTFWQPGMALVGDSVGFIDPLFSSGVHMATYSALLAARSLNTALRGDLGERECFAEYEARYRKEYQSFHDFLVNFYDVNRDEQQYFEVARRVTRDTAPGAGAFVGLVGGGASDEAALTSESYRDKRKKDLLDQSRAVHHEGHRIQLQAAFGEAVDDTPLSADGLVVSQDGMHWEKSVTSSTV

SEQ ID NO: 83187 - protein, 516 aa, unidentified
  source 1..516: note = Endolissoclinum sp.
  REGION 1..516: note = tr|A0A1Z8SEK2|A0A1Z8SEK2_9PROT Tryptophan halogenase; OS = Candidatus Endolissoclinum sp. TMED37 OX=1986638; GN = CBB97_17040 PE=4 SV=1
MKANEANFDDSISSILIVGGGSAGWLTAGILAARYGKTMSITLVESPDVKIIGVGEGTWPTMKGTLREMGISETDFFRECDASFKHGAKFAKWVNGDEADYYYHPLMLPQDFTKINLAPFWLKSNCDRSFSESVCFQEALCERALAPKTVTMPEYNSAANYAYHLNAGKFTKFLTDHCTTKLNVKHKLATISEVLKSEDGGIRCVKTTDGQHLSADLFVDCTGMASLLLGKTLGVEFIDKNDSLFIDRALAAQKPYESEEEPILPYTVSTAQKAGWIWDIGLTSRRGIGYVYSSNHSSGEEAEETLADYIGPSFKELSVKKISIRSGHREIFWKQNCVAIGLSAGFLEPLEASALMLIEISAKFVRDQLPETRKTMPIIARRFNKAMTYHWERIIDFLKLHYVLSKRDDTDFWIDNRCSSTIPESLAELLELWKSHTPYRQDFSHKEEVFPAASYQYVLYGMGFRTEISNRSVECTDEAYRAAVAENERMISKAVELLPDNRQLLQKINRYGMSAL

SEQ ID NO: 83188 - protein, 490 aa, Alteromonas sp.
  REGION 1..490: note = tr|A0A2S9V6G3|A0A2S9V6G3_9ALTE Tryptophan halogenase; OS = Alteromonas sp. 190 OX=2079529 GN=C6Y40_19140 PE=4 SV=1
MSNKPLHVVIAGGGTAGWMTANLLAKRWLNQPVTITLVESPDIGIIGVGEGSTPTLKRFFSDMGIAEQDWMPECNATYKVSIRFEGWSPGANIPAYSHPFISQLDTFSERSFYVNCFHRRMGQDVTTRPDEFLFNGWLAKHQRSPVTPPNFPFRIEYGYHFDSGLVGEFLKKHAQGLGVIHKALNITDVECHPNGDIAALHSKEGERVEGDFFIDCTGFQSLLLQKTLGVNFKSFKDNLFNDSAVVCPTPAQTELPVETRATALSAGWAWQIPLTNRTGNGYVYSSDFISDEQAASELCRHLGVEEESAALRKITMNVGQVERHWAKNCLAVGLSQGFIEPLEATALHLVQTSVEIFLDHVDEGGFSETQRRAYNQLISERFERVRDYIVAHYRLNTRSDSEYWLANQNNENLSDSLLHLLNVWYRRGDLGQEIQRQQLDSHFGNTSWHCLLAGYGAFPPLEKGATATDLYKQNELAAFFEGCLLNFKAQ

SEQ ID NO: 83189 - protein, 496 aa, Alteromonas sp.
  REGION 1..496: note = tr|A0A2S9V6E8|A0A2S9V6E8_9ALTE Tryptophan halogenase; OS = Alteromonas sp. 190 OX=2079529 GN=C6Y40_19145 PE=4 SV=1
MPDAIKKVVIAGGGTAGWMTAALLNKVLGNSVTIELVESEQIGIVGVGEATIPPIQTFNRFLGIDEKAFLRETQGTIKLAIKFENWRKPGESYYHTFGAPGTTMGFCSFHHYWLKAKEAGLDKSFWDFDLNYLACQQGKFNKINTQNPLYDMPYAYHFDSALYGQFLRRFAEQGGVKRTEGIIEHVQQHPQSGFITGLQLTDGRQIEGDLFIDCTGLNGLLIRKTLGVNYEDWSHWLPADSAQAVPSERFDKTLPYTRSIAHSCGWQWRIPLTHRNGNGIVYSSQFTTDEQANETLLGNLDTEALGEPRTIRFNTGRTDQQWCKNVVAIGLSSGFLEPLESTSIHLIQSGIIRLMKMFPNQGISPAMVDMYNAESKDEFETIRDFIILHYHVNERDDSEFWRAMREMTIPDRLAQKIEAFKETAAIFNEQNDIFRDASWVQVMMGQGLSPRDYHAAVNAMDKQTLLSAMQQIQQAKMQPVAKLLGHDEFIERYTSA

SEQ ID NO: 83190 - protein, 508 aa, unidentified
  source 1..508: note = Sphingomonas gei
  REGION 1..508: note = tr|A0A4S1XH11|A0A4S1XH11_9SPHN Tryptophan 7-halogenase OS=Sphingomonas gei OX=1395960 GN=E5A73_05560; PE = 4 SV=1
MPEAPLSRIVIVGGGSAGWMTAAALARLVAAGLAITLVESDEIGTIGVGEATIPPLVDFNAALGIDENAFVAATQGTFKLGIEFRDWGHPGNRYVHPFGNYGRQTQGINFHQIWLRQRLLGVAETDPGPFDLYAISIAAAARGRFTKPAGDPEGVLQGLAYAYHFDAGLYAEFLRMRAEAQGVRRVEGKVVRVEQSSDTGFLSAVVLEGGRRIEGDLFIDCSGFRALLIGETLGVPYRSWRHWLPCDRAVAVPSAAVAPPVPYTRSTADKAGWRWRIPLQHRVGNGHVYSSAHLEDEAAARALLDRLDGAPLAEPRTLRFTAGRREKLWEKNCIAIGLSAGFIEPLESTSIHLIQSGIVRLMASFPDRNFAAVEIAEYNRWLIDEYENVRDFIVLHYHASTRSDSDFWNDCRAMDIPDSLAARLDLWRGKGRVFRGFNALFTEESWTAVLLGQGVMPADSDPLVAMLPVDETTRFLTHMRNIIAQTAEAMPRHEEYIARHCAAAGTTS

SEQ ID NO: 83191 - protein, 498 aa, unidentified
  source 1..498: note = Sphingomonas gei
  REGION 1..498: note = tr|A0A4S1X8X1|A0A4S1X8X1_9SPHN Tryptophan 7-halogenase OS=Sphingomonas gei OX=1395960 GN=E5A73_12905; PE = 4 SV=1
MQRIVILGGGTAGWMAAACLARTLGTSRQTITLIESEEIGTVGVGEATIPLIETFHQILGINSIDVLRASEATFKLGIEFVDWRKKGHRYLHPFGPIGADLNGAGFLQHWLRHRADGGESDLLVYNLESQAAMAGRFGMAQLRAPGDRQLHFAYHFDASLYAAMLRRYSERLGVERVEGMVGHVQRDGATGDVTALALKDGREVAGDFFLDCSGFRGVLIEQTLGAGYDDWSHWLPCNRAVAVQSGRLPELSPYTRSTALDAGWQWQIPLQHRTGNGHVFCDAFISEDQATDAVLARLDTPAITDPRMLRFVTGRRRKSWDHNVVALGLAGGFVEPLESTSIYMVQSALAKLLTLFPRGDRVNPLAADQFNASMATEWERVRDFIVAHYKVTERDDTPFWAHCRNMPIPDSLTERLALFEEEGLFVEQPHDLFKEGSWAAVLIGQGILPRRHHPIADVAPRAALEEQLGSMRAAITARLAELPSHAAYVDLCMGRAAA

SEQ ID NO: 83192 - protein, 501 aa, unidentified
  source 1..501: note = Sphingorhabdus contaminans
  REGION 1..501: note = tr|A0A553W942|A0A553W942_9SPHN Tryptophan 7-halogenase OS=Sphingorhabdus contaminans OX=1343899; GN = FOM92_08265 PE=4 SV=1
MNDAGPVRNVVIAGGGTAGWMAAAALSKMLPMHESTITLVESDEIGIVGVGEATIPPIKTFNGMLGIDENEFVAATKGSFKLGIEFDGWQRAGEAYLHPFGPYGHDINGIKFHHFWLKLQKLGFAVPLNEFNMSAVAARHYRFDRPEHLLAPAGAALDYAYHFDAGLYANFLRAYSELRGVVRHEGKIERVEQNPATGFITELILDNGTQIEGELFIDCTGFRALLIEQCLQTGYDDWSHFLPCNRALAVPTERTEPLIPYTRSTARVAGWQWRIPLQHRTGNGLVYCSSELSEDEASTILMENLDSQPLAEPRPLKFTTGRRKLAWNKNCVALGLAGGFLEPLESTSIHLIQAGISKLLALFPDKDFKSHERDEYNRLTASQWEHIRDFLILHYKLNERPEQFWRHCAAMDVPESLRRKIDLFAGRGRLFRYEDELFTDTNWTAVMVGQGLVPAGYDPLVDAIPDGPMKKLLAGIGQSFRQAADRMPTHADYIMHNCRGV

SEQ ID NO: 83193 - protein, 383 aa, unidentified
  source 1..383: note = Sphingomonas gei
  REGION 1..383: note = tr|A0A4S1XF70|A0A4S1XF70_9SPHN Tryptophan 7-halogenase OS=Sphingomonas gei OX=1395960 GN=E5A73_05185; PE = 4 SV=1
MRHYAEARGVTRHEGRIVEVLRDGESGDVTALRLERRYSASSPPPVRAEPVEAPFFTSASPAESCPSTSSGRTEGGASTQGDTDTTKIPGDLFIDCTGFRALLIGETLGVGFEDWSHWLPCDRALAVPSARATDFTPYTRATAHAAGWQWRIPLQHRTGNGIVYAGAHLSDDEATAHLLANLDEPALDEPRALRFTAGKRRAFWRANVIAVGLASGFLEPLESTSIHMIQSAVERVLKLLPGRRIAEAQRAEYNRQADREMDRIRDFLILHYWANDRDAPFWRARRETPLPEGLAHKIALWRAAGQIVREEGDLFSEVAWLQVLAGQGVAAEGHHPLADRPGRAEIAEYLDLLGKLAAREAAQMPDHAAFIRQNCAAREEIAA

SEQ ID NO: 83194 - protein, 502 aa, unidentified
  source 1..502: note = Sphingorhabdus contaminans
  REGION 1..502: note = tr|A0A553W960|A0A553W960_9SPHN Tryptophan 7-halogenase OS=Sphingorhabdus contaminans OX=1343899; GN = FOM92_08255 PE=4 SV=1
MPNRPIENIVIVGGGTAGWMTAAALSHMLSGQKFAIQLIESEEIGTVGVGEATVPHIRFFNQKLGFNEADFMAKTKATFKLGIEFCNWGRKGDSYIHPFGAFGESIGGVAFHQHWSRMHRSTGIYPIEEYSLPVMAARAGRFAYPSADPDSLLSTYSYAFQFDAGLYAKYLRSYAEARGVKRIEGKITDVALESESGFVQSVQTNQGDSISADLFIDCSGFRGLLIEGALQTGYDNWQHWLPCDRAVAVPCSIAGPLTPYTRATAQDAGWIWRIPLQHRVGNGHVYCSNYISDDAAATALLGQLESAPLAALNQLRFVTGKRRKQWSKNVVAMGLSAGFLEPLESTSIHLIQLAIGRLLEFFPDKSWDPALASEYNRLMDLEYERVRDFLILHYHATERDDTPFWNYVRTMPVPDTLEHKIEMFRERGIVVNYRDGMFLDASWIAVYLGQRIIPQNNDPLGNAIAEADLQVQLERLRSDCRAAAEGLSSHADFIRQIGAHAH

SEQ ID NO: 83195 - protein, 511 aa, unidentified
  source 1..511: note = Sphingomonas gei
  REGION 1..511: note = tr|A0A4S1XET2|A0A4S1XET2_9SPHN Tryptophan 7-halogenase OS=Sphingomonas gei OX=1395960 GN=E5A73_08460; PE = 4 SV=1
MGNRGSAANAIERVVIVGGGTAGWMAAAALSAHLAGTGVSITLVESSDIGTIGVGEATIPTIRRFYAALGMSDAEVMQACQATAKLGIRFVDWLRPGHDFVHPFGRFGQDLKGIDFHHYWRKARDAGDPAPLGDYSLGALLASEGHATLPAPNPASQLGIFDWALHFDAALFAQHMRRFAEKMGVTRIDARIVDVGLRGEDGFIDTLTLDSGVRVRGDLFVDCSGFRALLLGEALGVAYESWSHWLLCDGAFAVQSERAGDPPSCTTVTARSAGWQWRIPLRQREGNGLVFSSRFQSDDDARNELLANVPGKPVMEPRRLRFTPGRRQVAWKKNCVALGLASGFLEPLESTSIALIETGIERLKSLFPDKDFDPAVTGEYNEQSAEEMERVRDFLILHYKLNGRPGPFWQACRAMEVPESLNGKLALWRARGAFVRYRWEMFSPASWLAIYAGFEDLPDRIDPAVAGLDADQLRRSLEGMRRSLQETVADTPSHREFLEIMDGAAAQGRAA

SEQ ID NO: 83196 - protein, 510 aa, unidentified
  source 1..510: note = Sphingomonas gei
  REGION 1..510: note = tr|A0A4S1XCH4|A0A4S1XCH4_9SPHN Tryptophan 7-halogenase OS=Sphingomonas gei OX=1395960 GN=E5A73_08465; PE = 4 SV=1
MRAPDALRKVCIVGGGTAGWIAAAVMAHHFKGKLFEIVLVESDDIGTIGVGESTIPPFMELIAKLDINEQDFVRATQASFKLGIEFEDWHRKGERYFHPFGTIGQQVELSEFYQCWLKARLAGQPFELMDFAPAAAMARSGRFMLPFKAHKTPVGGAAYALHVDAKRVARFLRAHAEDRGVKRCEGIVSDVRLDDRGFVDTLVLKDGREVAADFFIDCSGFRALLIEKALGVGYEDWSEWLFCDRAIAAQTLNVGAPRPYTLAQAQDSGWRWRIPLQHRTGNGHVFCSEFLSDDEATRILLDQVEGEVVAGPMVVPFKTGMRQKIWHRNVLSLGLASGFIEPLESTAIHLIYRGMDFFFRYLPDRNCDPRLAIEYNRRMAADYTEIRDFIILHYCTTQRDDTPFWRKCRDMTLPDSLHERIALFRTNGVLREGLDELFRAVSWHSVFEGMGIRPPTYHPLVDRIDEAKLFDGMNMLRAQLGQVVASLPTHQQFIDAHCRADAVDLGQPGR

SEQ ID NO: 83197 - protein, 507 aa, Asticcacaulis sp.
  REGION 1..507: note = tr|A0A258BJ21|A0A258BJ21_9CAUL Tryptophan halogenase; OS = Asticcacaulis sp. 32-58-5 OX=1970317 GN=B7Z26_02165; PE = 4 SV=1
MSSAPPPLKSIVIVGGGSAGWMTAAALSEALGQSCAITLIESEAIGTVGVGEATIPPIRHFNRRLGIDEATFVRETQGSCKLGIQFVDWGKLGHSYFHPFGQYGAEFDSVPFYHHWMREYLAGRTSGPIDDFSMCWAMAKQGKFAHPSPDRRQIQSTFDYAYHFDAGLYAAFLRRFSESRGVTRIEGRVVDVGLRGEDGFIEAVTLDNGTRVAGEFFIDCSGFRGLLIEEALHAGYDNWQHWLPCDRAVAVPCERGEFTPYTRSTAKAAGWQWRIPLQHRTGNGYVFCDAYLDEARASELILQRLDGKPQADPRVIRFVTGHRKQMWNKNVIAMGLSSGFLEPLESTSIWLVQEAITKLLKYFPKERVTAVQRECFNRDMLSAYDNVKDFLIAHYKVTEREDTPFWAYCKHMDIPDSLKFRLESFAEHNAPLVAPTELFKDASWFAVLAGQGMVPKSYNPAADVMPDDEFRWRMQRIREGSLGLADMMPSHEAYLAKACPSPQLVAV

SEQ ID NO: 83198 - protein, 501 aa, Sandaracinobacter sp.
  REGION 1..501: note = tr|A0A501XRH9|A0A501XRH9_9SPHN Tryptophan 7-halogenase OS=Sandaracinobacter sp. PAMC 28131; OX = 1715348 GN=FJQ54_05830 PE=4 SV=1
MEDTAIRSILVVGGGTSGWISAAVLARFLDPRKTRITVVESEEIGIVGVGEATVPIIRNLNGLLGIDENDFVAATNGSFKLGIEFRDWGETGNVHFHGFGDFGDDIGGVAPHHHWLKLRRLGDKRRIEDYSLPYALGQRGRFTPPNPESGRGDSDYRYAFHFDAALYAQYLRRMCEARGVVRVEGRITNVAQHAESGDIASVTLADGRVLEADFFIDCSGFRGLLIEQTLKTGYESWQHWLPCDRALAVPSSSEGEPPPFTTSTALEAGWQWRIPLQHRDGNGYVFSSRFTDEDRARELLLANIKGEALAEPRLLQFEGGRRRLAWAHNCVAIGLASGFLEPLESTSIQLIQTAIARLIDYFPERRTNPAIRDEYNRLCANEVERVRDFIILHYCLTRRTEPMWEFVRSMELPETLAAKIDLWKAMGRVPMMTEESYQEPSWAAIFLGNDVLPDRYDPLVDRIDPDMLARGMAARRADYAAWAERMPTQAAYIRRHCAMPA

SEQ ID NO: 83199 - protein, 482 aa, unidentified
  source 1..482: note = Sphingorhabdus contaminans
  REGION 1..482: note = tr|A0A553W939|A0A553W939_9SPHN Tryptophan 7-halogenase OS=Sphingorhabdus contaminans OX=1343899; GN = FOM92_08260 PE=4 SV=1
MRILYGRSAPMPIDRIVIVGGGVAAWLSALALTLKVTGMIIVIDTEGIDDSLGIPLAIEPTLPSLADLHALIEIDEDNLVVQTGSSFGLGRALSNWGPSEAVAFHPYGEIGANLGPVAFQHLIARIRADGGTANLANYSVAALCAQSGRFAPYRGNARSVLSTMSHGLHLQIDRYRHFIKNAALQNGASVVVGIPEEIHVDAKNQISSIRLSSGQIVMGDFFLDCSGPARLVSGKMAGFSFEDWSEWLPNNEVKQSVTPSTAPPPLYAHVEAHDQGWQRFVSCQDHVEELFFTRRAQMYDAGAYTFTNGRIRTPWTGNCLAIGGAAAVIEPIASTQLHLAASAISRLLDLFPHRRDSSVEAIEYNRRTIEQLENARDYAILHFANQHQSKHRFPGRLANRLSAYQASGRVALYDEETFETWDWIALFETLGIAPRRYDVVADGISRGAIAEHVERVRSVMLTAVSTLPTQQSYLHTRRDDLA

SEQ ID NO: 83200 - protein, 520 aa, Novosphingobium sp.
  REGION 1..520: note = tr|A0A4D7DN26|A0A4D7DN26_9SPHN Tryptophan 7-halogenase OS=Novosphingobium sp. ABRDHK2 OX=2571749; GN = FA702_20235 PE=4 SV=1
MVRAVRDVVIVGGGTAGWLTAAIIAARHRPRMGHDFSVTLVESPNVPIIGVGEGTWPTLRSTLKSVGISETDFFRECDAAFKQGALFAKWTTGADDDAYYHPLVLPQRFGQLNLAPHWLAGTLAEDDDADETFCDAVCPQGRICDENLAPKTMADAEFEGQANYAYHLDAGKFAPFMQRHCTEKLGVRHVLADMRQVLQDESGDIRAIVTEQAGEIAGDLFVDCTGMRSLLLGETMGVGFKDCNDVLFCDTALAVQVPYPDPDAPIATHTISTAQSAGWIWDIGLPTRRGVGHVYSSRHISREQAEAELRAYIGPAADGLAVRKIDIRSGHRELFWKGNCVAVGLAAGFLEPLEASAIVLIELSAKMIAEQMPPAREVMDIVARRYNEKTLYRWGRIIDFLKLHYVLSQRRDTAFWRDNMDPATIPERLRELLALWRWQPPYMHEEFDRVDEVFPSASYQYVLYGMGFRSEVSARALEPEVRDARRARGQNADVTARMLTALPRHRDLINRIVEYGLQPV

SEQ ID NO: 83201 - protein, 500 aa, unidentified
  source 1..500: note = Lentzea guizhouensis
  REGION 1..500: note = tr|A0A1B2I0U1|A0A1B2I0U1_9PSEU Tryptophan halogenase; OS = Lentzea guizhouensis OX=1586287 GN=BBK82_44290 PE=4 SV=1
MTASYLTAAFGDRVNVTLVESARVGAIGVGEATFSTVRHFFEYLGLEEKEWMPACNATYKLAIRFENWREPGHHFYHPFERQRVVDGFPLTDWWLREPKSDRFDKDCFLVGTLCDDLKSPRHMSGELFEGGLGERSSYRTTLAEQTTQFPYAYHFDATLVANYLRDYAVARGVKHVLDDVQDVALDDRGWISHVVTKENGDLTGDLFIDCTGFRSLLLGKALQEPFESYQSSLPNDSAVALRVPQDMENRGLRPCTTATAQEAGWIWTIPLFDRIGTGYVYASDYTTPEEAERTLRAFVGPAAEHADANHIKMRIGRSKRHWVNNCVAIGLSSGFVEPLESTGIFFIQHGIEQLVKHFPDARWDDGLRTSYNRLVNNVMDGVREFLVVHYYAAKRQDNQYWKDTKTRPLPDGLAERLERWQTRLPDNESVFPHYHGFESYSYVCMLLGLGGLELKSSPALGLMDRSSAQHEFKLVAEQAAELARTLPTQYEYFAQLHRAR

SEQ ID NO: 83202 - protein, 533 aa, Streptomyces sp.
  REGION 1..533: note = tr|A0A1C4HZ99|A0A1C4HZ99_9ACTN Tryptophan halogenase; OS = Streptomyces sp. DfronAA-171 OX=1839777; GN = GA0115252_100419 PE=4 SV=1
MPETDNRIRKVVILGGGTAGWMTASYLGKALQGTVDIQVLEAPAIPRIGVGEATVPNLHRVLFDYLGIPEEEWMRECNASFKMAVKFVNWRTPGRGEPDSRTRPDGKPDHFYHPFGILPDHDNTPLSHYWFKNKYEGVTDKAFDYSCFREPPVMDAKKSPKWMNGESSTRYAWHFDAALVADFLRRFATDKQGVEHIQDEMVRAEQDERGYVTALHTKSGRVLDADLFVDCSGFRGLLINKALGEPFIDMSDHLMCDRAVATAVPHDDDANGIEPYTSAIAMSSGWAWKIPMLGRFGSGYVYSSRFTTQEEATREFCELWNLDPETTKFNHVRFRVGRNRRAWVNNVVSIGLASCFLEPLESTGIYFITAAIHQLAKHFPDRTFPQALVDSFNEEIEVMFDDTRDFIQAHFYYAPRDDSEFWRAQKTLKLPENIQRKIAAYKAGLPINSPITDESTYYGNFEAEFRNFWTNGSYYCVFAGLGLEPDAPLPALAHKPESVAGAQPLFTKVAQEQRHLLDTLPSAHDYLRRLHAK

SEQ ID NO: 83203 - protein, 515 aa, Lentzea waywayandensis
  REGION 1..515: note = tr|A0A1I6DE10|A0A1I6DE10_9PSEU Tryptophan halogenase; OS = Lentzea waywayandensis OX=84724 GN=SAMN04488564_102370; PE = 4 SV=1
MLKNVVVVGGGTAGWMTASYLTAAFGDRINVTLVESARVGAIGVGEATFSTVRHFFEYLGLEEKEWMPACNATYKLAIRFENWREPGHHFYHPFERQRVVDGFPLTDWWLRDNRSGRFDKDCFLVGTLCDDLKSPRHRDGELFEGGLGQRSAYRTTLSEQTTQFPYAYHFDATLVANYLRDYAVARGVTHVLDDVLDVTLDDRGWISHVVTKEHGNLTGDLFIDCTGFRSLLLGKALAEPFVSYQDSLPNDSAVALRVPQDMENRGLRPCTTATAQDAGWIWTIPLFDRIGTGYVYAGDYISPEEAERTLRAFVGPAAEHADANHIKMRIGRSSRHWVNNCVAIGLSSGFVEPLESTGIFFIQHAIEQLVKHFPDARWDDGLRTSYNRLVNNVMDGVREFLVVHYYAAKRQDNQYWKDTKTRSLPDGLAERLERWQTRLPDGESVFPHYHGFEAYSYVCMLLGLGGLDLKSSPALNLMDPSSAQHEFKLVGEQAAELARTLPTQYEYFAQLHRAR

SEQ ID NO: 83204 - protein, 499 aa, unidentified
  source 1..499: note = Sphingomonas gei
  REGION 1..499: note = tr|A0A4S1XF36|A0A4S1XF36_9SPHN Tryptophan 7-halogenase OS=Sphingomonas gei OX=1395960 GN=E5A73_07215; PE = 4 SV=1
MNQPRKKVIVVGGGTAGWMAASALARLLPHAASVELIESAEIGIVGVGEATLPHLRAFIQTLGLDEAEFMAATHATYKLGIEFRDFGKPGDAYLHPFGDFGRPLNDVPFLHWWLRMHARGQGGDIGDYCVANVMAAQRRFAPPAADPDSLLSAYSYAYQFDATRFGPFLRGFAEKHGVKRTEGRIVSVERDAETGDVAALLLESGARIEGDLFVDCSGFRSLLLGAALGEDWEDWSHWLPCDRAMALPCASPPGEIEPLTRATAMPAGWRWRIPLQHRIGNGYVYSSTHLSDEDAAAAILAAVEGDPLADPRVLRFRAGRRKRSWSHNVVAVGLASGFLEPLESTSIYLVQVAIQQLIDLFPIGAIENSDRDEFNAQVDYEYDRIRDFLILHYHASTRDDSAFWREARHMPIPDSLTEKIELFRRAGRIQRYSRGLFFAPSWIAVLIGQGVMPESWDQRVDAANPHELGHALDRLRAQIARDVATLPGHGAALGLQEPA

SEQ ID NO: 83205 - protein, 509 aa, unidentified
  source 1..509: note = Sphingomonas gei
  REGION 1..509: note = tr|A0A4S1X3M4|A0A4S1X3M4_9SPHN Tryptophan 7-halogenase OS=Sphingomonas gei OX=1395960 GN=E5A73_19010; PE = 4 SV=1
MSVFRDQVTSDTKRVRSVVILGGGTAGWMTAAALARQFGAALDIKLLESEEIGAVGVGEATIPTIHWFNALIGLDESAFLRETKATFKLGIEFVDWTRPGYRYFHPFGAFGARLGGVAFHHRWIKARAEGLDLPLAAFSLAETLAAQGRFAKPEGDARSILSTLGYAYHFDASLYGRHLRGIAQANGVTRVEGRLQDVERDPESGLIIALTTQRNERLAGELFIDCSGFRALLIGGVMQSAFEDWSHWLPCDRAVAVPCERVAETTPFTRSTARQAGWQWRIPLQHRIGNGHVFSSRFLSEDEATATLLANLDGAVLAEPRTLRFTAGTRRKAWVGNVVALGLSSGFLEPLESTSIHLIQSGIAKLLTLFPDRDMDPMLADRYNMLLNADMDTIRDFLILHYHANPGRAEPFWVERREMPLPESLQAREAHYRRSGRLMLGGDELFREASWLAVLNGQGIVAEDYNPLADTLDGASNIAQLRQIAEVIARASPTLPLHDAALAAAMAQG

SEQ ID NO: 83206 - protein, 497 aa, unidentified
  source 1..497: note = Sphingomonas gei
  REGION 1..497: note = tr|A0A4S1XC95|A0A4S1XC95_9SPHN Tryptophan 7-halogenase OS=Sphingomonas gei OX=1395960 GN=E5A73_07950; PE = 4 SV=1
MEQIRRILIVGGGSAGWMAAALLAKLFQGLYQITLIESEEIGTIGVGEATIPAIKKYNDLLGLDENDFLRRTQGTFKLGIQFVDWLRQGSSYIHGFGVIGQDLGWLRCHQYWLKMHGLGRASDFAAYSINTAAALEDKFRRADPKMAESPIGHIANAFHFDASLYAKFLRGFAEERGVIRREGKVVDVALRTDGFVESVTMADGEALEADLFVDCSGFRGLLIEQAMATGYEEWTQWLPCDRAIAVPCARSAAFTPYTRATARSAGWQWRIPLQHRTGNGHVYSSRYVDDAEAERVLLADLDGEQLAEPNRIRFVTGKRRRTWNRNCVAIGLAAGFLEPLESTSLHLIQSAIIRMVRLLPDARFDPATIAEFNRQTDFEYERVRDFIILHYKATERSDTPFWRYCRDMEVPDTLRRKIDLFAANGRIFREDEELFAEESWIQVLLGQGVIPRGYDPLVDIKSEAQIGQYLGNIERVIRKCVDLMPTHADYVARTCPA

SEQ ID NO: 83207 - protein, 561 aa, Phaeobacter gallaeciensis
  REGION 1..561: note = tr|V9WFB2|V9WFB2_9RHOB Uncharacterized protein; OS = Phaeobacter gallaeciensis DSM 26640 OX=1423144; GN = Gal_00772 PE=4 SV=1
MNNRLRRITIVGGGTAGWMTALILETELSRTSAPKDRPKICLIESPNIATVGVGEATVPRMPKTLRQAGISERAFFRETNASFKLGVKFCNWNTDAKGNRIDYVNPFAHGQLLEGLEPAEYFLRFGNGDRDYTQSISPHDDLGRLCKGARPLGQPEFEQRFGYAYHLDAVKFAGMLTKVCTKHGVEHIQDEVTSVELDEQGNVSHLMLEQRGRHDVEMVIDCTGFRGLIINQALGEPFMDYSDYLPNDRAMALQIDHPNPEKIESLTRSTALGAGWTWRVPLYNRVGTGYVFSSAHRTDDQAADEYLAWLGDSGKGATPRIIPMRIGRVRNAWVKNCVAIGLAGGFIEPLESTAIHMIDHAVRWLTEHMPTRDIAPSLRSRYNRQMDKLYDEVLEFICLHYRLGNRTDDQYWIDARTEMKIPDRLAENLELWQHRLPMPHDIEFATLFDYRVYQTVLLGKQVYDTGYGPGIRDRLRPLKKPIWFQWWKGAKVDLAQILKSMPDHKTLLRDIRGELDQRGFGMAAAMKPTVSMPCPEAVPCMIQNMPSFSEIENGQKDLQLF

SEQ ID NO: 83208 - protein, 413 aa, Asticcacaulis sp.
  REGION 1..413: note = tr|A0A258B6W3|A0A258B6W3_9CAUL Tryptophan halogenase (Fragment) OS=Asticcacaulis sp. 32-58-5 OX=1970317; GN = B7Z26_09360 PE=4 SV=1
MGTVGVGEATIPPLVNLFIFLGIPEHEMLAVVQGTYKLGIEFVDWHRKGHRYTHAFGSPGRDLGIVPFYEYWLKEHLAGRGGSLWDYSLNDLAAQANRFAPLKQVPNAPMAGLTHAWHFDAGLLAKFLRRACEAQGVIRREGMVSGVNLRAEDGFIDSLTLSDGAVIEGDLFIDCSGFRGLLIEGALKAGYEDWTHWLPCDRAIAVPCASTETLLPYTRATAHSAGWQWRIPLQHRIGNGHVFCSAFMGEDEARDILMKNLDGKALADPRTLTFTTGRRKASWVKNCVAFGLSSGFMEPLESTSIHLVQSGMTRFLKFFPDKGFSPLEIAEYNRLTRHEYELIRDFLVLHYKATLRDDSDFWNHCRTMAIPDSLAHKIDYFREHGRLPPKSSCNCSAATATARPMCISSSRRP

SEQ ID NO: 83209 - protein, 510 aa, Dyella thiooxydans
  REGION 1..510: note = tr|A0A161IVW9|A0A161IVW9_9GAMM Tryptophan halogenase; OS = Dyella thiooxydans OX=445710 GN=ATSB10_28850 PE=4 SV=1
MNEQAIRNIVIVGGGTAGWMAAAAFARVLGSACTIRLVESEEIGTVGVGEATVPHLKLFNNLLEIDEIEFVRQTQGTFKLGIQFNDWGRIGDSYIHGFGELGHDLGLVPFHQCWGRARQLGFAGDLGDYSINTLAAPRGRFMASASDAPRNSPLANIAYAYHFDSGLYARFLRRYAEARGVQRTEGKVAQTRLRPDNGFVEAVVMENGGAIAGDLFIDCSGFRGLLIEQALHAGYEDWTHWLPCDRALAVGCEKVGPPTPYTRSTARPAGWQWRIPLQHRTGNGYVYSSAHVSDDEAAATLLANLDGKALGDPRSLRFTTGMRRKFWDRNVVALGLSSGFMEPLESTSIYLIQSGIAKLLNLFPRQGISPVLVDRYNEQSRFEFERIRDFLILHYHTTQRDDTPFWNQCRTMDIPTSLKDNIALFRDSGRFFRNAEEMFALVSWVQVMIGQGIVPQACHPLADQISPQELRAFMQHVRRVIADCVQAMPAHEAFIARYCAAPVPGAPMPA

SEQ ID NO: 83210 - protein, 501 aa, unidentified
  source 1..501: note = Sphingorhabdus contaminans
  REGION 1..501: note = tr|A0A553WGR4|A0A553WGR4_9SPHN Tryptophan 7-halogenase OS=Sphingorhabdus contaminans OX=1343899; GN = FOM92_00090 PE=4 SV=1
MAIEKIIIVGGGTAGWMTAAALSRLRAGRPVDITLIESEEIGTVGVGEATIPPFLDFNRLLEVDEREMLSAVQGSFKLGIQFVNWGKLGDSYIHPFGAYGYQVEGISFHHVWHKYHQAGDKRPIQVFNIETMAAHFGRFARTEDYQREDLPPVNYAYHLDAGRYARYLRAYAEKRGVVRREGKVADVALNGENGFVSSVTMDNGDVIEGDLFVDCSGFRGLLIEQALKTGYEDWTNFLPCNRAVALPCVREDGSGPLPYTRATAHTAGWQWQVPLQHRNGNGHVYCSEFMSDDEALSILLGNIAGKPGADPNYLRFTTGRRKKFWNKNVVALGLSAGFMEPLESTSIHLINTGINKLIALLSLDGITQAQEDAFNRLTGKEYARIRDFLILHYNTTTRDDSPFWDYCRNMAVPETLTEKTDLFRLNGQIFREDDELFTETSWAAVMMGQGIMMGGHNPMADAVREPATAKEMDAMEQSIRFVVQHMPSHGDYLQKYCPAPA

SEQ ID NO: 83211 - protein, 499 aa, Alteromonas sp.
  REGION 1..499: note = tr|A0A2S9VG51|A0A2S9VG51_9ALTE Tryptophan halogenase; OS = Alteromonas sp. 190 OX=2079529 GN=C6Y40_01305 PE=4 SV=1
MTTPPKQIVIAGGGTAGWIAAVALARKMGPLVNIRLVESSTIGTIGVGEATIPPLRTFHKLLQIDEQAFMRATAATFKLGIRFENWGRIGEQYIHSFGMTGQQSWLAEFVHFYLSAKARGLEGDYGDYCFELEAARQHKFATSAQSNIQYAYHLDAGNYVAFLKRFCSNLGVTHCDGVISQVLQHDNGDIKALRLASGELIEGDFFIDCTGFKGLLIEETLHTGYEDWSHWLLCDSACAVQTTSTEPAAPFTRSAAHHAGWQWEIPLQHRTGNGNVYSSAFMDDNEASEQLMQNVKGEAITTPRTLRFKTGRRNKAWHRNCLALGLASGFVEPLESTSIHLVIMGITRFMQLFPHGGNYQALTDEYNQQTQLELERIRDFIILHYHVTQRDDSPFWEHCKNMTVPDSLQTRIALFKEQAHAFQKQNELFRVDSWAQVMLGQGVTPDYHHPAAAMLSDAQLNQSMQQQRQRVLQAVAQLPAHEDFIRRYCATPQKAEALL

SEQ ID NO: 83212 - protein, 508 aa, unidentified
  source 1..508: note = Opitutae bacterium
  REGION 1..508: note = tr|A0A2E9RQ79|A0A2E9RQ79_9BACT Tryptophan halogenase; OS = Opitutae bacterium OX=2026771 GN=CMI26_00010 PE=4 SV=1
MSNENLKNIVILGGGTAGWMAANLLQKKWRHLGINITVVESPDIGIIGVGEGSTPLLKDFFDSLDISESEWMPKCNATYKNGISFNNWSTVAGYEAYFHPFPCSLDFATFGLLYKYSALRRKGVDVLAHPNRFSLMSNLTQKKLAPIPSENFPFHFQYGYHFDSVLIGKFLRDRAKADGVAHIEATVEHVEQSLNGDIKLLKLNNGEEIAGDFFVDCSGFASILLQKTLKIPFVSFGENLFNDSAVAIPTELEPNIPSETISTALSNGWAWKIPLTNRYGNGYVYSSHYLSKEAAETELRSHLGILDRDVEARHLKMRVGRTEESWSKNCLAVGLSQGFIEPLEATALQFVYSTVDEFAKALEEGSFTNQYREEFNNRMNRNFEGIRDYIVLHYKTNSRTDSQYWVDNRENNNLSNNLKEMLKCWYGIEDIEAALSRLNIGNYYSQRSWACLLAGVGVFPRQENLSAADAESAKMAEADLDYVDKFITGCSMNFEPHERKLAVKSPNS

SEQ ID NO: 83213 - protein, 502 aa, unidentified
  source 1..502: note = Actinobacteria bacterium
  REGION 1..502: note = tr|A0A2N3G2Q6|A0A2N3G2Q6_9ACTN Tryptophan halogenase; OS = Actinobacteria bacterium HGW-Actinobacteria-3; OX = 2013648 GN=CVT63_08335 PE=4 SV=1
MSIQPIRDIVILGGGTAGWMSAAALSKLLPPSCRIRLIESEEIGIVGVGEATIPNIKHFNAALDIDEDEFLKATQGTFKLGIEFVNWGQLGDRYIHGFGKVGPDTSLVGFHHYWLRLKQLGKASGLDAYSINTVAPRQARFLRYRKDMPGSPLGDIVHAFHFDASLYARWLRGLAEKRGVVRTEGKVKQVLRRAEDGFIEALVMESGEQINGEFFIDCSGIRALLIGDALGVGYDDWSHWLPCDRALAVPSAPVKPLLSMTRSTAHSAGWQWRIPLQHRVGNGHVYSSRFMSDDEATSILLANLDGEKLADPRLIRFRTGMRRKLWERNCVAVGLSSGFLEPLESTSIHLIQTAISRIATFFPHAGFDAADIDEYNAQGELEYQQVRDFLILHYKATERTDSAFWNYTRTMSIPATLQRKIDLYRSNGRLFRDGNELFAEPSWLQVMEGQRIHAQGYHPFAGFMPESELCEFVGGVEAVIGKCVGVMPDHAQFIAEHCAAQR

SEQ ID NO: 83214 - protein, 538 aa, Burkholderia cepacia
  REGION 1..538: note = tr|A0A0U4CAU2|A0A0U4CAU2_BURCE Tryptophan halogenase; OS = Burkholderia cepacia JBK9 OX=1395570 GN=P350_37320 PE=4; SV = 1
MSNPIKNIVIVGGGTAGWMSASYLVRALQQQANITLVESEAIPRIGVGEATIPNLQKVFFDFLGIPEREWMPQVNGAFKSAIKFVNWRKSPDPSRDDYFYHLFGSVPNCDGVPLTHYWLRKREHGFQQPMEYACYPQPEALDAKLAPCLPDGTRQMPHAWHFDAHLVADFLKRWAVGRGVKRVVDEVVEVHLNERGYISSLSTKEGRTLEADLFIDCSGMRGLLINQALKEPFIDMSDYLLCDSAVASAVPNDDARVGIEPYTSAIAMNSGWTWKIPMLGRFGSGYVFSSKFTSRDQATADFLNLWGLPDKQPLNQIKFRVGRNGRAWVNNCVAIGLSSCFLEPLESTGIYFIYAALYQLVKHFPDASFDPRLRDAFNAEIVYMFDDCRDFVQAHYFTTSRDDTPFWLANRHDLRLSDAIREKVERYKAGLPLTTTSFDDATYYETFDYEFKNFWLNGNYYCIFAGLGMLPDRSLPLLRHRPESIDKAEAMFARIRREAERLRTSLPTNYDYLRSLREGDAGLSRSQPGPALATPEIL

SEQ ID NO: 83215 - protein, 500 aa, unidentified
  source 1..500: note = Sphingorhabdus contaminans
  REGION 1..500: note = tr|A0A553W944|A0A553W944_9SPHN Tryptophan 7-halogenase OS=Sphingorhabdus contaminans OX=1343899; GN = FOM92_08270 PE=4 SV=1
MTDNRIRSIAIVGGGTAGWMTASALSKVLGRDYAKITLIESDAIGTVGVGEATIPQINIFNRMLGIDENDFVRRTKGSFKLGIQFVDWGRKGHTYFHPFGKYGVDMEGVSFHAYWQRLYQSGLAPWIDEYSIQAKAAECGKFMRPIDAGNSPLSQISYAFHFDAGLYALFLREYAEAAGVVRHEGKITRIVQHGENGFVEAVELEDGSRIEADLFIDCSGFHGLLIEGALQSGYVDWSRYLPANRAMAVPCAGKEDITPYTRSTARDAGWQWRIPLQHRIGNGYVYCSDFTSDEAVYDTLLANLDGEPLAEPRIIKFTTGHRKKYWVKNCVAIGLASGFMEPLESTSIWMIQSGIARLLSNFPDRSFNPVDIERYNRVITTETEEIRDFLILHYKATERSDTPFWNYCRTMEIPERLAEKIAVFENSGRCFRENEELFNDTSWFAVMTGQLMKPRTFDPVAQLLSLEETQSRLKQIQTAVTNSADYMPKHRDFIRDNCAA

SEQ ID NO: 83216 - protein, 235 aa, Asticcacaulis sp.
  REGION 1..235: note = tr|A0A258AWT1|A0A258AWT1_9CAUL Tryptophan halogenase (Fragment) OS=Asticcacaulis sp. 32-58-5 OX=1970317; GN = B7Z26_11010 PE=4 SV=1
MNSKRNILIVGGGTAGWLAAAYLAKFFDIGEQQQLNITLLESADIGIIGVGEGTFPTIRNTLKFLGIDEAQFMRQTSATFKQGIRFADWVRTPHNGQHEHYFHPFEAPFYTEGAGLLPYWLLQDEATRLPFAQAVTFQKRVAEAQRAPKRPHEGDFTGPLNYAYHFDSVKLAHVLAERARDLGVRHLSGTLKGVEVDSTGAIAHILTHEHGALTADLYIDCTGFRAELIGKALNA

SEQ ID NO: 83217 - protein, 507 aa, unidentified
  source 1..507: note = Sphingorhabdus contaminans
  REGION 1..507: note = tr|A0A553WHW5|A0A553WHW5_9SPHN Tryptophan 7-halogenase OS=Sphingorhabdus contaminans OX=1343899; GN = FOM92_02220 PE=4 SV=1
MESALKQIVIVGGGTAGWMAAAAFARFLGPGFSIHVIESDEIGTVGVGEATIPAIQLFNQNLGIDEKEFVRATQGSFKLGIEFADWYAPGNRYIHAFGAVGRPLGLLPFHHYWLRHHQQGGTSSLWDYSPTALAAAQNRFSPPQEKPGALPSGVAYAYHFDAGLYAAFLRRYSEARGVVRTEGKIVGTELNSQSGFIDAVTLSSGVNISGDLFIDCSGFRGLLIEEALHSGYEDWTEYLPCNRALAVPCASANPLTPYTRSTAREAGWQWRIPLQHRIGNGHVYCSDFIDDARATDILMENLDGAPLAEPRQLRFVTGKRRQIWKKNCIALGLASGFLEPLESTSIHLIQSGIAKLLNFFPSGRPDQADIDAFNTQMDFEFHAIRDFIILHYKANNREGAFWTHCREMDVPDSLAAKMELFQANGRIVRHNEELFTELGWLQVMWGQGLRPRGYHPLADQLTPAQLQEFLSVAHKHADFVASQMAPHQDYITAQCAAPPLEMKKAMP

SEQ ID NO: 83218 - protein, 513 aa, Alteromonas sp.
  REGION 1..513: note = tr|A0A2S9V700|A0A2S9V700_9ALTE Tryptophan halogenase; OS = Alteromonas sp. 190 OX=2079529 GN=C6Y40_18110 PE=4 SV=1
MITRVVVVGGGTAGWLTAGIIAAKNPLVGENSHTEVILVESPDVKNLGVGEGTWPTMRDTLRLLGIAEKQFLSECDASFKQASKFVGWQQGGEDKYYHPFTAPAGFGAVNLVEAWHDEGCPGDFESWVCAQGMACERYQAPKMPQLPEYAYNFNYGYHLSADKFVALLHRHCTEQLGVQYKSAHVAGIQSHPDGAIAAIELAQGEPLAGDLFIDCSGFSARLIGQHYNVPFVSKRHILFNDTAVAAQVNHASDQTPIASCTVATARPHGWVWDIALQSRRGIGHVFASELTTETQAEDALRAYISSDESLSQKAIMPRTIRFDPGHRARFWEHNCVAIGVSAGFVEPLEATALVLIEKSAEWIAEQLPRSRAAMAVLRKRYNDMTDARWDEIIDFIKLHYVLSERRDSPYWQAHADPASWTDSLQEALQLWQSQPPGLLETNLRQELFSSASKQYVLYGMGFRSRDWQPGGITSLRKPLIERVRREFLHNGDKLLAQLPTNRDYFNRLKATSA

SEQ ID NO: 83219 - protein, 519 aa, Alteromonas sp.
  REGION 1..519: note = tr|A0A2S9VF27|A0A2S9VF27_9ALTE Tryptophan halogenase; OS = Alteromonas sp. 190 OX=2079529 GN=C6Y40_03265 PE=4 SV=1
MRKSVLIVGGGTAGWITAAYMARMLAADTPGGVSITLVESEEIGILGVGEGTFPIIRKTMGRIGLDESDLIKHADATFKQGIRFNNWKKNPADDPNDSYFHPFQVASQHTDMDLLPYWLLGVAGDVPWSECCTVQERAVEAKLAPKLISHPNYEAPLNYAYHFDATKLAALVRRRAMEMGVKRLIDTIDDVKLDEGGAIASVTAREHGELTADLFIDCTGFRARLIGETLGSEFTSYKNELFCDRAVALQVPYEQAGGPIPSCTYTTAKDYGWIWDIGLHERRGLGYVYSSKYCDEETAVATLKAHIGPAADNLQHRLLKFEPGYRKTQWHKNCVGIGLSVGFIEPLEATGISFAEVAALMLCNLFPWSGDYERSATQFNNAMSKRFEHVKDFIKLHYYLTDRDDTAFWRDNQDPATASEYLKGKLEQWRHRPPSFLDIDASHDIFDENSWQYILYGMGFKTDISAREGALRFFDDARNEFASIRQQSENAKRAVPTHRDLVSEVCQNGFKPQPRRARR

SEQ ID NO: 83220 - protein, 500 aa, unidentified
  source 1..500: note = Sphingomonas gei
  REGION 1..500: note = tr|A0A4S1XGK4|A0A4S1XGK4_9SPHN Tryptophan 7-halogenase OS=Sphingomonas gei OX=1395960 GN=E5A73_08530; PE = 4 SV=1
MTDQRIRNIVIVGGGTAGWMSAATLARILGPEYASITLIESDAIGIVGVGEATIPQMATFNRMLGVDENDFLRATKGSFKLGIQFVDWGRRGHTYFHPFGKYGVDMQGVSFHAYFLRLHQMGEAPDVDLWSLQAMAARGNKFMRPIDAGRSPLSDIAYAFHFDAGLYARFLRGYAEERGVVRREGRIVDVKLRGEDGFVQSVVLEDGSHVEGDLFVDCSGFRGLIIEQALKAGFTDWSHWLPCDRAIAVPCESVEEWTPYTRSTAHTAGWQWRIPLQHRTGNGHVFCSDYMSDDEATSILLANLDGKPLAEPRTVPFRTGHRNKFWVKNCVALGLAGGFIEPLESTAIWLIQSGLSRFLTMFPDKRFNQADVDRYNRIMATDYEEIRDFIILHYHATERDDSPFWERCRTMAIPERLAEKMRVFRSHGRAFRENEELFNDTSWFAVMHGQLLRPQGFDPVAEVMRLDETRARLAHIREAVGNSADYMPKHRDFIQENCAA

SEQ ID NO: 83221 - protein, 517 aa, Alteromonas sp.
  REGION 1..517: note = tr|A0A2S9VF07|A0A2S9VF07_9ALTE Tryptophan halogenase; OS = Alteromonas sp. 190 OX=2079529 GN=C6Y40_03260 PE=4 SV=1
MSHSANPVNTPEVKRVVIVGGGSSGWMCAAAIARIAPPETRITLVESEDIGVIGVGEATIPTLMEFNDFLGIKEHDLLRECQGTYKLGIDFVDWYQKGESYFHPFGFYGRDTPEFSFHQLWLRLNAMAEKGEIPADAPGIISDYNLCSVAAKQGRYAPPQGGADTILSTMRYAYHFDSARYGQMLRRYAEQRHVERIEGIVNSVERDHNTGLLQSVTLNSGQVLQGDLFVDCSGFKALLIDGAMQSEFVDWHHYLPCDRAIAVQTKLAGAPDPFTRSTADDAGWRWRIPLQTRLGNGHVYSSDFMEHDEALQKLLAGVEGEPVTQPLPLKFRTGHRKAFWDKNCVAIGLAGGFIEPLESTSIHLTQMGIQRLVNLWPGRGCNRSEIAQYNALMTADYERLRDFIVLHYNATEREDTEFWRYVKHMAIPDSLAAKLEIFRSSGRVIPSPEDLFTPHSWLAVMLGQGIYPQNYDVLVDRVPAQALLKNMQMLRMSVAKTAGSMPTHEEFIRRYCQASAA

SEQ ID NO: 83222 - protein, 503 aa, Shewanella sp.
  REGION 1..503: note = tr|A0A2M7HN73|A0A2M7HN73_9GAMM Tryptophan 7-halogenase OS=Shewanella sp. CG12_big_fil_rev_8_21_14_0_65_47_15 OX=1975537; GN = COW15_19045 PE=4 SV=1
MKVKRTIRKIIILGGGTAGWMAAAALANNPVFAAIELCLVESDNLGTIGVGEGSTPHLKRFMDNLGISEKDWMEQCHASYKTGIDFINWNGDGQQYFHPFYFQLDVKPAEVFFVNANARRRGHGHAVKPDDFFSSGVLAKRNLSPTPRKTLPSANEYGYHFDATELAHYLKNYACQRGVRQIIGDVVEVSTTQNQYIEALTLASGEQLSADFFIDASGFSAKLIHQSLEVPFQSFADELLNDSAVTVPISLEVSQTVATQPQVKYHTRATALSAGWLWQIPLTHRTGNGYVYSSRHLSANAAAKELLHSVNLPESTPVRFLKMRVGVSEKAWHNNVLAIGLAQSFIEPLEATSIMMTQFTLERFMALFERYQLNKQAAVLSRQTLNQAVMQLVLGVKDYIQAHYVTSQRNEPYWIAARKIVLSKRLTQLLQAWYRGEDFDLLLYQYDQQLAYFRPSWYALLAGMDYRDPKLKRPFEPISADITAQAIRYCQTLVEQYFHPSPQ

SEQ ID NO: 83223 - protein, 473 aa, unidentified
  source 1..473: note = Sphingomonas gei
  REGION 1..473: note = tr|A0A4S1XGS6|A0A4S1XGS6_9SPHN Tryptophan 7-halogenase OS=Sphingomonas gei OX=1395960 GN=E5A73_07220; PE = 4 SV=1
MSDRAIRSIAILGGGIVGLSAAAAFARALPQLAITVIETPPDPAALADRLPGSTSAIHRFHASIGLEEQALLRAGAAVPRLGLRFRNWPAGAETWYHVHGEHGAAAGKVAFHQLWARARREGRADAWHLYAAAGVLAEAGKFAHPQPDTPLAAFDYALRLEPGRYRETLATLADRLGVTRRSGTFGSAEQREDGAVAALLLVDGQRIAADLYLDASGPAAPLANLMSQGFEDWGSMLPYHHVEIGEGPASAADPNDTIIGGAQGWQFASPLGARTFLGSVHASPATIDAHSVAIRPGRRSEPWCRNVLALGDAAVALDPLHWPNLHLAQSGIARAIELLPGRDCHPVEIAEYNRRARAEAEQMRDFQVLHYLRTGANTEVPHSLAAMLEQFERRGRFVHQDEDSLLEEVWISALFGLGVLPRDIDPLAAAVPADSAAAGMAGMRSQLARLPAGLPSFGDYLARGGAPAPPRSC

SEQ ID NO: 83224 - protein, 483 aa, unidentified
  source 1..483: note = Sphingomonas gei
  REGION 1..483: note = tr|A0A4S1XEB2|A0A4S1XEB2_9SPHN Tryptophan 7-halogenase OS=Sphingomonas gei OX=1395960 GN=E5A73_08525; PE = 4 SV=1
MTAAALARMVRAGVAVTLVESDAIGIVGVGEATIPPIRSFNAMLDIDENDFLANTQGSMKLGIEFLDWNQPGHRYLHPFGEYGFSVEGVRFHQIWQKLRAAGRAGPIDQYSMCAVAAGRNRYAAPATEQTSPLSQLVQAYHFDASLYARYLRRYAEARGVVRREGKVMQVALRGEDGFIDAVTLEDGSRIQGELFVDCSGFRGLLIEEALHTGYEDWSHWLPCDRALAVPTVHAGPLTPYTRATARPAGWQWRIPLQHRTGNGYVYSSAHVSDDEAAATLLANLDGEPLGDPRPLRFATGRRKLAWNRNCVAIGLSSGFLEPLESTSIHLIQSGISRLLGLFPDSGWGDAERDSYNDFTAAQYAQVRDFVILHYKANGRDEPLWRQAREMDVPESLKRRIDLFRNRGRIFRLEDELFAETSWIAVMLGQGIAPQGWDPLADALNPDQLAAMLDRIRSTFRRAADAMPDHAAYLARHCAARGFA

SEQ ID NO: 83225 - protein, 428 aa, Pirellula staleyi
  REGION 1..428: note = tr|D2R1S0|D2R1S0_PIRSD Tryptophan halogenase; OS = Pirellula staleyi (strain ATCC 27377 / DSM 6068 / ICPB 4128) OX=530564 GN=Psta_2115 PE=4 SV=1
MVSTSGTSDISSVGNTDVIVIGGGPSGSTVSTLIAQQGYKVTLFEREHFPRFHIGESLIPETYWVLKRLNMLPKMRKTQFVKKHSVQFVTEKGKLSEPFYFSDNKPHECSQTWQVMRSEFDHMMIKNAAEHGVQVHEGVRVLEVLFEGTRAVGVKVADERGNVRDVFASVVVDASGQSSMIMSRLGLREWDQELKKAALWTYWEDAYRDKGRDEGATIVLQTQGKKGWFWYIPLHNNILSVGVVADYSYLFKDRETKDHEAVYFEEVAKCPGLQPRLEGAKRIAPYRAAKEYSYRSREVAGDGWVLVGDAFGFLDPLYSSGVLLALRSGELAADAVVAGLREGDTSGAKLGAWGPNYIQGMERMRRLVCEFYNGFSFGKFVKLYPQLKGHLTDLLIGDLFDEKVDDVVEPMNHIRRLQAEKSAALPVE

SEQ ID NO: 83226 - protein, 236 aa, Asticcacaulis sp.
  REGION 1..236: note = tr|A0A258ARV1|A0A258ARV1_9CAUL Tryptophan halogenase (Fragment) OS=Asticcacaulis sp. 32-58-5 OX=1970317; GN = B7Z26_11835 PE=4 SV=1
EDWTEWLPCDRAMAVPCNRDTKDITPYTRSTARAAGWQWRIPLQHRTGNGYVYSSRFISDDEAAATLLANLDGAAQADPPPLRFAAARREKCWHKNCVAIGLASGFLEPLESTSIYLVQMAITFLLRLLPRDRVMDQALEDEFNRLIDAEYERVRDFLILHYHANTRTDAPMWQYCRDMDIPDSLRDKIARFKHRGYIHAYADGLFAPPSWQAVFFGQDVVPERYDALAEAMDRET

SEQ ID NO: 83227 - protein, 521 aa, Duganella sp.
  REGION 1..521: note = tr|A0A0Q5DYC3|A0A0Q5DYC3_9BURK Tryptophan halogenase; OS = Duganella sp. Leaf126 OX=1736266 GN=ASF61_19090 PE=4; SV = 1
MSSPDKQAPAGAGPVRRIVIVGGGTAGWMTAAPLAQRLARHPDQPCEVILVESAEIGTIGVGEATLPTIRVYNASLGLDANDFIAKTSASYKLGIEFKDWGHLGNRFFHGFGDYGPALAGVGAHHHWLRLAQAFEQMPDIAHWSVPSVMAREGKFVPPDEETPGVADAYSYGFHFDASLYAAYLRDYAVARGAQRVEGMIVGVEQHPHNGFVTAVRLADGRRVEGDLFIDCSGFRGLLIEGALQAGYEDWSNYLPCNSAQAVPCASAPHLTPFTRSTATGAGWLWRIPLQHRTGNGHVYSSDFITDEQAGRVLLDGLDGAALDAPRQIRFVTGRRRKSWVNNVVAIGLSAGFVEPLESTSINLIETAVGKLLELFPDRDCSPALADEFNRVMGSRYEAVRDFIVLHYKLTARDDTPFWRHCAQMAIPDTLAHQIALFRETGRVAILDRDGFAEPSFVAMMVGLGVMPKRHDPLADRVDLRVVHGHFAQLRDMIAQAVARMPSHGAYVTQQAAAGGLARAAA

SEQ ID NO: 83228 - protein, 498 aa, Duganella sp.
  REGION 1..498: note = tr|A0A0Q5CUT2|A0A0Q5CUT2_9BURK Tryptophan halogenase; OS = Duganella sp. Leaf126 OX=1736266 GN=ASF61_14920 PE=4; SV = 1
MSQSLRPVRRVVIAGGGTAGWMAAAALTRTLGKVLDITLVESDDIGTVGVGEATIPSLAQFHRLIDIDERAFMKATSATFKLGISFEHWRARGQHYMHAFGATGTDHWTAGFHHFWHKGRAAGVAGDYGDYSLEHQAARALRFGHLPDDGLVYAYHLDAGRYARYLRRYAEHFGIERVEGKIAAVERDPASGDVAALALDSGRRLEADLFLDCTGFRSLLLGQTMGVPYDDWSQWLFNDSAIAVQTASVGPAVPYTRAIAHDWGWQWRIPLQHRTGNGIVYASRYADDATARAALLANLEGEVLTEPRVIRFTPGQRRQVWAGNVIGLGLASGFLEPIESTSIHLIQRTIVRLLQLFPGAGIRPAMVEEFNSQAAEDIRTIRDFIILHYKVTERDDTPYWRAARDMAVPDALQHRIDLFGGAGQVFRHQNELFSENSWVQVMLGQGLMPCAHHPTADVMGATELAAFLADIRTGIGDTVAKLPGHQAYVERHFQSDTP

SEQ ID NO: 83229 - protein, 130 aa, unidentified
  source 1..130: note = Actinobacteria bacterium
  REGION 1..130: note = tr|A0A2N3G2C2|A0A2N3G2C2_9ACTN Tryptophan halogenase (Fragment) OS=Actinobacteria bacterium HGW-Actinobacteria-3 OX=2013648 GN=CVT63_08330 PE=4 SV=1
SFNEGIARDFDGVRDYIVCHYRMNRRTDTEYWRANASHDQLSDSLKAILTCWFTGQNLEQELARQNIADIYPAMSWHCLLAGYGQFPDVAKLRAPELGIGKADMAAIDDFRSRCALNFRDHAKVLSEMAA

SEQ ID NO: 83230 - protein, 203 aa, Asticcacaulis sp.
  REGION 1..203: note = tr|A0A258BD26|A0A258BD26_9CAUL Tryptophan halogenase (Fragment) OS=Asticcacaulis sp. 32-58-5 OX=1970317; GN = B7Z26_05505 PE=4 SV=1
MQNPITRLIIAGGGTAGWMTAAALSVALPKSVEILLIESEDIGTVGVGEATIPTMRNFNQHIGIDEGEFIRATEATFKLGIEFLGWGRKEGRYFHGFGDYGADHQAISAYSLWRRLRAEGDDTPLEAWSLPTALAYANRFFPPNPDPRSPMHDYAYAYHFDAGLFAKFLRRHAEARGVKRLNAKISEVLLRAEDGFIDGLRLD

SEQ ID NO: 83231 - protein, 502 aa, Erythrobacter sp.
  REGION 1..502: note = tr|A0A1E4B4A0|A0A1E4B4A0_9SPHN Tryptophan halogenase; OS = Erythrobacter sp. SCN 62-14 OX=1660099 GN=ABS49_01580; PE = 4 SV=1
MAIRHIVIVGGGTAGWMAAAALSKMIGARGLAITLVESEEIGTVGVGEATIPPFVEFQNLIGVDEAEMMAACQASFKLGIQFVNWGRMGDSYIHPFGAYGYQMGGIAFHQIWHRIQELGDKRPIQAFNLETMAAYFGKFARTQDYAREDLPPINYAYHLDAGRYARFLRQLSEKRGVVRREGRVEHVALDGESGYVTSVQLTDGSVIAGDLFVDCSGFRGLLIEQALQTGYEDWRHYLPCDRAVALPCAREDGSPPPPFTRAMAHGAGWQWTVPLQHRNGNGHVYCSEYMADDKALDILLANIAGKPQADPNWLRFVTGRRKKFWNKNVVALGLAAGFMEPLESTSIHLINTGINKLVSLLSLDGINPAQVDAFNRLTGKEYARIRDFLILHYNATERSDTPFWNHCRTMAVPETLTEKVELFRANGQIFREEDELFTETSWAAVMMGQRIAMGGHNAMADTFGGPDLKKELDEMEASIRYLVEHMPTHAAYLERYCPARAA

SEQ ID NO: 83232 - protein, 520 aa, unidentified
  source 1..520: note = Sphingomonas gei
  REGION 1..520: note = tr|A0A4S1XED4|A0A4S1XED4_9SPHN Tryptophan 7-halogenase OS=Sphingomonas gei OX=1395960 GN=E5A73_05565; PE = 4 SV=1
MVSDRRRILIVGGGTAGWLTAGYLARMLGADRPGGVAITLVESHDIGILGVGEGTFPTIRKTLSRIGIDEAALVRRCGATFKQGAKFVHWRHAPGTPGPDHYLHAFQETDDHAGPELLPYWLLGLAGDANWDDVNTPQKRAADAHRAPKLPSHADFLGPLNYAFHFDAVSLAVLLREQGVANGVTHLVDTVQEVLLGEDGAIAGVRGAESGVLTADLYIDCTGFRAELIGKALGQPWKSCRDTLFCDGAVAIQVPYAQPDDPIASYTISTAQQAGWIWDIGLATRRGIGHVYSSAHCDAEAAEKALRDYVGPAGAALETRRFRFDAGYREVNWVKNCVAVGLSSGFFEPLEATGIVFSEVAAGMIANLFPWAGDFETSARQFNANMRRRYARALDFIKLHYFLSARRDSAFWTDNTDPSSAPDSLKELLDRWRFRPPNEIDIDRNVDIFTESSWQYVLYGMGWKTDLSAKAGVYRFANEARAAFAEIRRQGDFAIRQLPSNRELVRFAQGSGFGKGAHAA

SEQ ID NO: 83233 - protein, 495 aa, Alteromonas sp.
  REGION 1..495: note = tr|A0A2S9VC05|A0A2S9VC05_9ALTE Tryptophan 7-halogenase OS=Alteromonas sp. 190 OX=2079529; GN = C6Y40_08565 PE=4 SV=1
MTNSTQQPESIVIVGGGTAGWMCAAYLAAKWSQRYRITLIESAQIGTVGVGEGSTPFLRQFFAELGWQESDWMPACDATYKTGIEFSNWTGSERFKRYFHPFFSALDLDTAEHFFANCNQVRRGQNAAVRPAQFFSAATMAEAAVTPVSTTLGGDIDYAYHFDAGKLASCLRSFAVQQGVKHLTGNVLNVQCTNGHITQLETDCSAPLTATLFIDCSGFRGLLMKQGLGQSLQSYQDCLFNDRAVAIPTPHNHPQQAITPQTRSEGLSCGWMWNIPLTSRVGNGYVYGSHFCSPEQAEAELRQRLKVSDETPARHLTMPVGRLQEHWHGNCVAIGLAQGFIEPLEATALMLVQYGIYQLSSRLGELVTITSRTQYNTEMNRMFDGIRDYIVAHYYLNTRNDSPYWQACRNDIRVPENLTLLVNAWDGKGQFEDALESIDEQLVYLRPSWYCILAGMGRFKSEAVNLSDPGAAAGIQQYLTRTVGEHFKAQLMPSR

SEQ ID NO: 83234 - protein, 517 aa, Photorhabdus temperata
  REGION 1..517: note = tr|T0NZL3|T0NZL3_PHOTE Tryptophan 5-halogenase; OS = Photorhabdus temperata subsp. temperata M1021; OX = 1221520 GN=B738_12784 PE=4 SV=1
MIKSVLIVGGGTAGWMTAAYLSKAFAQNVDITVLESKRVKKIGVGEATFSTVRHYFDYLGLDESEWLAKCAGSYKLGIRFENWDGQDNHFYHPFERWETVKGFPISEWWLRKSTTNQGFDYATFLTPHLCEAKRSPRRLDGSLFAQSSDKSLGQSTLAEQRAQFPYAYHFDADEVANFLKRYAMNRGVSHIEDDVTHVEIDENGNIGHLETKIRGKLKADLYIDCTGFKGLLINQALNEPFVSFSDVLKNNRAVALRVSREDTRDIEPYTTARTMSNGWRWTIPLYKRNGYGYVYCDEYQSPEEAEAELRRSIPYENADCAANHIRMRIGRSNRSWVKNCVAIGLSSAFVEPLESTGIFFIQHGIEQLVRFFPRSSSNELLIEEYNTRVNRVVDGVKEFLLLHFSLAQRNDTLYWKEWKNIELPKELLKKIMLAKDHLLDKETIYPFYHGFEEYSWNTMILGLSSGSLTSKPALSLMIPDKADEILLQHHVKAKKMVSGLPTCHEYLQYLHNSEDRN

SEQ ID NO: 83235 - protein, 496 aa, Pseudoalteromonas sp.
  REGION 1..496: note = tr|A0A2N1BAE0|A0A2N1BAE0_9GAMM Tryptophan halogenase; OS = Pseudoalteromonas sp. GutCa3 OX=888433 GN=CXF64_13785; PE = 4 SV=1
MKPIKHVVIAGGGTAGWITAALLNKVLGKVINITLIESSAIGTVGVGEATIPPIIQLNNALGINEQDFINATNASIKLGIEFENWKTPGHSYMHAFGSFGKNFPFCDFYNFWLKGQITGCEDDLWDFSLNYQAAKQHKFAPLNTIPNTQLPGLSYAYHFDATLYAEYLKKLAISRGVKHIDAKISHVEQCDTGNVKSLALDNDSQISGDLFIDCTGLRALLIEQTLNTGFIDWSHYLPCDSAVAVQTKSTHELKPYTRSIAHSAGWQWQIPLQNRIGNGLVYCSRYLSDDDAKQLLLKSLPAEPITEPRIIKFKTGRRLKQWHKNVVSVGLSSGFLEPLESTSIHLIQTAVTRLIKLFPHNGISDALVTEFNKQSVIELEHIRDFIILHYKLTEREDSPFWRQCMQMDIPNSLTHKLNLFKHTGKVIREDDELFAEVAWQQVMIGQGLIPDDYNSIVDSLSDDQLSDLFSTLKTLISSTVTQLPTHQNFLASIKKV

SEQ ID NO: 83236 - protein, 505 aa, unidentified
  source 1..505: note = Arsukibacterium ikkense
  REGION 1..505: note = tr|A0A0M2VAZ3|A0A0M2VAZ3_9GAMM Tryptophan halogenase; OS = Arsukibacterium ikkense OX=336831 GN=WG68_05955 PE=4; SV = 1
MSVENIKKLTIVGGGAAGWMTAIYLNKVFNSQQPNFQITVIESPDIGIIGVGEATVHSIRFFFAAMGLDENALLRATHATLKTGIMFRNWMQPVAGQMHQYFHPFEQQQLGKDIDMSSSWLLSARYQQERYDEGVSLSAHLIKQGHGPKARQSAPYQGVVPYGYHLDAVLLARFLREHAVAAGVVYLEDTIVDVSVTDGNISSVSSATSCYQADIFIDATGFKGLLIEALQQRNWQSFADALPCNKAVAIQRPHLAGYQPKPYTVATALSHGWAWQIDLSSRQGTGYVYDGNRLTADQAEQELRAWLGPEACALPARHLQMKVGCRQQFWLGNCIAIGLAGGFIEPLESTGLHLINLGARLLSTHLSPGATAQAVRDSYNQAMNGFYQDLKQFIVLHYCLTDRDDTAFWRQARATAVQCAGLPEKLALWRHKICEYHDLAGGYATTFTDENYRYILYGMQHYPQLQLATGEALQQPFVLLQQRVQQALQRTMSHSEYLQQLMPCR

SEQ ID NO: 83237 - protein, 499 aa, unidentified
  source 1..499: note = Sphingomonadaceae bacterium
  REGION 1..499: note = tr|A0A2D4XZP2|A0A2D4XZP2_9SPHN Tryptophan halogenase; OS = Sphingomonadaceae bacterium OX=1930536 GN=CMN67_00320; PE = 4 SV=1
  VARIANT 465: note = Xaa can be any naturally occurring amino acid
  VARIANT 475: note = Xaa can be any naturally occurring amino acid
  VARIANT 483: note = Xaa can be any naturally occurring amino acid
MTESKPPRVVVLGGGSAGWITACLLHHRWHSRGGQVTVVESPQIGIIGVGEGSTPQLKAFFDHLGIDEADWMAACDATYKLGIRFTGWSERPGFESYFHSFPGPVDLHTEPGFVHNCALRRRGFDVPAHPDDWFLAKVLAEEHRGPHPRDNFPFMPSYGYHFDAHKLGQFLRDWATERGVLHRLLKATDVEQGTQAEIAALLCEDGTRIEGDIFVDCSGFRSVIAQQTLGAQFIPFGENLFNDRAVVLPSRHSTRFKPQTDSIAMRAGWRWSIPLTTRVGNGYVYSSKYVSDEDAEAELREAIGMQDEGEARILEMRVGRIAETWTGNCLAAGLSQGFIEPLEATALHIVIATALDFADSYEKGGYGSGHRDMFNQRIAAKYEGIRDYIVAHYRLNQRSDTQYWRDNAANDALSDNLKGMITAWFTHEDLREVNLRQHDGNPHYASMSWHALFAGYGTFPPEAKXVPTPTGLVTXEVDHTRRXLSACATNFLRYAPLSD

SEQ ID NO: 83238 - protein, 517 aa, unidentified
  source 1..517: note = Arsukibacterium ikkense
  REGION 1..517: note = tr|A0A0M2V639|A0A0M2V639_9GAMM Tryptophan halogenase; OS = Arsukibacterium ikkense OX=336831 GN=WG68_05950 PE=4; SV = 1
MAPASAIKQILVVGGGSAGWLTACHLARQLQCQQPGSVQVTLLESSDIPTIGVGEGTVPAIRQSLQYLGISETDFIRECDATFKQGIKFVGWRQAVSGLPHHYYHPFDYPEQQSVALTPYYLLNPGTDSFANRLTIQGRVCDAGLAPKTISHCEYDGLCNYAYHLDAAKFAAFLTRHATEKLGVKHVKANVRAVRQHADGSLASVLTDTAGDISADFFVDCTGFRSLLLGETLQVPFISKNDILLADQAVAMQIPYAEPDSPIPSYTLATAQAAGWIWDIGLSKRRGTGYVYSSQFADADTAERTLRQYLGPAAAALPCRHIPMQVGYRQSFWQKNCVAIGLSQGFVEPLEATGLLVYDAAARYLAELLPLDTRLLPAAAAQFDQHVHYAWDRVIDFIKLHYVLSDRRDSLFWQANRLPETIPASLQAKLSRWQQQLPSQYDFASRFEIFNLDNYLYVLYGMDFTTDLTLRRSCYPEHAVAERHFSQIRQQACQAVQQLPAHRQLLAQIQQYRLQTI

SEQ ID NO: 83239 - protein, 495 aa, unidentified
  source 1..495: note = Sphingomonadaceae bacterium
  REGION 1..495: note = tr|A0A431JQN9|A0A431JQN9_9SPHN Tryptophan 7-halogenase OS=Sphingomonadaceae bacterium OX=1930536; GN = EKK50_02460 PE=4 SV=1
MTTIVIAGGGTAGWMAAAAFGGLLESGYRIRLVESEEIGTVGVGEATIPQIRLFNQALGLDEDAFLRATGGTFKLGIAFDGWHDPGHSYMHAFGDVGRDVGLIAFQHYWLRARALGLAKPLDAYALNEVAARAGRMHRGGPITAQTLPTMPYAFHFDAGLYAAYLRRFAVNRGVERTEGKIDRFERNGDTGDIAALVLASGERIAGDLFLDCTGFRGLLIEGALETGYDDWTHWLPCDRAVAVPSANVGAPVPYTRAIAREAGWQWRIPLQHRTGNGYVYCSRHLSDDAATAALLANIEGEAQADPRHLRFVTGRRKRAWNRNVVALGLASGFLEPLESTSIHMIQSAIARLVKLLPAFPIADALRDEYNRQTDFEIERIRDFLILHYWANGRAEPFWQERREADLPDTLRAKIALWQQAGTITREHEELFTEDGWLQVLAGQGVQAAAYHPLADQIGTDDLGEYMETLELLYRREAQAMPSHADLIARHCAARP

SEQ ID NO: 83240 - protein, 494 aa, Duganella sp.
  REGION 1..494: note = tr|A0A0Q8R8K8|A0A0Q8R8K8_9BURK Uncharacterized protein OS=Duganella sp. Root198D2 OX=1736489; GN = ASE26_05625 PE=4 SV=1
MNTAYKRIVVVGGGTAGWMTATALATAFPVSTVELVESEEIGIVGVGEASFPSIRAFHKILGIDEAQFLRATDGTFKLGIEFRDWREAGAKYFHTFGDFGGLSGPYALWGQHRRLGEAELGALDRQCLPSVMASQGRFMAPGPGDGRQFNYAYHFDAALYAAFLRTMALQRGVRRSEGRIVDAVRRADGGIAHLALADGRVVEGDLFADCSGFASLLLGRALEERYVDFSRWLPVDRAWACPSARNGAALTPSTRCTALEAGWAWRIPLSNRTGHGHVFASRYIDEERAREQLMQQLDGAALADARLLRFSAGHRERFWVHNVVALGLSSGFLEPLESTSIFLVQSGLGRLIELLLAGARPGQEAVAAYNAGMRRQFERIRDFIILHYCLTARRDSQLWRDMASMELPETLAFKIHAWRQAGALHQYDQEGFDATSWLAIHAGMGHWPERADPSLHEMPHEDALRALRMRRDSIAATVATMPSHQDYLHSVLAR

SEQ ID NO: 83241 - protein, 497 aa, Novosphingobium sp.
  REGION 1..497: note = tr|A0A2T6MCX5|A0A2T6MCX5_9SPHN Tryptophan halogenase; OS = Novosphingobium sp. GV027 OX=2135689 GN=C8K10_101343; PE = 4 SV=1
MNEAAIRSITILGGGTAGWMAATLLAKAFDGQPLRITLVESEEIGIIGVGEATVPLFRLFNDRLGLDEHAFLQATMGSYKLGIEFCDWGQVGNTHFHGFGDYGEPIGGIAPHHHWLRLARSGEAAPIDDYSAPYALAQRGKFTPADPRQPRYSHAYHFDAVLYARYLRNLAESWGVTRVEGRVVDVPLDPQTGHIRALHLADGQVVDGEFFVDCTGFAAELIGKRLGTAYVDWSHWLPCDSAIAVPSARHDPPAPFTRSTALAAGWQWRIPLQHREGNGIVYASAYMSDAAAEDALLGSLGGAPLANPRRFRFTAGRREAFWQRNCVALGFASGFLEPLESTGIQLIQNGIGRLIEFFPDKHFDPRVAAEYNRVCQVEWDRIRDFIIAHYCVSQRPEPFWQAARAMDLPDTLQQKLDSWHATGKIPLLDGESYQEPSWAAILLGNGVWPQRHDPLIDALPIDMLRAHMARRREDLTRMGRSAPDHRFYLARHCQAAA

SEQ ID NO: 83242 - protein, 505 aa, unidentified
  source 1..505: note = Cellvibrionaceae bacterium
  REGION 1..505: note = tr|A0A2E2XEK8|A0A2E2XEK8_9GAMM Tryptophan halogenase; OS = Cellvibrionaceae bacterium OX=2026723 GN=CL693_04680; PE = 4 SV=1
MNIKPIENIIIVGGGTAGWVAASSLARVLPKQSYRITLVESDQIGIIGVGEATIPPIQDVHKMLGVDEADFIRSTEASFKLGIEFHNWSEQGSRYFHPFGQYGREFDSVSFHQYWMRARELGFESELSDFSLGTQMAKAGKFVPSNNDPQSILSSMGYAYHFDASLYAKFLRRLAEGMGVVRREGKVIDVSLDHDSGFIDTILMEDGEAISGDLFIDCTGFASILLGKTLGVEFEDWSHLLKANRAVAVPSQNVGETRPYTQSIAHPAGWQWRIPLQHRTGNGLVFCDDYLSEDEACQLLLSNLEGEALADPRVLRFRTGRRQQAWHKNCIAVGLSAGFLEPLESTAIHLVQTMVARLLQLFPSSGFQQADIDEFNQQFCREYDMVRDFIVLHYHVNQRSEPLWRDAREMAIPESLSHKIRLFESHGRFFERQDDLFKKASWLAVMMGQGLKPSDYDPIANRKPAAGLCQWLKNIQSAYGDAIGAMPDHDRFIAEYCRAKKDRVA

SEQ ID NO: 83243 - protein, 538 aa, Pseudomonas chlororaphis
  REGION 1..538: note = tr|A0A3G7HGF1|A0A3G7HGF1_9PSED Thioredoxin reductase; OS = Pseudomonas chlororaphis OX=587753 GN=C4K26_4689 PE=4; SV = 1
MNKPIKNIVIVGGGTAGWMAASYLVRALQQQANITLIESEAIPRIGVGEATIPSLQKVFFDFLGIPEREWMPQVNGAFKAAIKFVNWRKSPDPSRDDYFYHLFGSVPNCDGVPLTHYWLRKREQGFQQPMEYACYPQPGALDGKLAPCLPDGTRQMSHAWHFDAHLVADFLKRWAVERGVNRVVDEVVDVRLNDRGYISNLLTKEGRTLEADLFIDCSGMRGLLINQALKEPFIDMSDYLLCDSAVASAVPNDDARAGVEPYTSAIAMNSGWTWKIPMLGRFGSGYVFSSKFTSRDQATTDFLNLWSLSDNQPLNQIKFRVGRNKRAWVNNCVSIGLSSCFLEPLESTGIYFIYAALYQLVKHFPDTSFDPRLSDAFNAEIVHMFDDCRDFVQAHYFTTSREDTPFWLANRHDLRLSDAIQEKVQRYKAGLPLTTTSFDDSTYYETFDYEFKNFWLNGNYYCIFAGLGMLPDRSLPLLQHRPESIEKAEAMFASIRREAERLRTSLPTNYDYLRSLRDGDAGLSRGQRGPTRAARETL

SEQ ID NO: 83244 - protein, 569 aa, unidentified
  source 1..569: note = Alteromonas mediterranea
  REGION 1..569: note = tr|S5ALM4|S5ALM4_9ALTE Tryptophan halogenase; OS = Alteromonas mediterranea 615 OX=1300253 GN=I633_21350; PE = 4 SV=1
MRDNESHNNINRVVVIGGGTAGWLAAGVLAAKLSAENSVTLIESPVIPTIGVGEGSWPSLKDTLLDIGISELEFLSVCHGSYKQGSSFANWRKGEHKYYHPFTEPAGYREIDIHAWWQAIAPTEAYENAFSIQAAMCEAGKAPKQATTPDYAHVLNYGYHFDATALATLLKKHCINKLNVTHVVGHIASVNSHQNGYIKSVVGDNGHVTEGDLFIDCSGSNGLLIDKHFKVPWVSVEHIMLNNRAVALQVPYSDNDSAIESTTLATAHPCGWTWDIALQHRRGVGLVYSSQLASDEQAYKTLINYVSRRYPKALAEALTPRTLAFEPGHREHFWVKNCLSLGMSSGFVEPLEASAIAMVELGLRMLCEGFPQTQEHMTIVSKRYNQRFRYRWRRVIDFLKLHYVLSDRDEPYWRAQRDMATVPESLRELLTLWKYQSPSRLDLIENEEVFPSASYQYVLYGMGYRTLPNSLRLSEEDRQKACNIREKLQQTKPSYFQALPSNNALLKSLAERYATSDLVDSQCPDGQTDKASSANNASKDNGNINNNVESYRDGTPNKKDTQYDRIGFR

SEQ ID NO: 83245 - protein, 538 aa, Pseudomonas chlororaphis
  REGION 1..538: note = tr|A0A0D5XYU5|A0A0D5XYU5_9PSED Tryptophan halogenase; OS = Pseudomonas chlororaphis OX=587753 GN=PCL1606_28070; PE = 4 SV=1
MNKPIKNIVIVGGGTAGWMAASYLVRALQQQANITLIESAAIPRIGVGEATIPSLQKVFFDFLGIPEREWMPQVNGAFKAAIKFVNWRKSPDPSRDDHFYHLFGSVPNCDGVPLTHYWLRKREQGFQQSMEYACYPQPGALDGKLAPCLPDGTRQMSHAWHFDAHLVADFLKRWAVERGVNRVVDEVVEVKQNERGYISSLLTKEGRTLEGDLFIDCSGMRGLLINQALKEPFIDMSDYLLCDSAVASAVPNDDAHEGVEPYTSAIAMNSGWTWKIPMLGRFGSGYVFSSKFTSRDQATTDFLNLWGLSDNQPLNQIKFRVGRNKRAWVNNCVSIGLSSCFLEPLESTGIYFIYAALYQLVKHFPDTTFDPRLRDAFNAEIVYMFDDCRDFVQAHYFTTSREDTPFWLANRHELRLSDAIKEKVERYKAGLPLTTTSFDDSTYYETFDYEFKNFWLNGNYYCIFAGLGMLPDRSLPLLQHRPESIEKAEAMFASIRREAERLRTSLPTNYDYLRSLRDGDAGLSRSQRGPKRAAREIL

SEQ ID NO: 83246 - protein, 508 aa, Duganella sp.
  REGION 1..508: note = tr|A0A3E1S9U7|A0A3E1S9U7_9BURK Tryptophan 7-halogenase OS=Duganella sp. BJB480 OX=1871181; GN = D0T24_16830 PE=4 SV=1
MNSNTNNRIKRVVVVGGGSAGWMAAAALATYLGKQASVRLIESEEIGIVGVGEASVPHIRMFNAQMLGIDEAEFVKRTQGTVKLGIQFQDWSRIGDSYIHGFGVIGRSLGPLPFHQFWLKLFQSGRAAPIGEYSPQTVMAPQGRFARGDGNAAAGSPLADIAYAYHFDASLYARFLRELSEQRGVRRTEGKIAGVNLRAGDGHVESVTMESGEVIEGELFIDCSGFRGLLIEQALKTGYEDWTHWLPCDRALAVPCERVDPLTPYTRATARAAGWQWRIPLQHRTGNGYVYSSRHIGDDEAASTLLANLDGKPLADPRPLRFTPGMRKKFWNKNVVALGLASGFLEPLESTSIYLVQSGISRLLALFPGADFNPLLAERFNRESAFEYERVRDFLILHYHATERNDTPFWDYCRTMSIPDSLREAMELFRSDGRYFRNGEDFFALPSWVQVMLGQRITPRGYHPIVDDMPEDKLAGYVEDMRQTLAHAVASMPTHGEWIDRYWKAPAP

SEQ ID NO: 83247 - protein, 503 aa, Duganella sp.
  REGION 1..503: note = tr|A0A3E1SCL4|A0A3E1SCL4_9BURK Tryptophan 7-halogenase OS=Duganella sp. BJB480 OX=1871181; GN = D0T24_09930 PE=4 SV=1
MGLGLVKNVVIVGGGTAGWMTAAALSTLISNGCKIRLVESDEISTIGVGEATIPVIRGYNQLIGVDENEFLRQTQGTFKLGIEFVNWGKQGDSYIHGFGVIGRDQLLAKFYQYWLKLYQDGQVPDIEHYSINTVAARKNKFLRAVSDSTGSPLSDISHAFHFDAALYAKYLRGLSEKRGVRRTEGRIVETVLRADDGHVQAIVLENGERIEGDLFIDCSGFRGLLIEGALNTGYEDWSHWLPCDRAIAVPCESVSPLLPYTRSTAHDAGWQWRIPLQHRIGNGHVYSSKFMEPEQAESILMNNLDGKPLAQPRHLRFTTGKRKRAWNKNVVAIGLAGGFMEPLESTSIHLVQTGITRLLTMFPHKGYDQPDIDAFNQATDEEYAAIRDFLILHYKLNAREGKPFWDYCRNMEIPATLQRRMDLYRSNGRIIRGSDELFTETSWLQVMHGQGLRAKGYHPLVDQRSAEDIAAFLGNVKEVVLRCAEHMPTHEEYIASCCAAPPL

SEQ ID NO: 83248 - protein, 495 aa, Shewanella frigidimarina
  REGION 1..495: note = tr|A0A106BXC5|A0A106BXC5_SHEFR Tryptophan halogenase; OS = Shewanella frigidimarina OX=56812 GN=AWJ07_08230 PE=4; SV = 1
MNKSIKKVVIAGGGTAGWMAAAAFSKLLGKNLEIVLVESDEIGTVGVGEATIPTLHIFHRLLGLKEQDVMAATNATFKLGIQFENWHDVNKDYLHSFGFLGKDCWACGFQHFWLKGKQQGLVSDIGDYCTEHLAARQGRFAVLPNQDYNHAYHMDASLYAKFLRKFAEHHGMTRIEGKIADVLQHDDTGNIRALKLENGALIEGDLFIDCTGFKALLIEQTLNTGFEDWSHWLPCDSAIAVQTEAVQKPIPYTRSIARESGWQWRIPLQTRTGNGLVFCSKYISDTDATELLLNNIEGAPINQPRVIKFKTGTRRQHWNKNCVAVGLSAGFLEPLESTSIHMIQRSIVRLLQLFPSQGIIDADIAEFNQQTKVEMDNIRDFIILHYKVTDREDSRFWRYCKNMPIPASLQHRIDMFSQSGKVYKYGNELFGESSWIQVMMGQGLMPKEYHPIVDMMDEAELTSFLNSIKATVKRKVDTLPAHHDFVQHYCKSTSM

SEQ ID NO: 83249 - protein, 516 aa, Massilia sp.
  REGION 1..516: note = tr|A0A350CU73|A0A350CU73_9BURK Tryptophan halogenase; OS = Massilia sp. OX=1882437 GN=DCX52_16055 PE=4 SV=1
MTSSFIRHVVVVGGGSAGWLTAGLIAAEHGASRPDGLRVTLVESPEVAPIGVGEGTWPSMRDTLRRIGVRESDFFRECDAAFKQGSLFQRWVTGQDGDRYFHPFSLPQGYGEANLAARWQERYAGVPFAELASYQPHLCLQGRAPKQPATPEFAAVANYGYHLDAGKFGQFLKKHCLERLGVHYVPDHVLGIESHPNGDIAALRTQSHGLLAGDLFVDCTGMRSLLLGQHYGVPFLGQKHLLFNDTALAVQVPYAREDSPIASQTISTAQRAGWIWDIGLPTRRGVGYVYSSAHTGDDEAERALRDYVAHSGGPRDCPAPRKIGFAPGYRERFWQGNCVAVGLSSGFIEPLEASALALVELAAAMIADEMPVTRAHMDVVARRFNDTFRYRWERVIEFLKLHYVLSRREDSAYWIENRAPASMPERLRELLDLWRYRAPIRGDFPRIEEVFPTASWQYVLYGMGWRTEAGATGRGGGEQADGYFREAADLARRMLPALPSNRELIAHIRTRGLPRI

SEQ ID NO: 83250 - protein, 523 aa, Marinimicrobium sp.
  REGION 1..523: note = tr|A0A2D8WIV1|A0A2D8WIV1_9GAMM Tryptophan halogenase; OS = Marinimicrobium sp. OX=2024837 GN=CMG77_04280 PE=4 SV=1
MSVHNSPTEHVVIVGGGTAGWLTAGLLAADARLDSRPNRRITLLESPDIATIGVGEGTWPSMLETLRTIGLSESEFIRECDVSFKQGSRFQNWCRGDGDRYDHPFTLPAGYGRLNLAEHWRYAHRDLPFAYAVSPQSAVCDDGRAPKQLATPEYAFNLNYGYHLDAGKFTRLLQRHCVEHLGVVHYLGEVTGVQPRDNGDIKHLHLKSGETLAGDLFIDCTGMASRLLGQHYQVPWVSQRPVLFNDSALAVQVPYSSELSPVASQTLSTAHPDGWIWDIALPTRRGVGAVFSSAHIDKDRVYERLEAYVRGTDSGATLDELSPRLIQFDPGHRERFWQNNCVAIGLSAGFIEPLEATALVLVERSAQFLVQQMPENREEMSVVARRFNRRFCRHWDNIIGFLKLHYVLSTREDSDYWRAHRAEESVPDELAEQLLLWRSRSPWTCDSLYRDELFPSASYQYILYGMRPEYTAPEALERRVRSSGAAAQTAFHENGVQTRKLLQGLPDNRSLINHIRRHGLHTV

SEQ ID NO: 83251 - protein, 505 aa, Caulobacter sp.
  REGION 1..505: note = tr|A0A2T9JKZ9|A0A2T9JKZ9_9CAUL Tryptophan halogenase; OS = Caulobacter sp. 774 OX=2172652 GN=DDF67_19505 PE=4 SV=1
MTDNRIGRIVIVGGGTAGWMSAAMLARALGPGVAISLVESEAIGTVGVGEASIPQLRNFNAFIGLDEDAFLRATEGTIKLGIEFVDWLRPGHRYMHAFGPVGRPLGVTPFHHYWLDARRRGTAGDDFWAWSANALAARAGRFGRVPTSPAQAGGAEPLTWAFHFDAALYARHLRTRAEARGVARVEGRIVGVDQDGETGFLRAVTLEGERRVEGDLFIDCSGFRGLLIQEALETGYEDWREWLPMDSAWAVPSRDEAPPVPYTRAWARDAGWQWRIPLRHRTGNGHVFSSAWTDKDAAARVLMDNLEGEALAEPRLLTFVTGRRKRSWNRNVVALGLAAGFMEPLESTSIHLVQSGLARLLALFPDKGFDPLLAAEFNRQTADEYARIRDFLVLHYKATEREDTPFWASRRTMEIPDTLAERMALFASSGRVFSRDDDLFKESSWVQVLLGQGVTPAATHPMTGVVADDQIDGWLDDLSRITARTAAALPSHAAFLGRAETRLAG

SEQ ID NO: 83252 - protein, 494 aa, Marinimicrobium sp.
  REGION 1..494: note = tr|A0A2D8WLW4|A0A2D8WLW4_9GAMM Tryptophan halogenase; OS = Marinimicrobium sp. OX=2024837 GN=CMG77_09900 PE=4 SV=1
MVNKPVRKVVIAGGGTAGWVCAAALSSQLGDLLNIVLVESEDIGTVGVGEASIPPMRNFHRLIGVDEQQFMAATGATFKLGIAFENWARDGDRYIHSFGKTGKETWMADFQHFWLRAREQGFGGEFGEYCVEHEAAREGKFATSSNGSLNYAYHLDATRYAAFLRSKSESEGVTRIEGKIQQVQLNPDSGHIESLEMASGDVVEGDLFIDCTGFRGLLIEQALHTGYEDWSHWLPCDSALAVQTESVGPPPPYTLSSAHDSGWRWRIPLQHRVGNGLVYCSRYLSDEAARDRLLSSIEGKPLTDPRLIRFRTGRRRQTWNKNCVAVGLSSGFVEPLESTSIHLIMISMTRLIQLFPFDGVTPSLVSHYNRIAEEELEKIRDFIILHYHATERSDSPFWRHCGSMSIPESLRERIALFREQGHAYQSPNELFRLDSWVQVMLGQRINPERYHPVVRAMGDERLKKTLDDFRRQVSLGVEKLPPHGAFVEEYCRER

SEQ ID NO: 83253 - protein, 496 aa, Marinimicrobium sp.
  REGION 1..496: note = tr|A0A2D8WJ14|A0A2D8WJ14_9GAMM Tryptophan halogenase; OS = Marinimicrobium sp. OX=2024837 GN=CMG77_04585 PE=4 SV=1
MNHSIKNVLVVGGGSSGWMAAAVLSRFFSKQIRIQLVESSEIGTIGVGEATIPPIKNFNDVLGIKEADFLKQTRGTIKLGIQFENWNRPGDCYMHAFGEIGRNLGIAGFHHYWLKARQAGVAEDFWRYSLNEQAARHNRFAPMETIPGTQFPGLTHAYHLDAGLYAQMLRAYSEKLGVKRIDGKIQTVDKDSESGDIAAVELESGERLAADLFIDCSGFRALLIGEALDVDFEDWSHWLPCDRALAVPSEAAETITPYTRAIAHEGGWQWRIPLQHRTGNGLVYSHRHLSDDEATHTLLSNLDTPALADPRPIRFKTGRRVQQWCQNVVSLGLSSGFLEPLESTSLHLVQQGLTRLIKLFPRNGIQPSDIEEYNRQSQFEFEKIRDFIILHYHLNRKTDSPFWRMCREAPKPESLLRRIDLFVGSGRVFCEQEELFRETAWEQVMIGQGITPQDYHPLVDNIEDHQLREFMNFWQRIVDKTVAQMPSHNDFIASIK

SEQ ID NO: 83254 - protein, 500 aa, Sphingomonas sp.
  REGION 1..500: note = tr|A0A0Q4K4P6|A0A0Q4K4P6_9SPHN Tryptophan halogenase; OS = Sphingomonas sp. Leaf30 OX=1736213 GN=ASE89_15650 PE=4; SV = 1
MDTPPKTRVIIAGGGTAGWLAAALLTRQLGALIDVTLIESDEIGTVGVGEATIPTVQAFHALLGLDERAFMAATGATFKLGIAFEGWARPDDRYVHSFGDVGRSTWMGDFQHFWLEARANGLAGDFGDYCLELQAAEARRFTIGQQGPQLNYAYHFDAGRYARFLRERCETAGLTRIEGRIAGIDRSAETGHIDAVVLADGSRVAGNLFLDCSGFRGLLIGDALGVGYEDWSHWLPANRALAVQTTSVEPARPYTRAIAHAAGWQWRIPLQHRVGNGIVYSSEYLSDDAARDRLLASVQGRPLTEPRLLRFTTGRRLRAWEGNCIALSLAGGFVEPLESTSIHLVMTALTRLLRAFPFDGISSAVVAQFNAQTRREIEGVRDFVILHYHLNQRSEPFWKACAAMPIPDTLAKRIALFSDAAQAYQSPDDLFRVSSWTQVMLGQRLEPRDWHRLARMMPPERLGSSLAELKAGIAQQVDRLPAHQAFVDRYCAQDAPGVAA

SEQ ID NO: 83255 - protein, 516 aa, Pseudoalteromonas phenolica
  REGION 1..516: note = tr|A0A0S2K166|A0A0S2K166_9GAMM Tryptophan halogenase; OS = Pseudoalteromonas phenolica OX=161398 GN=PP2015_1295; PE = 4 SV=1
MIKKIVIVGGGTAGWLAASHIAMRLKPHLNKSYSVVLIDSPDIPTVGVGEGTVPVIKDTLKYFGISESEFIKQCDVSFKQSIKFVDWEYTPGTTEKNYYHHGFDFPKLKPFDITPNWLLDEELNKLHYADLVSVQSHACNLNLSPKRLVDKEYSGIFNYAYHLDAGKFTNLLSKHAIEKLGVENIKATVIDVSTTNDGYINGVTTEEAGFIDGDFFVDCTGFKGLLINETLKGEFINKGDILLADTALAIQVPYEDEEQEIPPFTISTAQKNGWIWDIGLRTRRGVGYVFSNKHETLDEALNVLSQYLNQEVTEKDVRKIDMKVGYQKQPWINNCVAMGLSQGFVEPLEATGLLMFDVTARIFADLIPPDKTLLNCTAELFNRDITQMWESTCDFIQLHYCLSKRTDSQFWIENTDESRLSPTLKEKLSLWQRKLPSQFDFRYSVDSFRLDNFLYVLYGMNFKTNLEHYAHMFENKEQDIQNLKNSISEGVRFCEQNLTGHRAFLEQVNKFGLTKV

SEQ ID NO: 83256 - protein, 512 aa, Caulobacter sp.
  REGION 1..512: note = tr|A0A2T9KDK4|A0A2T9KDK4_9CAUL Tryptophan halogenase; OS = Caulobacter sp. 774 OX=2172652 GN=DDF67_01630 PE=4 SV=1
MSQDVRSGRIRSIVIVGGGTAGWMAAASLRRHFGKAPIDITLVESSEIGTIGVGEATIPTIRGFYQNLGLDDLEVLRATQGTCKLGIRFKDWMAPGSAFIHPFSLYGQDLNGVPFQHYWLKARSVADIGEVGEYSLGASLAAAGRFTVPAANPPSSLSVFDWALHFDAALFAQLMRRVAEANGVRRIDAKVVKVNLRPEDGFVASLDLHTGATVEGDLFIDCSGFRGLLIEEALQTGYEDWSQWLFCDRALAGQSQPPEGAEPPPYTDVTAHSAGWRWRIPLQHRYGNGYVYSSRHIDDEAAKAELVAAVPDRLLHEPRLIRFTPGRRKKVWNRNVVALGLASGFLEPLESTSIALIETGIEKLKALFPDRSFDPAVIDEFNDWSRREMERVRDFVVLHYKAAQRADTPFWRTTRDAEIPETLARKVELFRSRGHIARYRWEMFQPPSWLAIFAGFDILPEGWDPALDGIDGAALAASLNQMRAGVARAVAGAPTHGEFLRRYVGAAPAAAE

SEQ ID NO: 83257 - protein, 506 aa, Novosphingobium sp.
  REGION 1..506: note = tr|A0A2T6M8K2|A0A2T6M8K2_9SPHN Tryptophan halogenase; OS = Novosphingobium sp. GV027 OX=2135689 GN=C8K10_103138; PE = 4 SV=1
MDSQVARSITIVGGGTAGWMCAAALGHFLGENTRITLVESDAIGTIGVGEATIPQIRMFNQALGIDETDFIRATGATFKLGIEFAGWLRPGHSYLHAFGDVGRDIGLGAFRHFWSRAHRLGLARPLGDYSVNDLAARAGKMHDGAPVTNRNVPQMPHAFHFDAGLYAAYLRRYAQAKGVIREEGLIVAVDRDGASGDVTAVRLADGRMIAGDLFIDCSGLRALLIGDTLGVGFDDWSHLLPANRAVAVPCASAAPLTPYTRSTAHAVGWQWRIPLQHRTGNGRVYCDAFLSDDEATAGLLANLDGAPLADPRVIRFTTGCRQQAWSHNVIAMGLASGFLEPLESTSIHLIQSMIARIMTFGPTCRPATAVRDTFNRQFADEMARIRDFIVLHYWANERKEPFWQACRNLPLPASLAEKIALFQSAGHLFRDQSDLFSEVGWLQVLVGQGIIPATSHALAEAVSEADLAGWLDTLHALFSREVAAYPTHADYIARHCAAPSPKGLVA

SEQ ID NO: 83258 - protein, 509 aa, Caulobacter sp.
  REGION 1..509: note = tr|A0A2T9KDC4|A0A2T9KDC4_9CAUL Tryptophan halogenase; OS = Caulobacter sp. 774 OX=2172652 GN=DDF67_01635 PE=4 SV=1
MANNLRKIVIVGGGSAGWITAAMISHYLKDSPCEIELIESEQIGIIGVGESTIPPFLQLIRSLGIDEKEFMQETQAAFKLAIRFENWRQKGEVYYHPFGLIGGLVDVHEFYQVWLRGKAEGHPSSLQDFAPASVMADRWKFMSPAMAPRTMLANANYAVHIDAALLAKFLRKFAEARGVKRTEGIVKDVATRPDGFIEKVILQDGREASGDLFIDCSGFRSLLNGKTLGTEFLDWSDVLLNDRAIAVQTANIQDPHPYTLAQAQDAGWRWRIPLQHRAGNGYVYCSQYCSDDEALATLMSQVEGEAVRDPWLVPFKTGMRKQLFNKNCVAIGLAGGFIEPLESTALHLIYRGVDYLLRFFPDRDCDPVLAAEYNRRMQVDYEEIRDFIVLHYFTTRRDDTPFWRAYQQVTPPESLRERIELFKASGVLRDGVDDMFRAPSWQSVMEGMGIRPKRYQQLVDTLPAGVVKGLLDKSAPMLSELVDTLPSHGDFLRQHCPAPVPEALLKRAG

SEQ ID NO: 83259 - protein, 510 aa, Caulobacter sp.
  REGION 1..510: note = tr|A0A2T9K1F9|A0A2T9K1F9_9CAUL Tryptophan halogenase; OS = Caulobacter sp. 774 OX=2172652 GN=DDF67_11760 PE=4 SV=1
METSTPLDIVIVGGGTAGWMMATALVSGLRPHQARVRLVESDEIATVGVGEATIPAMRDYNRFVGIDEVEMMRETNGTFKLGIEFLDWGFKGSSYHHPFGVHGAAIGGAGFHHHWNRARLAGHHFDIEQFSYAIAAARADRFEFPNPDPDRIDSTYSYAYHFDASLYARYLRTVAEGRGLKRTEGKVVDVTRDPLSGDVASITLASGEVVKGDFFVDCTGFRGLLIGQTLESPFEEWTDWLPCDRAWAVPCARADRFTPFTRSTAREAGWQWRIPLQHRTGNGYVYSSRYISDDEAASVLMANLDGEALAEPRQIRFKAGRRTASWTRNVMAAGLASGFLEPLESTSIYLVQVAVMNLLKLFPGKRVEPALVEDFNRRVDMEYDRVRDFLILHYHANTRTDGELWKHCREMEIPESLREKLELFRHRGVAPNHRDGLFAQPSWISVLLGQGVLPGGYDRMADNVPLPQALAEMERQQAVIARRVPAMPSHADFIARHCAITERPVAEIMA

SEQ ID NO: 83260 - protein, 493 aa, Marinimicrobium sp.
  REGION 1..493: note = tr|A0A2D8WJI4|A0A2D8WJI4_9GAMM Tryptophan halogenase; OS = Marinimicrobium sp. OX=2024837 GN=CMG77_05425 PE=4 SV=1
MNKPVRKVVIAGGGTAGWVCAAALSSQLGDLLNIVLVESEDIGTVGVGEASIPPMRNFHRLIGVDEQQFMAATGATFKLGIAFENWARDGDRYIHSFGKTGKETWMADFQHFWLRAREQGFGGEFGEYCVEHEAAREGKFAASSNGSLNYAYHLDATRYAAFLRTKSESEGVTRIEGKIQQVHLNPDSGYIESLEMASGESVDADLFIDCTGFRGLLIEEALHTGYEDWSHWLPCDSALAVQTESVGPPPPYTLSSAHDSGWRWRIPLQHRVGNGLVYCSRYSSDEAARDRLLSSIEGKPLTEPRLIRFRTGRRRQTWNKNCVAVGLSSGFVEPLESTSIHLIMISMTRLIQLFPFDGITPSLVSHYNRIAKDELEKIRDFIILHYHATERSDSPFWRHCSNMSIPESLQERIALFREQGHAYQAPNELFRLDSWVQVMLGQRINPERYHPIVRAMGDERLKKTLDDFRRQVSLGVEKLPPHGAFVEEYCRER

SEQ ID NO: 83261 - protein, 520 aa, Massilia sp.
  REGION 1..520: note = tr|A0A354IQR7|A0A354IQR7_9BURK Tryptophan halogenase; OS = Massilia sp. OX=1882437 GN=DDZ22_02195 PE=4 SV=1
MASSTIRHVVIVGGGSAGWLTAGLIAAEHRASVPDGLRVTLIESPDVAPIGVGEGTWPSMRDTLRRIGVSESDFFRECDAAFKQGSLFARWSSDQEGDYYFHPFSLPQGYGEADLVERWQQAHAQVPFADLASYQPHLCMAGRAPKQAATPEFAAVANYGYHLDAGKFGLFLKKHCLEHLGVHYVPDHVLGIVSHENGDIAALRTQHHGLLAGDLFVDCTGMRSLLLGQHYGVPFLSQQHVLFNDTALAVQVPYAHDDSPIASQTTSTAQQAGWIWDIGLPTRRGVGHVYSSAHTSDEEAERALRAYVAASGGPRDCPAPRKIGFQPGYRERFWHRNCVAVGLSSGFIEPLEASALAMVELSAAMIVDEMPVTREHMDVVARRFNETFRYRWERVIDFLKLHYVLSRREDSADFSSYWRDNRTPESVPERLRELLSLWRYRAPMRGDFPRIEEVFPTASWQYVLYGMGWRNDAGATRRGDGALADRYFREAADLTRRMLPALPANRELLSHIRAHGLPRT

SEQ ID NO: 83262 - protein, 518 aa, Thalassomonas sp.
  REGION 1..518: note = tr|A0A553F6G6|A0A553F6G6_9GAMM Tryptophan 7-halogenase OS=Thalassomonas sp. M1454 OX=2594477; GN = FNN08_15925 PE=4 SV=1
MNQEIKRIVIVGGGTAGWLTAGIIAAEHSADGNSDVEVCLVESPDVKPVGVGEGTWPTMRGTLEKIGVTETDFIRQCDASFKQGAKFAKWVTGKEDDFYYHPLVLPQGYADINLAPFWQPQSDKVTFTNAVSFQGHLCDHGLAPKQNTTPEYAHIANYAYHLDAGKFAVFLQNHCTKKLGVKHILDHVVSINNNESGDIKSLSCKNQEDIEGDLFVDCSGFSSLLLGKHYQVPFISKKHILFNDSALAVHVPYESEQSPIASHTISTGQSAGWIWDIGLPSRRGVGHVYSSRHISDEQAADELREYIRESVGDKADQLEFRKIPIEPGHRQKFWHKNCVAVGLSAGFLEPLEASALVLVELSAAMISEQLPANRQVMDIVAKRFNDKFLYRWDRIIDFLKLHYILTKRTDTEYWRDNCDPESIPTELQDLLTLWKYQSPYHQDFTQVDEVFPSASYQYVLYGMGFKTEQPLSAKQKSMIDTAMENFQKNAKLSHKLLSVLPSNRDLINKIKEFGLQKI

SEQ ID NO: 83263 - protein, 500 aa, Sphingomonas sp.
  REGION 1..500: note = tr|A0A0Q4K6H6|A0A0Q4K6H6_9SPHN Tryptophan halogenase; OS = Sphingomonas sp. Leaf30 OX=1736213 GN=ASE89_04030 PE=4; SV = 1
MTAAIGSVVIVGGGTAGWMAAVAFGRLLGPAGTRVTLVESDDIATIGVGEATIPPIRTFHAMLGIDEDAFLRATGGSYKLGIRFEGWTRPGESYVHPFGQIGTDIAGVPFAAQWLRARQAGAAEALGAYSLEARAAEAGRFSRPIANGDSPLSRIGYAYHFDAGRYAAFLRAQAEAHGVVRREGRVDRVERGPAGIAAIHLADGSRIEGDLFLDCTGFRALLIEGALRAGWTDWSQWLPCDRAVAVPSAADAAPLALTRAIAEPAGWRWRIPLQHRTGNGHVFSSRHTSEDEATATLLAGLDGKALADPRVIRFATGHRTRFWNGNCIALGLAAGFMEPLESTSIHLVQSGLQHLLRMLPAGGPPAPAIVDRYNRTMTGEFVRIRDFLVAHYHLNARTEPFWRERAAAPIPDGLAEKLALFRAGGRIFREADELFNEVSWLALLTGQDAPVTGHDPICDALPIAIAAKRLAQIERVVSTSLTHMPPHATALAQLATNRML

SEQ ID NO: 83264 - protein, 510 aa, unidentified
  source 1..510: note = [Pseudomonas] geniculata
  REGION 1..510: note = tr|A0A0L8ADK7|A0A0L8ADK7_9GAMM Tryptophan halogenase; OS = [Pseudomonas] geniculata N1 OX=1167641 GN=W7K_05215; PE = 4 SV=1
MLDTESTPAGRIRKVVIAGGGTAGWLAGCALAHQFRDQLQITLVESEQIGTVGVGESTVPPIRTFHRFLQIDEQEFLRAVAGTFKLSISFENWRLPGDRFFHPFGTIGHGTWAAPFHHFWLDSLRRGMPSDLGDFCLESIASRGDRFSLHTQPQASYAYHFDASLYARFLRHRAEAHGLRRIEGRIALVRQHAHDGSVQALVLDDGQVIEGDLFIDCTGFRGLLIEQALGTGYEDWHEWLPCDRAVAVQTEAVAPPVPYTRAIAHEAGWRWHIALQHRVGCGLVYDSRHLSDDEAAAKLLRDAGAPPLRDPWKVPFRSGRRLKAWNGNVVSLGLASGFIEPLESTSIHLTISAVVRLIQLFPLDGISASLVKLYNDVSRQEMEHVRDFIILHYHATQRTEPMWKACREMRVPESLQQRLQAWRERAHAWQDPGELFRVESWTSVLLGQGIAPGPAHPLARAVSDADLRTLLKGIQQPVQQAAAQMPTQAEFIAQYCRSGVDVWRSTAANA

SEQ ID NO: 83265 - protein, 500 aa, Massilia sp.
  REGION 1..500: note = tr|A0A353HYR4|A0A353HYR4_9BURK Tryptophan halogenase; OS = Massilia sp. OX=1882437 GN=DDX04_19405 PE=4 SV=1
METHVNNKPVRRVVIAGGGTAGWMVAACLGKSLGKRLDIKLVESDEIGTVGVGEATIPTLQNFHHLLEINEQEFMAATHATFKLGISFENWRDVHQDYIHSFGNTGIDHWTAGFQHFWHKGRERGLAGDYGDYCLEHRAAQLNRFAHLPKQIINYAYHMDAGAYARFLRRFSEHYGVQRVEAKIVDVVKDPDANTIRSIKLDSGTELEGDLFIDCSGFRALLIGGALGVEYEDWSHWLFNDSAAALQTASSGEAVPYTRSIAREAGWQWRIPLQHRVGNGHVFSSRFIDDEAAIATLNKHVTGEPLMQPRVIRFQPGQRKQVWVGNCVAIGLASGFLEPIESTSIHLIQSAISRLIEFFPDRGFQDVERAEFNRQSRFEYERIRDFIVLHYHLNQRTDSPYWLACANMAIPDTLRQKMDLYRARGKVVRVDNELFSEVGWIQVLEGQNMPVNAYNPLVDVQSEADIADYLDSVRGVIAKCVSVMPTHEEYIARHCAAPKM

SEQ ID NO: 83266 - protein, 561 aa, Phaeobacter inhibens
  REGION 1..561: note = tr|A0A2I7KC00|A0A2I7KC00_9RHOB Putative tryptophan halogenase OS=Phaeobacter inhibens OX=221822; GN = PhaeoP88_02697 PE=4 SV=1
MNNRLRKITIVGGGTAGWMTALILETELSRTSAPKDRPKICLIESPNIATVGVGEATVPRMPKTLRQAGISERAFFRETNASFKLGVKFCNWNKDAKGNRIDYVNPFAHGQLLDGLEPAEYFLRFGNGDRDYTQSIAPHDDLGRLCKGARPLGQPEFEQRFGYAYHLDAVKFAGMLTKVCTKHGVEHIQDEVTSVELDEQGNVSHLMLAQRGRHDIEMVIDCTGFRGLIINQALGEPFMDYSDYLPNDRAMALQIDHPDPEKIESLTRSTALGAGWTWRVPLYNRVGTGYVFSSAHRTDDQAADEYLEWLGDSGKGATPRIIPMRIGRVRNAWVKNCVAIGLAGGFIEPLESTAIHMIDHAVRWLTEHMPTRDIAPSLRTRYNRQMDKLYDEVLEFICLHYRLGNRTDDQYWIDARTEMKIPDRLAENLELWQHRLPMSHDIEFATLFDYRVYQTVLLGKQVYDTGYGPGIRDRLRPLKKPIWFQWWKGAKVDLANILKSMPDHKTLLRDIRGELDQPGFGMAAAMKPTVPMPGAAPVPWAIQNMPSFSEIESGQKDLQLF

SEQ ID NO: 83267 - protein, 510 aa, Marinimicrobium sp.
  REGION 1..510: note = tr|A0A2D8WGX4|A0A2D8WGX4_9GAMM Tryptophan halogenase; OS = Marinimicrobium sp. OX=2024837 GN=CMG77_00665 PE=4 SV=1
  VARIANT 461: note = Xaa can be any naturally occurring amino acid
  VARIANT 473..474: note = Xaa can be any naturally occurring amino acid
MTVGPQRIVIVGGGTAGWMSAAALARLLPSRVSLQLIESEQIGTVGVGEATIPHIRYFNALLGIDEREFIHATQATYKLAIEFVGWGRETSRYLHPFSAFGGDIDGIDFHHYWLRTRDEWPELNLDAFSLAAQAARLGRFAPPPEHSEFGYGYAFHLDASRYAGYLRAYAEQRGVTRTEGRIQSVIPRESDGGVAALTLESGERIEGDLFIDCSGFRSLLLGQTLGVPFNSWKHWLPCDRAVAIASGALSEPPSFTRSTATTTGWQWRIPLQERTGNGQVYDSRSISDDEACAQLIGSLNGAPQSDPNLIRFEAGARARSWDKNVIAIGLSSGFLEPLESTSIYLIQMAIFKLVEFFPNSESGAVGREAFNRWMSLEYERVRDFIILHYHLNQREDSEFWQDCAHMSVPEGLQRKIALFKESAAIEFYDQGLFAPPSWLAVYLGQGLNPEAIDPRVAQQPXASLKGPLEQLAXXLNRTAQALPLHREVLARGGVAPSAAAPMSLYGGRYG

SEQ ID NO: 83268 - protein, 494 aa, Duganella sp.
  REGION 1..494: note = tr|A0A3E1SAB6|A0A3E1SAB6_9BURK Tryptophan 7-halogenase OS=Duganella sp. BJB480 OX=1871181; GN = D0T24_12215 PE=4 SV=1
MDTAYKRIVVVGGGAAGWMAATALATALPASTVELVESEEIGIVGVGEATFPSIRHFHRLVGIDEAEFLRATNGTYKLGIEFRDWRIQGESYFHTFGDFGELSGPDALWGHFRRLGDAGLGTLGEQCLPSVMASQGRFQGLASEENKPFNYAYHFDAALYAGFLRALALKRGVRRTEGRIVDVARRADGGVASLKLADGRELAGDLFIDCSGFASLLLGRTLDEPFVDFSHWLPVDRAWAVPSEPSGTALTPYTRATALEAGWAWRIPLSNRVGNGHVFASRYLDEERAREQLLAQLDGPALAEPRLLRFTTGHRQRCWVHNVVGLGLASGFLEPLESTSIFLIQSGLGHLIPLLERGGAPTAAEVGDYNTGMTRQFARIRDFIILHYCLTARRDSRLWRDMAGMALPETLEFKIHAWRQAGVLHQYQWEGFDANSWLAIHAGMGHWPERADPALAELPRDEALQALRQRREAIAAVVAAMPTHDAYLRRMVAR

SEQ ID NO: 83269 - protein, 496 aa, Thalassomonas sp.
  REGION 1..496: note = tr|A0A553F9X9|A0A553F9X9_9GAMM Tryptophan 7-halogenase OS=Thalassomonas sp. M1454 OX=2594477; GN = FNN08_12815 PE=4 SV=1
MNNKAIKNVVIAGGGTAGWMAAASLSKLLGKTINVTLVESDDIPTVGVGEATIPTLHIFHSLLGINEAEFMAATNATFKLGISFENWRDVNKDYIHSFGFLGQDCWACGFQHFWLKGLQKGMVSEIGDYCPEHLASREGRFAVLANQDLNHAYHLDAGLYAKFLQKIAFDHGCTRVEGKIDKVNLDEQTGYITSLNLGNGKVVEGDLFIDCTGFRGLLIEDALHTGYDDWSHYLPCDSAIAVQTETVGKPVPYTRSIARDAGWQWRIPLQNRTGNGFVFCSKYMSDEEAKQTLLENIEGKLLNEPRVIKYKTGARRKHWNKNCIAVGLASGFIEPLESTGIHLFQKAVVRLLQLFPSQGINQADVDEYNEQTKREADNIRDFIILHYHLTERRDSPFWRYCATMPIPESLAHRMKLFKESGRVFKKTDDLFGETSWVQVMMGQGLMPEQYHPIVDMMSDDELQGFLNKIKNGVQKRVANWPDHNDFIAHYCKAKTN

SEQ ID NO: 83270 - protein, 505 aa, Sphingomonas sp.
  REGION 1..505: note = tr|A0A0Q4KHL4|A0A0Q4KHL4_9SPHN Tryptophan halogenase; OS = Sphingomonas sp. Leaf30 OX=1736213 GN=ASE89_04035 PE=4; SV = 1
MTIGAPVRRIVIVGGGTAGWMAAAALARLIPTGASITLIESDAIGTVGVGEATIPPIRGFNAMLGIDEAEFLAATAGSFKLGIEFVDWGALGERYLHPFGGFGFDIEGVRFHQYWRRRRAAGIVEDIEAYSLCAVAARAGRFMPPSPDPASVLSQMAHAYHFDAGLYARFLRGRAERDGVVRVEGDVVDVALDGETGHVRHVTLAGDRVIEGDLFLDCSGFRGLLIEQTLGAGYEDWTHWLPCDRAVAMPTANAGAAITPYTRSTARAAGWQWRIPLQHRTGNGYVYSSAHCSDDEAAATLHAGVDGIPLAEPRLLRFTAGRRRKQWIGNVVALGLASGFTEPLESTSIHMVQTGISKLLALFPDQGFSPVEIDTYNRLAATQFDQVRDFLILHYHATRRDDSPFWRETRARAIPDSLSEKLALWRRRGRLFRWEDDLFAEASWVAVLLGQGIVPDGWDRLADAVDAREVDARFDRLRAMFADAASRMPRHEEYIARICPTRVRA

SEQ ID NO: 83271 - protein, 538 aa, Pseudomonas chlororaphis
  REGION 1..538: note = tr|A0A1H1Y1V3|A0A1H1Y1V3_9PSED Tryptophan halogenase; OS = Pseudomonas chlororaphis OX=587753 GN=SAMN04489802_3338; PE = 4 SV=1
MNKPIKNIVIVGGGTAGWMAASYLVRALQQQANITLIESAAIPRIGVGEATIPSLQKVFFDFLGIPEREWMPQVNGAFKAAIKFVNWRKSPDHSRDDHFYHLFGNVPNCDGVPLTHYWLRKREQGFRQPMEYACYPQPGALDGKLAPCLADGTRQMSHAWHFDAHLVADFLKRWAVERGVNRVVDEVVEVRLNDRGYISTLFTKEGRTLEADLFIDCSGMRGLLINQALKEPFIDMSDYLLCDSAVASAVPNDDAREGVEPYTSAIAMNSGWTWKIPMLGRFGSGYVFSSKFTSRDQATTDFLNLWGLSDNQPLNQIKFRVGRNKRAWVNNCVSIGLSSCFLEPLESTGIYFIYAALYQLVKHFPDTSFDPRLSDAFNAEIVHMFDDCRDFVQAHYFTASREDTPFWLANRHELRLSDAIKEKVQRYKAGLPLTTTSFDDSTYYETFDYEFKNFWLNGNYYCIFAGLGMLPDRSLPLLQHRPESIEKAEAMFASIQREAERLRTSLPTNYDYLRSLRDGDAGLSRSQPGPTLAAREIL

SEQ ID NO: 83272 - protein, 504 aa, Caulobacter sp.
  REGION 1..504: note = tr|A0A2T9K3V9|A0A2T9K3V9_9CAUL Tryptophan halogenase; OS = Caulobacter sp. 774 OX=2172652 GN=DDF67_09350 PE=4 SV=1
MTNDRIRHVVIVGGGTAGWMTAAALGRFLKDGVTKVTVIESEAIGTVGVGESTIPQINMFNRMLGLDEDDFLRKTKATYKLAIEFRDWKEIGHTYHHPFGPYGVDMEGVSFHAYWLRYQAMGEAADLSEYSLQSLAAAHAKFQRPTGQKNSPLGDIAYAFHFDAGLYARFLRDYAEARSVRRIEGRIVDVALRGVDGFVESVTLENGAVVEGDLFIDCSGFRGLLIEGAMKSGFEDWSHWLLNDRAVAVPCASGGSTDPVTRATARPAGWQWRIPLQHRIGNGYAFSSQHISEDEATAYLLANLDGEALADPNLLRFKAGRRKKSWSRNVVAIGLSAGFMEPLESQSIHLIQVGISRLLAMFPDRRFQQPDIDRYNRVMAFEYEKIRDFLILHYKATERADTPYWDYLREMQIPDYLADKIAVFESHGRVFRENEELFNDTSWFAVMVGQGLRPRGWDPMADVMSEDLLRARMNEIRAVIARSAEAMPDHMTFVAERVAGARAA

SEQ ID NO: 83273 - protein, 494 aa, Acinetobacter venetianus
  REGION 1..494: note = tr|N8ZRD1|N8ZRD1_ACIVR Uncharacterized protein; OS = Acinetobacter venetianus (strain ATCC 31012 / CIP 110063 / RAG-1) OX=1191460 GN=F959_02849 PE=4 SV=1
MLNLRGMNRVVVVGGGTAGWFAALQLRQLFSASVEIMVISAPQIPIVGVGEGGVLNLLTVLHDLNVDLKDFIAKTGSTLKLGFRYESWRTGQSDDYYYHLFPLATDDFVWNENGYNPFLSGLFNHGIDISKYMASYQFSEEKKPFEEVLKILLEGKNNFGASLHFDTFRVGQYLRDIAIARGILHVEEKVESFQIDTLTGHISSICLEKRNIDCDFLIDASGFARLLIGKQYQSEWCSFSDVLPLNRALPFHLQYGDEPKELVTRATAMSSGWMWQIPLQERIGAGYVFHDEFISDQQAQREVEAWLGCEIKPAKPISFEAGCYKEVWIKNVVAIGLASGFVEPLEATSIGQMLTQLQLLVSFIKENHGIISKQNIDCFNQQNTQFWFGIRDFIRMHYDTGRSDTDFWKFMLTVQQPETYQELKKCWVYRTPRDIDFVQHSMGGVSMFSVASWFAVGAGVGIIKPDATATELYALSPEKKARVAKFLHEFKRNS

SEQ ID NO: 83274 - protein, 485 aa, unidentified
  source 1..485: note = Alteromonas mediterranea
  REGION 1..485: note = tr|S5AE09|S5AE09_9ALTE Putative tryptophan halogenase OS=Alteromonas mediterranea 615 OX=1300253; GN = I633_10290 PE=4 SV=1
MASCIINEKGLGKAVDITLVESEAIGTVGVGEATIPPIRLVNQVLGIDEAQFLHDTKATIKLAIRFENWKTKGESYYHTFGAPGKSMAFCHFHHYWVKARQQGLKADLWDFDLNYHAAEAGRFAQINAKDPVVELPFAYHFDASLYAQYLRKLSENMGVVRKEGKISRVQRFTDSGFIQALHLESGDVVEGDLFVDCTGFKGLLIEEALGAGYDDWSHLLPCDSAIAVPSERHEKTAPYTRSIAHDAGWQWRIPLQHRNGNGHVYSSRYISDDQACDTLLSNLDTKPLGDPKLIKFTTGRRRKQWYKNVVAVGLSSGFLEPLESTSIHLIQSAIVRLIQLFPHNGFAPSLETEYNKQSELEFEQIRDFLILHYTVNERTDSAFFNDMRNITLPDSLAHKIALFKESGNLLREQNDLFLESSWLQVLYGQGVTPKDYHGLVNSVPEVQLNQMLTRLLEIKKEPIAKLPTHNEYINGMVAKYKRAMS

SEQ ID NO: 83275 - protein, 503 aa, Novosphingobium sp.
  REGION 1..503: note = tr|A0A2T6LQA7|A0A2T6LQA7_9SPHN Tryptophan halogenase; OS = Novosphingobium sp. GV027 OX=2135689 GN=C8K10_12810; PE = 4 SV=1
MDDRKIRKVLIVGGGSAGWMTAAMLSQALARDCAITLVESEEIGTIGVGEATIPPIRVFNQTLGIDEREFLARTKGSFKLGIEFVGWGAENSRYFHPFGPYGRNFDMVPMHQYWLQARRQGETAPLDEHAMAWHLARAGRFAHPSPDPRSVMSTFDYAYHFDAGLYARFLRTIAEQRGVTRVEGRIADVALHGETGFVEAVTMADGRRIEAELFIDCSGFRGLLIEGALKTGYEDWSHWLPCDRAVAMPCAHPAADPNPTPYTRSTARAAGWQWRIPLQHRIGNGYVFCSAFLDEDRAAEDLASSLDGTALGDPRAVRFQAGRRKLHWNRNVIAVGLSSGFLEPLESTSIHLIQANISKILALFPDRDFDPATRDEFNRIAHGEMERIRDFIILHYKLTQRQDAELWRHVAAMDIPDSLALKIAHFRRHGRLIARELDLFAPPSWLAVHIGQNNLPEGHDPLIDYRGVDGREWLGRLRGAMAAEAAQQPLHGAVLAGLAPQPA

SEQ ID NO: 83276 - protein, 501 aa, Marinimicrobium sp.
  REGION 1..501: note = tr|A0A2D8WKN4|A0A2D8WKN4_9GAMM Tryptophan halogenase; OS = Marinimicrobium sp. OX=2024837 GN=CMG77_07580 PE=4 SV=1
MNTDDRRLRRIVIVGGGSAGWMSAAALANATQGQCAITLVESDAIGTIGVGEATIPPIRLFNRVLGLDEREFLRRTKGTFKLGIQFVDWAHQGHSYFHPFGPHGRNFDTVSLHHHWLRARESGETSTPLHEHSMAWAAASRNRFAPPVQDPRNVLSTYDYAYHFDAGLYAAFLREYSEAKGVERREGTVTDVHLNSDSGFVESVQMASGERIEGDLFIDCSGFRALLIGEAMKVGYRDWSDWLPCDRAVTVASAPGELTPYTRSTAHAAGWQWRIPLQHRTGNGYVYCSRHISSDEAAATLLKHLDGERLGEPRELAFTTGRREKFWEKNVVAVGLSSGFMEPLESTSLHLVQAAISRLLGFFPDRDFDSAVIDEYNRITINEFERIRDFLILHYKLTERDDSPLWRECRDMPVPTPLENKLYHFGAYGRLIADGADLFGPDSWLAVHVGQNHRPKRVDPLLAFRTVDGGAWLEKLRAAVTAAADQLPEHQAFIHKYCSGG

SEQ ID NO: 83277 - protein, 517 aa, Pseudoalteromonas phenolica
  REGION 1..517: note = tr|A0A4Q7IKL2|A0A4Q7IKL2_9GAMM Tryptophan 7-halogenase OS=Pseudoalteromonas phenolica OX=161398; GN = C1E23_15600 PE=4 SV=1
MEISNTIDSVVIVGGGTAGWLTASKLAKKLNSNKEGAISVTLIESPDIPTVGVGEGTWPTMRKTLAEIGIDETEFIRFCNASFKQGSKFVNWKSAPASSDNHYYHLFSSILDPSEFNLSPYWNLGQAGEKTYAESVSTQGYLSDLFKAPKTISSKAYDGIQSYAYHLDAGKFSELLKRHATENLGVKFLSCNVTNVNSHNEEIISVNTDTYGEIKGDFFVDCTGFACLLLGKTLGIPFKPVSDILFTDHAVAIQVPHDDDNCDINSCTISTAQEAGWIWDIGLQNRRGVGHVYCSEFISHEEAEQTLRDYIGEKSKGLPAKLVPMNVGYREKFWHNNCVAVGLSAAFVEPLEASAIFLIEAASNMLSDQLPKDKSLLPLAAKKFNDSFQFRWNKTIDFIKLHYVLSKRDEPFWQKNKKPESIPQSLQDALLQWRSEPVSAYDFSHVYEPFPMESYQYVLNGMEFDQDLSLSAAKYDEIEHAKKAFAQIDKVKDILIKELPTNRELLNKLSSYSFTKV

SEQ ID NO: 83278 - protein, 538 aa, Pseudomonas chlororaphis
  REGION 1..538: note = tr|A0A3G7TQH7|A0A3G7TQH7_9PSED Thioredoxin reductase; OS = Pseudomonas chlororaphis OX=587753 GN=C4K04_3703 PE=4; SV = 1
MNKPIKNIVIVGGGTAGWMAASYLVRALQQQANITLIESAAIPRIGVGEATIPSLQKVFFDFLGIPEREWMPQVNGAFKAAIKFVNWRKSPDHSRDDHFYHLFGNVPNCDGVPLTHYWLRKREQGFRLPMEYACYPQPGALDGKLAPCLPDGTRQMSHAWHFDAHLVADFLKRWAVERGVNRVVDEVVEVRLNDRGYISNLLTKEGRTLEADLFIDCSGMRGLLINQALKEPFIDMSDYLLCDSAVASAVPNDDAREGVEPYTCAIAMSSGWTWKIPMLGRFGSGYVFSSKFTSRDQATADFLNLWGLSDNQPLNQIKFRVGRNKRAWVNNCVSIGLSSCFLEPLESTGIYFIYAALYQLVKHFPDTSFDPRLSDAFNAEIVHMFDDCRDFVQAHYFTTSRDDTPFWLANRHELRLSDAIQEKVQRYKAGLPLTTTSFDDSTYYETFDYEFKNFWLNGNYYCIFAGLGMLPDRSLPLLQHRPESIEKAEAMFASIQREAERLRTSLPTNYDYLRSLRDGDAGLSRSQPGPTLAAQETL

SEQ ID NO: 83279 - protein, 516 aa, Novosphingobium sp.
  REGION 1..516: note = tr|A0A2T6M704|A0A2T6M704_9SPHN Tryptophan halogenase; OS = Novosphingobium sp. GV027 OX=2135689 GN=C8K10_104362; PE = 4 SV=1
MTDMPATQHAKPIRQIVIAGGGTAGWMAACYFSGRLARQGVTITVVESSAIGTVGVGEATVPGIRDYFRAIGVEDIDVLRATGGTVKLGIEFRDWAQPGSRFFHPFGLYGVPSRGVPFHQYWLKLQHAGEPTDLAAYSLCSALAQRGAFMLPPDKPVNDLAVFDWAVHFDASRFAAMLRDRALAQGVHHIDDVINDVALDAQTGHIAHLVTKEHGSVAGDLFIDCTGFRSLLLGKALGVAWTDWTDLLPCDRAVAIPCAADATRDWPYTVSTAQEAGWQWRIPLQHRVGNGYVYSSAMLSDDEATAKLLSRLEGEALAEPNLIRFGAGHRQRFWAGNCVGMGLAAGFLEPLESTSITLIQTAIERLAEFFPDATFDPALADEFNRATTLEYARIRDFLILHYLGNRRVGEPFWDRLRDADVPEMLAHKLRLFRARGRLVRYEWESFLDPSWLSMYAGFDWLPRAHDPMADHFTDAEISEALRRMRETVAGAVAEARPHRDFIAHIAGSPPAGPLAA

SEQ ID NO: 83280 - protein, 507 aa, Shewanella frigidimarina
  REGION 1..507: note = tr|A0A125BE65|A0A125BE65_SHEFR Tryptophan halogenase; OS = Shewanella frigidimarina OX=56812 GN=AWJ07_19590 PE=4; SV = 1
MDQTIIKNIVIVGGGTSGWMTAAMLAKLFKTQLNITLIESDTIGIIGVGEATIPPLQIFNSVLGISEKDFIKATQATYKLGIEFENWHQQGDAYMHAFGNIGRDLGFTSFHHYWLSAQAHCGQQNQSTFSVKDFWQYSLNYQAAKHNKFQPIQSIAQAQMSGITHAYHFDASLYANLLRQYSIQRGVVRVEGTITSTQLTNDGAIDSVTLQNGDCINGDLFIDCSGFSALLIEKVLGIEYENWQHWLPCDCAYAVPCERISPLAPYTKATAHDAGWQWRIPLQHRTGNGIVYSSQHMSDEQAKQHLLANLDGKPLAEPRKINFTTGRRVKQWHKNCVAIGLSSGFLEPLESTSLHLVQSAIIRLTKLFPRNGIQSQHIDEFNRQSQTEFEQIRDFIILHYHLNAKQSADGEHGLWQQCRDMDIPESLQRRIDLFKSTATVFRHQDELFTEAAWIQVMLGQGITPTDFHPLTQAVSQVDLNNYLANIRKVIATTVNQMPTHEAYIKKC

SEQ ID NO: 83281 - protein, 507 aa, Novosphingobium nitrogenifigens
  REGION 1..507: note = tr|F1ZAZ4|F1ZAZ4_9SPHN Tryptophan halogenase; OS = Novosphingobium nitrogenifigens DSM 19370 OX=983920; GN = Y88_0280 PE=4 SV=1
MTDAPPTRIAIVGGGTAGWIAASALTRFLPKGRFSIALVESEEIGIVGVGEATIPQIRLLNAALGIDEYAFMRASQATYKLGIEFVGWGTAASRYIHAFGSVGRPTGTVPFHHYWLRGRQLGQRQPLDAYSLNAQAAWSNRFAKTDGIDLPYAFHFDAALYARFLRGWAEARGVTRHEGRIVEVRRDGESGEVRDVVLSDGRAIAADLFLDCSGFRGILIEQALETGYEDWTHWLPCDRAIAIPCAPAPSLAPYTRSTAHRAGWQWRIPLQHRIGNGHVYCSAHTSDEEALAVLLANLDGEPLGEPRTLRFSTGRRKAFWNRNVVALGLAAGFMEPLESTSIHLVQSAIERVIRYLPNGPIRAADVAAYNAETVFEWERVRDFIILHYHANSRPEPFWRTCATMAVPETLAAKLALFRANGRITRQNEELFAEVGWLQVLIGQGIMPEGWHPLADGHSPAEVVELLTLLRQVTAKQASTLSDHAQFLARHCPAPSPTRQAAPSVMPS

SEQ ID NO: 83282 - protein, 503 aa, Sphingomonas sp.
  REGION 1..503: note = tr|A0A0Q4KB38|A0A0Q4KB38_9SPHN Tryptophan halogenase; OS = Sphingomonas sp. Leaf30 OX=1736213 GN=ASE89_18315 PE=4; SV = 1
MTQARLGSIVIVGGGSAGWMTAAALSSLVQTKDVSITVIESDAIGTVGVGEATIPDMLVFNQMLGISEAEFMRATDATFKLGIEFVDWGHKGDRYIHPFGQHGVDMEGIDFHQYWLRLRRDGGTAPIEDYSLSAVAAGAGRFALPDPNPRSVFSHLRYAYHFDATLYARYLRRYAEKRGVKRVEGVVNAVQRTAQGDGIAAVTMDSGAQVKGDFFFDCTGFRALLTGQTLDIDFVDWSAWLPCDSALAVPSAHVGPPPPYTRSTARPAGWQWRIPTQRRVGNGHIYSRSFMDDDEAERVLRKGVEGALLAEPRAIRFKAGHRRQFWRGNCIAIGLAAGFLEPLESTSLYLIQEGISRFISLFPNGDIPDILRVEYNRYMQKKFEQVRDFIVLHYVATNRDDTPFWRYCRRMSVPDSLQHKMELFRETGRIFRYDDELFARPSWVAVMLGQGIMPKRCDPIVEALPARDVANSLQSMASAMKDAASRMPTHASFIASYCAATEG

SEQ ID NO: 83283 - protein, 39 aa, unidentified
  source 1..39: note = Alteromonas mediterranea
  REGION 1..39: note = tr|S5AIC9|S5AIC9_9ALTE Tryptophan halogenase; OS = Alteromonas mediterranea 615 OX=1300253 GN=I633_20155; PE = 4 SV=1
MTTATPITHIVVVGGGSAGWLTAGVLQRSISALPAKTLK

SEQ ID NO: 83284 - protein, 533 aa, Streptomyces sp.
  REGION 1..533: note = tr|A0A0M9ZFC8|A0A0M9ZFC8_9ACTN Tryptophan halogenase; OS = Streptomyces sp. H036 OX=1519487 GN=ADK98_05425 PE=4; SV = 1
MTSTDTRLQKVVILGGGTAGWMTAAYLGKALQGTVDITVLEAPTIPRIGVGEATVPNLQRSFFDYLGIAEDEWMRECNASFKMAVRFVNWRTDGQGESTARELPGGGPDHFYHPFGLLPDYDQTPLSHYWFKRKYEGRTTEPFDYACFREPPVMDAMKAPRWLDGRPATRYAWHFDAQLVADFLRRFATEKQGVNHVQDEMVRVEQDSRGYVTTLHTKGGLALDADLFVDCSGFRGLLINQALQEPFIDMSDHLLCDSAVATAVPHDDEANGVEPYTSAIAMSSGWAWKIPMLGRFGTGYVYSSKFADQDTATREFADMWGLDVEETKFNHIRFRVGRNRRAWVKNVVSIGLSSCFLEPLESTGIYFITAAIYQLAKHFPDKTFNEGLVNSFNHEIEVMFDDTRDFIQAHFFYAPRNDTPFWQANKKLVLPDNIKQKISAYKAGLPINSPITDESTYYGNFEAEFRNFWTNGSYYCIFAGLGLEPDAPLPTLAHRPESVAGAEPLFDTVKRQQQNLLETLPSAYDYLRQLHGA

SEQ ID NO: 83285 - protein, 506 aa, Marinimicrobium sp.
  REGION 1..506: note = tr|A0A2D8WN48|A0A2D8WN48_9GAMM Tryptophan halogenase; OS = Marinimicrobium sp. OX=2024837 GN=CMG77_12150 PE=4 SV=1
  VARIANT 5: note = Xaa can be any naturally occurring amino acid
  VARIANT 10: note = Xaa can be any naturally occurring amino acid
  VARIANT 20: note = Xaa can be any naturally occurring amino acid
  VARIANT 45: note = Xaa can be any naturally occurring amino acid
  VARIANT 66: note = Xaa can be any naturally occurring amino acid
  VARIANT 74: note = Xaa can be any naturally occurring amino acid
  VARIANT 76: note = Xaa can be any naturally occurring amino acid
  VARIANT 89: note = Xaa can be any naturally occurring amino acid
  VARIANT 116: note = Xaa can be any naturally occurring amino acid
  VARIANT 142: note = Xaa can be any naturally occurring amino acid
  VARIANT 145: note = Xaa can be any naturally occurring amino acid
  VARIANT 147..148: note = Xaa can be any naturally occurring amino acid
  VARIANT 173..174: note = Xaa can be any naturally occurring amino acid
  VARIANT 191..192: note = Xaa can be any naturally occurring amino acid
  VARIANT 213: note = Xaa can be any naturally occurring amino acid
  VARIANT 220..221: note = Xaa can be any naturally occurring amino acid
  VARIANT 270: note = Xaa can be any naturally occurring amino acid
  VARIANT 288: note = Xaa can be any naturally occurring amino acid
  VARIANT 302: note = Xaa can be any naturally occurring amino acid
  VARIANT 309: note = Xaa can be any naturally occurring amino acid
  VARIANT 327: note = Xaa can be any naturally occurring amino acid
  VARIANT 352: note = Xaa can be any naturally occurring amino acid
  VARIANT 361: note = Xaa can be any naturally occurring amino acid
  VARIANT 374: note = Xaa can be any naturally occurring amino acid
  VARIANT 377: note = Xaa can be any naturally occurring amino acid
  VARIANT 381: note = Xaa can be any naturally occurring amino acid
MTESXGHVVXVGGGTAGWLXAAMIAAHHNGHRPDGLKVTLVESSXIPTVGVGEGTWPTMKNTLQKXGIDEKTFXAXCHSTFKQGGKFIXWHTGNGDAYYHPFTVPIAYERLDLAPXINDLTHFAPETNFQHHICEAGLGPRXLTXPXXQGPCNYAYHLDAGEFAELLKQHATXXLGVHHLVDTVSNVSLSXXGFIDAITLEQTGKLEGDFFVXCTGFASXXLGQALGVPFKPMDSILFNDRAIAVQAPYPDERSPIPCHTLATAKAAGWXWDIGLTHRRGTGHVFSSXFISEDEAEFTLRQXLDLSESXADSRVIKFSSGHRACWWXKNCVAVGMSAGFVEPLEATAIMLVXLSARFISEXLPADRHTMAIMEXRFXQAMXYRWQRIIDFLKLHYMLNDRPESYWKAHRDPASIPDSLKEDLAVWATRGPQTADFDSALELFPAASYQYVLYGMGFRPDFSSQAWLYDQQRLAQQVFTRNQQLTRQLLDSLPSHRDLIDRWLGQAA

SEQ ID NO: 83286 - protein, 441 aa, Pseudomonas sp.
  REGION 1..441: note = tr|W6VA77|W6VA77_PSESZ Tryptophan halogenase; OS = Pseudomonas sp. (strain GM41(2012)) OX=1144708; GN = PMI27_002189 PE=4 SV=1
MILILGAGPAGAAVALGLRRLGYPVTLVSEWRRFAALEGVSIRVLEALRGAGLHQALADAALPSQRQVSWNGQQHAQNIEFLLDRPSFDRGLREDLRLAGVELIEGRVLTVQSSASGHRIEIEGREALLADFLVEARGRQAPALGKGLRGPETVSLLNRWQGTPGSTASAVESLEDGWAWMARRADGQCYWQWTVDVASAELPGKAQLLDYCRQRRQGSALARAFFGAETEIDLQLHARSSTAILCPQVCGDHWIRVGDAAMAVDPLSGNGIFQSLSSALQAPTVINTLLRKPERAALAQRFHQQRVEQLFLRFARIGRDFYADEQRWVDQLFWQARRKWPDAEVAHAEADFSSLRIERAPVLRDGFVDEAEVVITADQPLGIWHVQGVELAPLVRRLRTEPAEQALAGLTVEQGRVVRSWLLSQGYRPLTLTLSPEGRGD

SEQ ID NO: 83287 - protein, 504 aa, Novosphingobium nitrogenifigens
  REGION 1..504: note = tr|F1ZAZ5|F1ZAZ5_9SPHN Tryptophan halogenase; OS = Novosphingobium nitrogenifigens DSM 19370 OX=983920; GN = Y88_0279 PE=4 SV=1
MERHPHMLRAIAVIGGGSAGSMTAAALAEAVGRTIPITVVESDAIGTVGVGEATIPPIRSFNARLGIAEADFLRATRGSFKLGIEFVGWGTPESRYFHPFGTHGADFDRVPLHHWWLRERLAGDMRPFDDYAMCWALARENRFGPPVPDPRMVHSTHDYAYHFDAGLYARFLRDYAQARGVTRIEGKIVSAGRDGESGLLTHVDLSDGRRVEADFFVDCSGFRGILIEEVLGAGYEDWTHWLSCDRAVAMPSANAGPITPYTRSTAHRAGWQWRIPLQHRQGNGHVYCSAHLDDDEAVAVLRDNLESEPLGDPRFLRFTTGRRRRAWVGNCVSIGLSSGFLEPLESTSLHLIQMGIERLLRILPDRRHDPLGPEEFNRATAAEFERIRDFIILHYHANSRPEPFWRACAAMAIPDELAYKIRHFMGAARLVSPHDELFRNASWLAVYFGQGMIPDVYDHLADARSHVDGAGHLRNLRDMMRRAAATFPSHDSVLARFAPDVTMA

SEQ ID NO: 83288 - protein, 528 aa, Thalassomonas sp.
  REGION 1..528: note = tr|A0A553FEJ4|A0A553FEJ4_9GAMM Tryptophan 7-halogenase OS=Thalassomonas sp. M1454 OX=2594477; GN = FNN08_08540 PE=4 SV=1
MQASEQLNNSTQLIRNIVIVGGGTAGWLTANHLAKQLNAKHCDEISITLIESPNIPTIGVGEGTVPLIRKSLAELGISESEFIKECDVTFKQGIKFVDWLNNPIAGKPHHYHHIFDYPLINEFDHLTAYWLKGLAGENTSFVDATAFQGKICDFGLAPKDITQAEYQGHNSYAYHLDAAKFAKLLTKHACNNLGVKHILAQVDDVELHLNGDIKALHTDVAGIISADLFVDCSGFDSILLGKALNVKFIDKSDVLFADHAMAMQVPYEDPEQDIPSFTISTAKQAGWIWDIGLTKRRGTGYVYSSAHTTHDEAEQTIRDYIGPAADSLEARKIAMNIGYREKFWHKNCVAIGLSQGFVEPLEATGLLVFDVTAKMLAQQFPSNRGHMDILAKKFNERVSSSWEKVIDFIKLHYVLSKRDDSDFWLENRDITKCSQTLQERLQLWQHQVPSAYDFASGFEIFNLENYLYVLYGMDFNTNIESMDFRFQNTKQATEFFNKIKQHADMLTTKLPKHRELINKIHRFGLQKR

SEQ ID NO: 83289 - protein, 516 aa, Duganella sp.
  REGION 1..516: note = tr|A0A3E1SDC8|A0A3E1SDC8_9BURK Tryptophan 7-halogenase OS=Duganella sp. BJB480 OX=1871181; GN = D0T24_09935 PE=4 SV=1
MQHNQADRRIKQILIVGGGTAGWMTAAAMSKLLGGHYQVRLVESDEISTVGVGEATIPQIKLFNQALGIDEDDFLRETQGTFKLGIQFVNWGRLGENYIHTFGSIGQDMGLVEFHHYWLKLHQAGLAPDFGAYSLAAVAAPQNKFMRAVDAGNSPVSHIAHAFQFDAGLYARYLRKFAEARGVVRTEGKIADVIVREGDGHVAAVMMESGERIEADLFIDCSGFRGLLIEGALKTGYEDWTHWLPCDRALAVPCESHGPITPYTRATARTAGWQWRIPLQHRIGNGHVYSSKYISDDEATAQLLANLDGAPLAEPKPLRFTTGKRKKFWNKNVVAIGLSSGFMEPLESTSIHLIQSSIARLMSLFPDRDFEQHNIDEFNRQAHFEVDKIRDFLVLHYHATERDDTPFWNYCRTMEVPESLKQKMDLFKQHGRFYREKDEMFASVSWLQVMLGQGMRPQSYHPLVDLYPQEQIEAHLSTIKTVVENCAAKMPGHEDFINAHCASAAMRMKRPNYGMR

SEQ ID NO: 83290 - protein, 501 aa, Pseudoxanthomonas sp.
  REGION 1..501: note = tr|A0A543E6N5|A0A543E6N5_9GAMM Tryptophan halogenase; OS = Pseudoxanthomonas sp. 3HH-4 OX=1690214 GN=FB548_0549; PE = 4 SV=1
MQTSQPMAHPRTVKRVVIAGGGTAGWMAAAALSKTLGKTLDITLVESEEIGTVGVGEATIPTLVVFHRLLDIKEQDFMAAVQGTVKLGISFENWKDVGHRYIHSFGTSGKDHWSAGFQHFWLRGRAEGLASEYSDYCIELQAALQDRFSHLPRYHVNYAYHMDAALYARFLRGFSERHGCKRVEGKIVDVATDADGGISSIKLERGEVIEGDLFIDCTGFRALLIGKTLGVGYTDWSRWLFNDSALATQTTAVRDAVPYTRAIAGTAGWQWRIPLQHRVGNGIVYSSRHISDDEAREHFLSSVEGEVIKQPWPIRFKPGQRQQCWAKNCVALGLAGSFIEPLESTTIHLIQRGIVRLLQTFPHTITQPAIDEYNARLDEELQHVRDFVVMHYAISDRRDTPYWRDIAEMEIPATLRHRIELFRETGTVFHVPGELFGENSWIQVMLGQGVVPKGYHPTADVMSKEDLQRFLDDIRSNVLGTARQMPAHMDYLRSYCPAPKP

SEQ ID NO: 83291 - protein, 518 aa, unidentified
  source 1..518: note = Unknown
  REGION 1..518: note = tr|A0A0N1B1R9|A0A0N1B1R9_9PROT Tryptophan halogenase; OS = beta proteobacterium AAP99 OX=1523428 GN=IP84_15910; PE = 4 SV=1
MNSETSQHIKNIVIVGGGTAGWMAAAAFAKLLRGGFNITLVESDEISTVGVGEATIPPIQNYNKVLEIDEDEFVRETQGSFKLGIEFVNWGRIGERYTHGFGRFGQDLYTVPFEQYWHKLFAAGKAADIAEYSITRMAAAAGKFSRPQLELRNSPLSEIAYAFHFDAGLYARFLRRYAEARGVRRIEGKILEVQRSAATGHVSGVRLESGSVVAGEFFIDCSGFRGLLIEQTLQSGYEDWTHYLPCDRAIAVPTASVEPPIPYTRATAHAAGWQWRIPLQHRVGNGHVFCSQHMSEDEATAVLLANVQGEVLASPRTLKFVTGMRKTPWKHNVVAVGLSSGFMEPLESTSIHLIQTAIARIINFFPDREFSAADIDEYNRITRLEFESIRDFLILHYHANQRDDSAFWRACRAMDVPASLKMRMALYESRGRIFREGAELFSEVAWLQVMHGQGLRPASHHPLADLVPTEDAERYLASVRQVIANCVAGMPTHAQYIAAHCAARRAADPLHGMAQSAA

SEQ ID NO: 83292 - protein, 519 aa, unidentified
  source 1..519: note = Unknown
  REGION 1..519: note = tr|A0A0N0JVW2|A0A0N0JVW2_9PROT Tryptophan halogenase; OS = beta proteobacterium AAP99 OX=1523428 GN=IP84_02970; PE = 4 SV=1
MQHTQNHAGAQVAVKKVVIVGGGTAGWMCAAALARLAPPGTQVQLVESDEIGTVGVGEATIPMIRLFNETLGIDENEFVRATQGSFKLGIEFVNWRRLNHRYIHAFGVMGRGLGLIGFHQYWLKHALKHGFSDTAAFFPSGAAAYANKFVRGGPAESPLSGLNYAFHFDAGLYARFLRGFAEPRGVKRHEGKIARVEQSASGDIAAVHLENGTRIEGELFIDCSGFRGLLIEQTLKTGYEDWTHWLPCDRAVAVPCASADPLTPYTRSSAHTAGWQWRIPLQHRTGNGHVYCSQFMSEDEATAILLKNLDGEQLAEPRPLKFVTGRRNKFWNRNVVALGLASGFMEPLESTSIHLIQSGISRLLAFWPAAGLNEHEVDEFNRQSAWEFERIRDFLILHYHAVERTDSPFWQRCRSMEIPPGLRSRMALFRQHGRFFREGDELFTEAGWVQVMLGQGIEPAGYHPLADQLTDAQLEEFISSTRNDIARAVAPLPRHEDFLARFCPAPKVELKAMMPSVAA

SEQ ID NO: 83293 - protein, 491 aa, Altererythrobacter namhicola
  REGION 1..491: note = tr|A0A1C7D754|A0A1C7D754_9SPHN Flavin-dependent tryptophan halogenase RebH OS=Altererythrobacter namhicola; OX = 645517 GN=rebH_1 PE=4 SV=1
MVVLGGGSAGWITAALLHKEWGPLGASVTVVESPEIGIIGVGEGSTPQLKALFDHLGIAEADWMAACDATYKLGIRFSGWSERDGHESYFHPFSGPVDLHTQPGFFHNCALARRGTDVPAHPDDWYLARLLADEGRGPQAADSFPFPPSYGYHFDAYKLGAFLRDWSVERGLVHREAKVASVERAEHGDIAALLTEDGDRIAGDIFVDCSGFRALLCQQELGVAFRDFGENLFNDRAVVMPTQHGGVFKPQTEAVAMRAGWRWSIPLTSRTGNGYVYSSRYLSDEEAEAELREAIGMTGDPQEARFLKMKVGRVEQTWHRNCLAAGLAQGFIEPLEATALHIVISTAMEFAQAYRQGGFTAQHRDIFNTRTAERYEGIRDYIVAHYRLNRRTDTQYWRENAGHDRLSDSLKAMMTAWFTHKDMSEALAGAYRDAPYPVMSWHALLAGYGTFPPADRMKAPEQGLPVADVKETRAMLQACAANFSPYPAISP

SEQ ID NO: 83294 - protein, 499 aa, unidentified
  source 1..499: note = Paraglaciecola agarilytica
  REGION 1..499: note = tr|K6X3Y3|K6X3Y3_9ALTE Tryptophan halogenase; OS = Paraglaciecola agarilytica NO2 OX=1125747 GN=GAGA_3588; PE = 4 SV=1
MKKTAITILGGGTAGWMTAAILAKGLPKDKFHICLVESPDISSVGVGEATIPPMTSLLAYLELDESSFLKRLNGTFKYGIQFENWSELGNQYMHAFGDIGTPLGTLSFTQAWLKCAAALNFTELGSYIPSAVAAKTGKFHPPVDIPQGANPTHFYPLSLLFYAYQFDATELASLLKEYAIDHSVEHIEGMVNRVNNKRNGDISSLSLRDGRNIAGDYFVDCSGMRGRLNKSHFGCEFDDWSNELPCNSAIAVQTKRDTPAAPHTKSIAMSAGWRWEIPLRDRTGNGYVFSSRFLTDEQALQELNEALAGEQFITEPKIIHFKTGCLTTPWHRNSIAIGLASGFTEPLESTSIHLIHKYALELKDALLCGQDLAHEAKRFNHMFYQEALSIKDFLLAHYHVSKRTDSPFWQHCKNMPITQTLQNYLAEFARNGYINLPESSLFPFQSWFQVLVGQGYLADYCAFSDKQFDAQQAKPFFNNVKLAIQSEVARLAPHQSYLQ

SEQ ID NO: 83295 - protein, 505 aa, Xanthomonas translucens
  REGION 1..505: note = tr|A0A0K3A240|A0A0K3A240_XANCT Tryptophan halogenase; OS = Xanthomonas translucens pv. arrhenatheri LMG 727; OX = 1195923 GN=XTALMG727_2771 PE=4 SV=1
MAQIRKVVIAGGGTAGWIAACALAHQFRDLLDITLIESEQIGTVGVGESTVPPIRSFHRFLQIDEQEFLRAVAGTFKLSISFENWRRPGERYLHPFGLTGQSTLACAFHHFWLEAQRRGMLSELGDYCLETVASRMDRFALQQSPPVNYAYHLDAGLYARLLRRHAERYGLKRVEGRIQQVRQHAESGGVEALLLEDGTLIEGDLFIDCTGFRGLLIEQTLHTGYEDWQQWLPCDRAVAVQTEAVAAPVPYTRAIAHASGWRWHIPLQHRVGCGLVFSSAHLSDDEARAKLLHDAAAPPIKEPWLVPFCTGRRRKAWNKNVVALGLASGFIEPLESTSIHLTIAAVMRLITLFPSEGIAPSMVDLYNAVSRAEMEHVRDFIILHYHANQRDEPMWQACREMALPDSLQQRLRAWRERAHAWQGADELFRVDSWIHVLLGQGIVPAQHHPLARALPDQPLQQFLDAIRQPIDRAVAQMPSQQDFIARYCKAGPEVWAGRAPVAAPA

SEQ ID NO: 83296 - protein, 501 aa, unidentified
  source 1..501: note = Sphingorhabdus sp.
  REGION 1..501: note = tr|A0A371B1R9|A0A371B1R9_9SPHN Tryptophan 7-halogenase OS=Sphingorhabdus sp. GY_G OX=2292257; GN = DXH95_14250 PE=4 SV=1
MAIDKIVIVGGGTAGWMAAAALSRLRAGRDVAITLVESEMIGTVGVGEATIPPFLDFNKLLEVDEREMLSAVQGSFKLGIQFVNWGKIGDSYIHPFGNYGYQMGGMSFHHTWHKFKATGDKRPIQVFNLETMAAYFGRFARTEDYAREDLPPVNYAYHLDAGRYARFLRGYAEKRGVVRLEGKVNDVAIDGESGFVTSITLEDGTQIAGDLFIDCSGFRGLLIEQALKTGYEDWTNYLPCDRAVALPCEREDGSGPLPYTRATAHKAGWQWQVPLQHRNGNGHVYCSQFMSDDEALDILVNNIAGKPGADPNFLRFTTGRRKKFWNKNVVALGLSAGFMEPLESTSIHLINTGINKLIALLSLDGITQTQEDAFNRLTGKEYARIRDFLILHYNTTARNDSAFWNYCRTMAVPESLTEKTDLFRLNGQIFREDDELFTETSWAAVMMGQGIMMNGHNPMADCLNQPSTRQELDAIEQSIRYVVQHMPSHGDYLKKYCPAPA

SEQ ID NO: 83297 - protein, 501 aa, Alteromonas sp.
  REGION 1..501: note = tr|A0A2S9VGD0|A0A2S9VGD0_9ALTE Tryptophan halogenase; OS = Alteromonas sp. 190 OX=2079529 GN=C6Y40_00825 PE=4 SV=1
MQTQLKKIIILGGGSAGWMTAAALGKILSKHPCDIQVIESEEIGTVGVGEATIPQIQLFNDLIGLDEDTFLKRTQGTFKLGIQFQNWRKPGHSYYHAFGEVGKNMEGVHFYQYWLKMRQQGKAAPLDEYTLSSLACNEKRYMRPFEAGNSPLSNIAYAFHFDAGLYAKFLREVAESHGVQRTEGKVTEVRQHPDGSIQSLILENGNEHDADFFIDCSGFRALLIEQTLKTGYEDWRHWLPCDRAVTAPSSLTETPWPFTRAAAQQAGWQWRIPLQHRVGNGHVYCSEFMTDEEAENTLRLNIEGDLLADPRQIRFVTGKRNKFWHKNCLAVGLSGGFMEPLESTSLHLVQVAISKFFSYFPFQQPCQSDIDQYNAEMDFEFTRIRDFLILHYHVTEREDTEFWRYCKHMPIPDTLQEKIDHFKANGRISRFNNELFNDLSWFEVMYGQGLRPEGYHALADIFPEEELARRLEGIQRVVRKSVDYMPGHAEFIAKTCAANRD

SEQ ID NO: 83298 - protein, 499 aa, unidentified
  source 1..499: note = Sphingorhabdus contaminans
  REGION 1..499: note = tr|A0A553WK55|A0A553WK55_9SPHN Tryptophan 7-halogenase OS=Sphingorhabdus contaminans OX=1343899; GN = FOM92_06515 PE=4 SV=1
MSDHDIQKIVIVGGGTAGWMAAAALASLLKAGINICLIESDDIGTVGVGEATIPPLIAFNTMLGINEDMFLKATMGTFKLGIEFVNWGACGERYFHPFGPHGQDFQGINFHQLYLREAQSRNMPPIQNWSMSASAAALGKFARPGPDARLPLSQLAYAFHFDAGLYAAFLRQLAEGRGVSRIEGKIVDAGLADNGDIANVRLDDGRIVEGELFIDCSGFRGLLIEDKLGTGYDDWSQWLPCDRAVAVPSKLLGPADPFTRSTAHHAGWQWRIPLQHRMGNGLVYSSSFLDSKDAISLLLSAIEGDALATPRQLSFTAGRRRRAWNRNVVSLGLSSGFVEPLESTSIHLIQSGIAKLLALFPDRRFDPLERDEYNRQMQAVFEDVRDFVILHYKATRRDDSEFWNYCRTMDVPDSLSTKLDLWKSKGRLFREGFELFGTASWVAVLLGQGIVPAETEPAAFAIDPAMTSDALEKMRTSYTRMAEHLPRHEDFIAQVCAAG

SEQ ID NO: 83299 - protein, 496 aa, unidentified
  source 1..496: note = Sphingomonas gei
  REGION 1..496: note = tr|A0A4S1XGE9|A0A4S1XGE9_9SPHN Tryptophan 7-halogenase OS=Sphingomonas gei OX=1395960 GN=E5A73_00610; PE = 4 SV=1
MSEQIVKRVVIAGGGTAGWVAAAALVKQLGPMLDITLVESDEIGTVGVGESTIPTSRRFHQLLTIDEAIFMRETQASFKLGISFENWSGEGSHYFHSFGQIGRPSTWMADFHHFWLEARDKGFGGELGDYCLELKAAAAGRFATGPDATVQHAYHLDATLYARFLRRLSEAAGVRRVEGKIAQVEQDPESGFLTALVLESGTRIEGDLFLDCTGFRALLIEQALGAGFDDWTHWISTDSAFAVQTRATEPAVPYTRAIAHQAGWRWKIPLQHRVGNGIVFCSDFLSPDEARQQLLDAVEGEVLTEPRLIRYKTGQRRKVWDKNCIALGLSSGFIEPLESTSIHLIQVAVAKLIQSFPFSGVGAAQAERFNAQARHEMERIRDFIILHYHLNSRDEPFWQRCRDMTIPDTLAERLALFGEAAHAYQAADDLFRVDSWVQVLLGQGLTPRGYHQLARMMPQDELRQALAGVRDNVAAAVQTMPRHADFLQSYCPAGEA

SEQ ID NO: 83300 - protein, 502 aa, unidentified
  source 1..502: note = Sphingorhabdus contaminans
  REGION 1..502: note = tr|A0A553WHT5|A0A553WHT5_9SPHN Tryptophan 7-halogenase OS=Sphingorhabdus contaminans OX=1343899; GN = FOM92_02195 PE=4 SV=1
MTSDRKHFVVLGGGTAGWMAACLLAHHWPHHRISVVESPDIGIIGVGEGSTPQLKAFFDTLGIAEAEWMPKCNATYKAGIRFFGWSERPGFESYFHPFHTQIDLFTEPQFAFHTRARRTGRNVWAHPDRFFLPASIAANGRAPLAPPNFPFAIGYGYHFDAVLVGKMLREHATSRLNVQHLEYTVTHVQLDNAGNVESLQTKDGAVISGDFFVDCSGFRGTIIQETFGEPFLPFAENLFNNAAVAMPSPNEEGDILSETRATALSTGWAWRIPLTNRVGNGYVYSSRYIDKDDAETELRAHLGMLDSEVEARHLKMNVGRVQRSWVRNCLAVGLSQGFIEPLEATALHIVQATVEGFIRAYENGGETESGATQFNRSLNERYDGIRDYIVAHYRMNQRSDTEYWRDNALNGNLSDNLKTIMTAWYSGGDLNEVIQNLNIAQFYTSLSWHCLLAGYGTFPLDEKLVASTDGLPLADMDDIDRYISGCLQNFPSHRAALKNLSS

SEQ ID NO: 83301 - protein, 515 aa, unidentified
  source 1..515: note = Sphingomonadaceae bacterium
  REGION 1..515: note = tr|A0A520X2D4|A0A520X2D4_9SPHN Tryptophan 7-halogenase OS=Sphingomonadaceae bacterium OX=1930536; GN = EX262_02470 PE=4 SV=1
MTRTEISPIIIAGGGTAGWMAAAALGRFAGRKVVLVESEAIGTVGVGEATIPQIRLFNAALGIDEAEFLRETRATFKLAIEFGGWSGDGTSYLHAFGHVGQGAGLLAFQHYWLRARAAGKAGPLADYCLNDRAAQAGKMQMWRPQSGQAAPDMPWAYHFDASLYAAYLRRYAEAHGVERIEGTIAAVEHDGESGDIGALLLDGDRRVEGEVFIDCTGFRSLLLGDALGVEFDDWSRWLPCDRAVAVPCEARGEFTPYTRATAHAAGWQWRIPLQHRIGNGHVFSSEFMDEDEASKILLDNLDGKPTSDPRVLRFTTGMRREPWHRNCLALGLSAGFMEPLESTSIHLIQASIARFLQMLPGAEVAPAMRDEFNRQATFEWSRIRDFLILHYWANGRHGEPFWDRCREMDVPDTLRSKVEAFRAEAYLHREHEELFTEPGWLQVLVGQGIIPESYNSIADAMSEAELESLLAGLVEGQRKIVDSMPDHAPFLRAYIDPRAANAQGGGGSTSQRMPA

SEQ ID NO: 83302 - protein, 232 aa, Asticcacaulis sp.
  REGION 1..232: note = tr|A0A258BHR7|A0A258BHR7_9CAUL Tryptophan halogenase (Fragment) OS=Asticcacaulis sp. 32-58-5 OX=1970317; GN = B7Z26_02230 PE=4 SV=1
MPRPPVKKVVIAGGGTAGWCAAAALSKMIGPLIEVTLIESDEIGIIGVGEATVPTIRTFHHLLGIDERQFMRETNATIKLGISFDNWARKGDHYFHSFGVLGKSSWMAPFHHIWLEARANGVAGPLSDYCFELQAAENGKFETSPTSRINYAYHFDTGLYGPFLRRLSEAAGVTRIEGKIARIDQNPDTGDITALKLESGQTIAGDLFIDCTGLRGLLIEGALKSGYEDWNH

SEQ ID NO: 83303 - protein, 508 aa, Pseudoalteromonas sp.
  REGION 1..508: note = tr|G7EYT2|G7EYT2_9GAMM Uncharacterized protein; OS = Pseudoalteromonas sp. BSi20429 OX=1097676; GN = P20429_0152 PE=4 SV=1
MNKAIKTVAVVGGGTAGWLSAAIIASYHQGQNGDGLKVMLVESSDIPTIGVGEGTWPTMKNTLQQIGLREVDVFKACNATFKQGGKFVNWTHGNNDFYYHPFTVPLGYGRIDLAPYLDNVEDFAQQTNFQHDICEASLAPRGIAQGEYQGNCNYAYHLDAGAFAEMLKQHCKSKLGVEHIIGTVDQVKLDDGGAINELTLKDQTRTINADLFIDCTGFSSLLLGQALNVPFKKMDHVLFNDSALAMQVPYDENDNSLASHTIATAHNAGWIWDIGLTHRRGVGHVYSSKFLSDDEAEQNLRDYLGDAANGLTARKISFESGYREKFWHKNCVAIGMSAGFVEPLEATAIMLVEISARFVAEHMPADTRVMPIVAKRFNEQMDYRWQRIIDFLKLHYMLTKRSEPYWQAHVQPNTIPQTLQEDLLLWGSRGPLIQDFHGALELFPAASYQYVLYGMGFKPDFTKQAYLYSQHVQAKQIIERNSQLTQQMLQTLPPHRAFIEQWLAANPV

SEQ ID NO: 83304 - protein, 515 aa, unidentified
  source 1..515: note = Sphingomonadaceae bacterium
  REGION 1..515: note = tr|A0A431JUB9|A0A431JUB9_9SPHN Tryptophan 7-halogenase OS=Sphingomonadaceae bacterium OX=1930536; GN = EKK50_00885 PE=4 SV=1
MTLPVPDHAIRNIVIVGGGTAGWMAAAAFSRLLNTGYTRVTLIESEEIGTVGVGEATIPPLLNFNRMLGIDENEFLAATAGTFKLGIEFRDWGAIGDRYIHPFGTFGQDLQGISFHQLWLRERSRRAIPDITAWSMSAQAAARGRFGRAREDARSPVRELFYAYHFDASLYARYLRGYAERGGVTRIEGRIADVRLRGEDGYVEALTLADGRQVAGDLFIDCSGYRGLLIEEALHTGYESYAQWLPCDRAVAVPCALPNAREPDPYTRATARAAGWQWRIPLQHRMGNGYVYCSDDLSDEAAEFDLLASLEGEPLGDPRRLRFTAGRRRQSWNRNVIALGLSSGFIEPLESTSIHLVQAGIQRIVAMFPDTRFDPAERDEFNRQLHGLYEDIRDFIILHYAQTRRTDTPFWDRVRTMPLPDSLTRKLDLWRGKGRLFREGYDLFSVPSWVAVCLGQGLVPSTWEPAADALDETLVAEAMETMRRGYADTAERLPSHGDFLRMVAPSPLANWGQAR

SEQ ID NO: 83305 - protein, 494 aa, unidentified
  source 1..494: note = Sphingomonadaceae bacterium
  REGION 1..494: note = tr|A0A431JUP6|A0A431JUP6_9SPHN Tryptophan 7-halogenase OS=Sphingomonadaceae bacterium OX=1930536; GN = EKK50_00890 PE=4 SV=1
MPDGGGGVTQDRAIRSILVAGGGIVGWLAAAALKRRAPFLTVTLLDGARSPNALADRIACTLPSLAGFHADLGIGDEDAVVRTGAGYRLGTRFVRWGRDDADYVHAYDHYGQAFGATAFHLHWLRAAQEGAVPRFDAFAPAAALGRSGRYAPPTPGTIFARHQPALTLDLPRYMRMIRAFAAHVGIDVVAGEIADIERDERGGIAAVALAGGGRLAADLYVDATGPEARLRDTIDSARDDWSAWLPCDRVMLADGTTAEPPLLTPVTAHAAGWSWDGGTQRGVVYAADRLADDDAAALLGTANATPITIQPGTRREPWRANCVAIGDAATAIDPLEWCNLHLALSAIDRLIAMLPDRDMAPVEAADFNRQTLAEAERVRDMMALHYRATARPEPMWRAVAAVPPPDSLAHTMRQFEERGRLPFYEEETFTRDGWAAVLIGQGIRPRRIDPLADAIPLSDAHAAMHGVTDAIAAALPHAPTHAAWLAAQARRLAR

SEQ ID NO: 83306 - protein, 509 aa, unidentified
  source 1..509: note = Sphingomonadaceae bacterium
  REGION 1..509: note = tr|A0A431JCH4|A0A431JCH4_9SPHN Tryptophan 7-halogenase OS=Sphingomonadaceae bacterium OX=1930536; GN = EKK50_09685 PE=4 SV=1
MTDAHPNPPLKTITIVGGGTAGWMTAALLSRLLLGAYTIRLIESEEIGTIGVGEATIPAIRTFNGLAGIDEFEMVRATQATFKLGIEFRNWGAPGDSYIHGFGKIGQDLYWLHCHQFWLKERAGGRAKHLDHYALNTLAARMNRFAMPDPSNPQSPIADIDYAYHFDASLFARFLRTRAEGAGVERIEGRIVAANRRGSDGFLDHVVLADGRTVDGDLFIDCSGMRGLLIGDAMGVGYEDWSEWLLCDRALAVPSARGAGPLTPYTRATAHGAGWQWRIPLQHRTGNGHVYASRFVSDEAAAATLLEHLDTPALGDPRPVRFRPGKRHRAWEKNVVALGLAGGFLEPLESTSIHLIQTGILRLIALFPGRGFNAADTEEYNRQTDFEYRDVRDFIIAHYKVTAREDTEFWRYLKHMAVPDSLTERLELFRSSGRFFMHAKAELFREESWVQVLLGQGLQAHHDPMVDMIPAEQTTAFLKDVEEVVADVAAGLPTHEAFITRHCQAPKLS

SEQ ID NO: 83307 - protein, 507 aa, unidentified
  source 1..507: note = Arsukibacterium ikkense
  REGION 1..507: note = tr|A0A0M2V8M0|A0A0M2V8M0_9GAMM Tryptophan halogenase; OS = Arsukibacterium ikkense OX=336831 GN=WG68_07815 PE=4; SV = 1
MVVVGGGSAGWLTAALLAADHQANPLVKITLIESASVPTIGVGEGTWPSMRATLARIGISETEFLLSCDASFKQGSVFRQWRSAAPQDCYYHPFTAPVAADELDIADYWFSYQQQVEFAAAVSSQPAVIAAGLAPKRISTPEYAFLQNYGYHLDAGKFVALLSQHAKRLGVTHIMDDVVAVHSKVDGCIAALQTAQHGALTGDLFVDCSGLQSLLLGQHYQTPLVSVQHCLLNDSALAVQVAYDDERSPIASATLATAQTQGWVWDIGLPTRRGVGFVHHSGHTNEEQARATLAQYLQLSEQQFTERYQSRLIRFTPGYREQFWRHNCVAVGMAAGFVEPLEASALVMVELSAKFISEQLPRSMAQLVIVAERFNQTFSYRWQQIVEFLKLHYVLSTRDDSDYWLAQRADSSMPAALQQKLMMWQHFVPSRYDLPMAEELFPAASYQYILYGMQHLPGSARPLKASSEVRANHAFAEVQQKTQQLRAGLSSNRELLNQIRVHGLQKI

SEQ ID NO: 83308 - protein, 503 aa, Dyella thiooxydans
  REGION 1..503: note = tr|A0A160MX38|A0A160MX38_9GAMM Uncharacterized protein OS=Dyella thiooxydans OX=445710 GN=ATSB10_00600; PE = 4 SV=1
MQANPIQRVVIVGGGTAGWMTAALLSRAIGPRLAITLVESDEIGTVGVGEATIPQIRHVNAFLGIDEDELMRAVKGTFKLAIQFNDWRRIGDSYLHAFGDIGLPLGLVPFQHYWLRDRQERGEAAPDLWSYSINAQACAQHRFGRLDRIGSSPMTGTRYAYHLDAGLYGQYLRQRCDPRQVRRVEGKVVDVKLREDNGFIESLQLQGGERVEGDLFIDCSGFRGLLIEGALKAGYDDWTHWLPCDRAVAVPSERVAPMRPYTQASARAAGWQWRIPLQHRNGNGHVFCSRFISDDEATATLLAHLDGEALAEPRVLRFTTGARRRFWIRNCVALGLASGFMEPLESTSIHMIQSGISRLISLFPDRHCDPALSDEYNRQTRFEYERIRDFLVLHYRATERDDTAFWRHCRSIALPEGLAERIELFRRSGQVFRHGEELFTEVGWLQVMLGQGIVPQAWHPAADGLPAAELEGFLGNMRTLIQRAVATFPEHGQFVATHCRAMG

SEQ ID NO: 83309 - protein, 516 aa, Pseudoalteromonas sp.
  REGION 1..516: note = tr|G7F3X6|G7F3X6_9GAMM Tryptophan halogenase; OS = Pseudoalteromonas sp. BSi20429 OX=1097676; GN = P20429_1968 PE=4 SV=1
MTKPITKIVVLGGGTAGWLSAGLLAAEHPHLNVTLVESANVPILGVGEGTWPSMRNTLQRIGIKESDFITQCDASFKQGSKFINWRNLSEGENYYHPFMNPQGYEHTNLHASWQRIAPNQKFADVVNMQSFVCQAALAPKQLQTPEYAAVTNYGYHLDAGKFAEFLKNHCVKNLNVTHITDDVTEVINDEHGYIASLKTNNNGDITGDFFIDCSGSRARLIGEHFNSEFIAQDHILFNNSAVAAQIPNAHTDQPIASATLSTAQSNGWIWDIALPTRRGTGYVFSSKYQSDESATNTLKSYIAKSTSEQQAEQLNYRVLKFSPGYRQKFWIKNCVAVGMSAGFLEPLEASALAMVELSISMISEQLPQNRTHMSQLETRFNERFSTRWQRVIEFLKLHYVLSERDDTPYWQDISNLNTAPERLQNLLKLWQFQPPSRFDFIENEEVFSSSSYQYVLYGMGFNTQTVSAQNTFNDPRAGDYYYQQNREKIAQCLNGLPSNRALLNHLLSNNGQPHND

SEQ ID NO: 83310 - protein, 518 aa, Pseudoalteromonas sp.
  REGION 1..518: note = tr|A0A2N1BBG2|A0A2N1BBG2_9GAMM Tryptophan 7-halogenase OS=Pseudoalteromonas sp. GutCa3 OX=888433; GN = CXF64_12825 PE=4 SV=1
MNQKNKKIKTVVVIGGGIAGWLTAGRLAAHHKSNTPDGLNVVLVESPNIPIIGVGEGTWPTMRSTLIALGISETDFIRECEASFKQGAKFAKWVDGSDDDFYYHPLVLPQGFSKTDMAGHWLNNTAESTSFSNAVCYQEAICEQGLAPKTICTPEYAAIANYAYHLDSVKFAVFLQKHCTQQLGVKHILADVTQVNSAKNGDIASVTTKQQGEISGDLFVDCTGFSSLLLGEHYKVPFKPCDDVLFIDTALAVQVPYEDEDESIASHTISTAQEAGWIWDIGLQHRRGVGYVYSSKYSTEAQAREKLKEYVGDKIDSLTIRKIPIKSGHRSHFWQNNCVAVGLSAGFLEPLEASALVLVEMSAQMISEQLPHTRDIMDITAKRFNETFSYRWEKIIDFLKLHYILSTRDDNAFWSDNRDPKTIPQSLQDLMKLWQYRAPADHDFTSNNEVFPAASYQYVLYGMGFKSDYSTTAYMLKDTVFAKSQFDKNKSMINQAVTNLPSNRELLNKIKNHGFSTI

SEQ ID NO: 83311 - protein, 491 aa, unidentified
  source 1..491: note = Sphingomonadaceae bacterium
  REGION 1..491: note = tr|A0A431JQY2|A0A431JQY2_9SPHN Tryptophan 7-halogenase OS=Sphingomonadaceae bacterium OX=1930536; GN = EKK50_02435 PE=4 SV=1
MTPPPPSIAILGGGTAGWMAACLMAKAWPQAPITVIESPDIGIVGVGEGSTPQLKSLFDTLGIAESDWMPAADATYKAGIAFHGWADDTPAYFHPFAGQIDLHTQGAFFASTRARRHGADVPAHPDHFFLNARLAAAGRAPIAPANFPFRIGYGYHFDAHKVGHVLRAAALARGVVHLPRRVRDVVVDATGRVATLTLDEGDAIHADLFVDASGFASVIAQQALGVPFRSFADTLFADRAVVMPTPRKDALPVQTKATALSAGWAWDIPLTSRTGNGYVYASRYLSPDAAETELRRHLGLLDTDVAARHLSMKVGRVETSWTANCLAIGLAQGFIEPLEATALHIVQATIEGFIGAYQAGSRDAFNASIARRYDGIRDYIVAHYRLNRRSGPFWRDVATNDALSDDLKAIMTAWFTGGDVAAVVEGRGLTGYYAPMSWEVLLAGYGTFPDATRLRTAAPVADLAAIDSLLSGCLLNFPDHQAALDGHRRMP

SEQ ID NO: 83312 - protein, 508 aa, Pseudoalteromonas sp.
  REGION 1..508: note = tr|A0A2N1BDM4|A0A2N1BDM4_9GAMM Tryptophan halogenase; OS = Pseudoalteromonas sp. GutCa3 OX=888433 GN=CXF64_08870; PE = 4 SV=1
MNKAIKTVAVVGGGTAGWLSAAIIASYHQGQNGDGLKVMLVESSDIPTIGVGEGTWPTMKNTLQQIGLREVDVFKACNATFKQGGKFVNWTHGNNDFYYHPFTVPLGYGRIDLAPYLDNVEDFAQQTNFQHDICEASLAPRGIAQGEYQGNCNYAYHLDAGAFAEMLKQHCKSKLGVEHIIGTVDQVKLDGGGAINTLTLKDQTRTINADLYIDCTGFSSLLLGQALNVPFKKMDHVLFNDSALAMQVPYDENEQLLASHTIATAQNAGWIWDIGLTHRRGVGHVYSSKFLSDDEAEQNLRDYLGDAANGLTARKISFESGYREKFWHKNCVAIGMSAGFVEPLEATAIMLVEISARFVAEHMPADTQVMSIVAKRFNEQMDYRWQRIIDFLKLHYMLTKRSEPYWQAHVQPNTIPQTLQEDLLLWGSRGPLIQDFHGALELFPAASYQYVLYGMGFKPDFTKQAYLYSQHVQAKQIIERNSQLTQQMLQTLPPHRAFIEQWLAANPV

SEQ ID NO: 83313 - protein, 521 aa, unidentified
  source 1..521: note = Sphingomonadaceae bacterium
  REGION 1..521: note = tr|A0A2D6KNL0|A0A2D6KNL0_9SPHN Tryptophan halogenase; OS = Sphingomonadaceae bacterium OX=1930536 GN=CMN66_03915; PE = 4 SV=1
  VARIANT 74: note = Xaa can be any naturally occurring amino acid
  VARIANT 174: note = Xaa can be any naturally occurring amino acid
  VARIANT 312: note = Xaa can be any naturally occurring amino acid
  VARIANT 343: note = Xaa can be any naturally occurring amino acid
  VARIANT 351: note = Xaa can be any naturally occurring amino acid
  VARIANT 362: note = Xaa can be any naturally occurring amino acid
  VARIANT 366: note = Xaa can be any naturally occurring amino acid
  VARIANT 370: note = Xaa can be any naturally occurring amino acid
  VARIANT 372: note = Xaa can be any naturally occurring amino acid
  VARIANT 376..377: note = Xaa can be any naturally occurring amino acid
  VARIANT 384: note = Xaa can be any naturally occurring amino acid
  VARIANT 387: note = Xaa can be any naturally occurring amino acid
  VARIANT 392: note = Xaa can be any naturally occurring amino acid
  VARIANT 397..399: note = Xaa can be any naturally occurring amino acid
  VARIANT 423: note = Xaa can be any naturally occurring amino acid
  VARIANT 437..438: note = Xaa can be any naturally occurring amino acid
  VARIANT 440: note = Xaa can be any naturally occurring amino acid
  VARIANT 442: note = Xaa can be any naturally occurring amino acid
MRPDDGQAQAIGSICIVGGGTAGWSAAALLSQVLRGSGCRITLVESSAIPTVGVGEATIPPIFDFLRNIGADEXEFIRRCQATFKLGIQFRDWLHHGHAYWHPFGNLGVTINQRPFHHYYCMNRAAGHGETLADLCPSVALAEDGKFAFPSPDGQWPGGAVAYALHFDAGLVAXFLRDHAVAAGVERLDRRIVGATRGEGERIAAVQFDDGESLEADFYIDCSGFRGLLIEETLGAGFEDWKHWLPCDSAVAAPTAAQEQRAPYTVATARSAGWQWRIPLQHRTGNGLVYASDFISDADAQAQLLAGLDGEXQADPRVLRFTAGLRKRAWVGNCLAIGLSAGXLEPLESTXIHLIHTGLNRXLDLXPDRXFXPALXXAYNRDVXREXAHIRXFLLLXXXPNRREGEPFWDHMRGLDLPDTLAXKIELFTRTGRIMSXXRXLXSDISWFYVMHGMGLTPAALDPLAEAAPFGEVRKVIDQLRGAMQAFRSAAPTHDAILDRLLDPAETRRPQFGTGGGWTTR

SEQ ID NO: 83314 - protein, 506 aa, unidentified
  source 1..506: note = Sphingomonadaceae bacterium
  REGION 1..506: note = tr|A0A2D6UKZ2|A0A2D6UKZ2_9SPHN Tryptophan halogenase; OS = Sphingomonadaceae bacterium OX=1930536 GN=CMN65_03790; PE = 4 SV=1
  VARIANT 274: note = Xaa can be any naturally occurring amino acid
  VARIANT 284: note = Xaa can be any naturally occurring amino acid
  VARIANT 312: note = Xaa can be any naturally occurring amino acid
  VARIANT 314: note = Xaa can be any naturally occurring amino acid
  VARIANT 325: note = Xaa can be any naturally occurring amino acid
  VARIANT 328: note = Xaa can be any naturally occurring amino acid
  VARIANT 368: note = Xaa can be any naturally occurring amino acid
  VARIANT 370: note = Xaa can be any naturally occurring amino acid
  VARIANT 382: note = Xaa can be any naturally occurring amino acid
  VARIANT 384: note = Xaa can be any naturally occurring amino acid
  VARIANT 393: note = Xaa can be any naturally occurring amino acid
  VARIANT 402: note = Xaa can be any naturally occurring amino acid
  VARIANT 405: note = Xaa can be any naturally occurring amino acid
  VARIANT 464: note = Xaa can be any naturally occurring amino acid
  VARIANT 469: note = Xaa can be any naturally occurring amino acid
  VARIANT 473: note = Xaa can be any naturally occurring amino acid
  VARIANT 475: note = Xaa can be any naturally occurring amino acid
  VARIANT 477..478: note = Xaa can be any naturally occurring amino acid
  VARIANT 482: note = Xaa can be any naturally occurring amino acid
  VARIANT 490: note = Xaa can be any naturally occurring amino acid
  VARIANT 500: note = Xaa can be any naturally occurring amino acid
  VARIANT 506: note = Xaa can be any naturally occurring amino acid
MTERAQAIRNVVIVGGGTAGWMTAAALARLLGGTGLAITLVESAAIGTVGVGEATLPQIRRFNSLLGIDEREMMARTAATIKLGIEFRDWGRVGDSYIHPFGRFGQEIGPASFVDYWARAHARGMVAPIGQYCLPIMAAMQGRFEPPHGNGTRQPYDYAFQFDAGLYAAWLSELAQSAGVVRREGRIVDVARNSESGAISAVRLEDGAAIRGDLFIDCSGFRALLIGETLETSFEDWSNWLPCNRAFAVPCANGGDYGPYTRATARAAGWQWRXPLQHRVGNGXVYCDAFWDDADAAEALMANLEGEPGAEXRXLRFTTGRRSAXWRXNCVAIGLAGGFLEPLESTSIDLIQSGILNLVELFPHTAIXEXDRREYNRLMDLXFXRIRDFLVLXYVANQREEXFWXAMRAMPMPDSLADRIEDFRERAILPDYADGLFQPVSWISVFLGQNVVPRRWDPRANAMXADELXKRLXAXHXXIADXAAAMPLHXDFLERSGARXIDEAGX

SEQ ID NO: 83315 - protein, 495 aa, Pseudoalteromonas sp.
  REGION 1..495: note = tr|G7F3X5|G7F3X5_9GAMM FADH2 O2-dependent halogenase I OS=Pseudoalteromonas sp. BSi20429 OX=1097676 GN=prnA; PE = 4 SV=1
MTKTNAVKNVVIAGGGTAGWMAAAALAKLVGNNINITLVESDDIGTVGVGEATIPPIRTFHKLLGINEQAFMKATQASFKLGISFENWGDENTHYIHSFGATGKECWAGEFHHFWLQGKTLGINNPFGDYCYELQAAKSGKFAFNQQNPINYAYHMDATRYAQFLREFSEPLGVKRIEGKIQKVVKNTKTGHIESLTLNNGEHINGDFFIDCTGFRGLLIEQALHTGYEDWSHLLPCNSAIAVQTKSTSDTVLPLTRSIAHKSGWQWRIPLQNRVGNGLVYCSQYMDDAQAKALLLNNIEGEALTEPRIIKFKTGRRLKGWNKNCLALGLASGFVEPLESTSIHLIMSGIIRFMRLFPFNGITNHAIDEYNKQLKSEIENIRDFIVLHYKVTNRDDSEFWQHCSAMEVPKTLQHKIDLFKQTGRVFLDDGDIFRVDSWVQVMLGQGIEPNQHHLIASMMSDEELTRFLHGIKQQIEQRVSQLPPHHEFLKQYCPA

SEQ ID NO: 83316 - protein, 505 aa, Dyella thiooxydans
  REGION 1..505: note = tr|A0A160N5N1|A0A160N5N1_9GAMM Uncharacterized protein OS=Dyella thiooxydans OX=445710 GN=ATSB10_36600; PE = 4 SV=1
MNDHRIRNIVVVGGGSAGWMAAATLATYVGEGARIRLVESEEIGIVGVGEASVPHMQTFNRSVLGIDEREFVVRTQATFKLGIQFNDWGRVGESYIHGFGKIGRGLGPLPFHQFWLKLFLGGRAEPIGAYSLQTVAAPMGRFMASAPDAPPGSPLGDIAYAYHFDAAAYAGYLRGLAEARGVQRVEGKIVSVSRRADDGFVDAVVMEGGERIEGELFIDCSGFRGLLIEQALQAGYEDWTHWLPCDRAMAVACEITGPPLPYTRATARPAGWQWRIPLQHRVGNGYVYASNRISDDEAAATLLANLDGPALGDPRPLRFTTGRRKRFWDRNVVALGLAAGFMEPLESTSIYLIQSGLQRLLGLFPDRDFDPVLVERYNRETIFEYEKTRDFLILHYKATERDDTPFWDTCRTMEVPASLQENIDLFRASGRFFRDAEEFFALPSWIQVMLGQGIVPRSYHPVVDRMPEAELVQFVERVRLSMAEAAAAMPMHQAFIDRYCKAPAP

SEQ ID NO: 83317 - protein, 517 aa, Pseudoalteromonas sp.
  REGION 1..517: note = tr|G7F815|G7F815_9GAMM Tryptophan halogenase; OS = Pseudoalteromonas sp. BSi20429 OX=1097676; GN = P20429_3421 PE=4 SV=1
MNDDIKSIVIVGGGTAGWLSAGIIAAYLQKHHSKKINITLLESSDIPTVGVGEGTWPTMRRTLKDMGIRETEFIKKCNVSFKQGAKFAKWVTGENDDYYYHPLELPTGMFENNLATSWLNINNAQPPFAQYVSAQQLICESGLAPKQITTPEFSAIANYAYHLDAGLFATFLKNHCIDNLNVKHIVGTVVGVNNCTNGDIKSVSLNNKIEIAGDLFIDCSGFKSLLLGENLGVGFKSCKDVLFADSALAIHMPYKDDEPICSHTLSTAQTSGWIWDIGLQTRRGIGHVYSSKHISDEDAKQQLFDYLNINKDQQSEYKVKKLSFEPGHREKFWHKNCVAVGLSAGFLEPLEASALLLVEISANFVAQQFPANRHVMNITAQRFNRIFSYRWERIIDFLKLHYMLSKRTDSPFWQAHCHQNTIPQSLKDNLSLWEYHTPSDNHFDHSQEVFPAASYQYVMYGMGFTGSSELYDNSESYFKKAIALVNNNQQYTQKLLNKLPTNKALLAQINQFGMQQI

SEQ ID NO: 83318 - protein, 533 aa, Streptomyces sp.
  REGION 1..533: note = tr|A0A0F4ICY4|A0A0F4ICY4_9ACTN Tryptophan halogenase; OS = Streptomyces sp. NRRL S-104 OX=1609135 GN=VR43_20970; PE = 4 SV=1
MTSTDTRLQKVVILGGGTAGWMTAAYLGKALQGTVDITVLEAPTIPRIGVGEATVPNLQRSFFDYLGIAEDEWMRECNASFKMAVRFVNWRTDGQGESTARELPGGGPDHFYHPFGLLPDYDQTPLSHYWFKRKYEGRTTEPFDYACFREPPVMDAMKAPRWLDGRPATRYAWHFDAQLVADFLRRFATEKQGVNHVQDEMVRVEQDSRGHVTTLHTKGGLALDADLFVDCSGFRGLLINQALQEPFIDMSDHLLCDSAVATAVPHDDEANGVEPYTSAIAMSSGWAWKIPMLGRFGTGYVYSSKFTDQDTATREFADMWGLDVEETKFNHIRFRVGRNRRAWVKNVVSIGLSSCFLEPLESTGIYFITAAIYQLAKHFPDKTFNEGLIDSFNHEIEVMFDDTRDFIQAHFFYAPRNDTPFWQANKKLVLPDNIKQKISAYKAGLPINSPITDESTYYGNFEAEFRNFWTNGSYYCIFAGLGLEPDAPLPTLAHRPESVAGAEPLFDTVKRQQQNLLETLPSAYDYLRQLHGA

SEQ ID NO: 83319 - protein, 520 aa, Duganella sp.
  REGION 1..520: note = tr|A0A0Q8RTD7|A0A0Q8RTD7_9BURK Tryptophan halogenase; OS = Duganella sp. Root198D2 OX=1736489 GN=ASE26_20360 PE=4; SV = 1
MVPIPTRRILIVGGGSAGWLCAAYLAKMFGDSKEITLVEAPEIGAIGVGEGSFPSLRATLAALGIPEAEFVRESSATFKQGITFQNWLYGADHYFHPFSMPSQRPGAPELLPYWLQGLAGDTPFAEAVTMQKRVVDAQRAPKRPGDSDYNGPLNYAYHFDAARFAALLSKHARKSGVRHIQDHVEGVQLDLEGAIASIQTREHGALTADLYIDCSGFRALLIGGALGSRFHSVSDVLFCDTALAVQVPHPAPDTPIASATISTAHEAGWTWDIGLQERRGIGYVYSSRHTSDQRAEQVLRAYAGPASNGLNVRKIPMQVGYREQHWIKNCVAIGLAGGFLEPLEASGIGLVETAVQMLGALFPHNGEMAPLARHFNQFMSERYARIVDFIKLHFCLSQRREQFWIDNCDPATWTDSLRDKLAMWRCRPPQRMDFLTDFEMYPPSSWQYILYGMDFPKAMPPIPGLELMADAARQEFANIAEVSARAVADLPDHRAFVSQLCRHENAFRNDFHAIRATVNR

SEQ ID NO: 83320 - protein, 482 aa, unidentified
  source 1..482: note = Sphingomonadaceae bacterium
  REGION 1..482: note = tr|A0A2D4XZP8|A0A2D4XZP8_9SPHN Tryptophan halogenase; OS = Sphingomonadaceae bacterium OX=1930536 GN=CMN67_00340; PE = 4 SV=1
MAAALLARFLPPDYRVELVESEAIGKVGVGEATIPQIRHFNQALGIDEAEFLRETKGSFKLGIAFDGWRGEGHSYMHAFGPVGQSSGLIAFRHYWLRAKALGHAKDLAHYSPNEMAARNLRMPGPGSADLPYAYHFDASLYAAFLRHYAETRGVVRAEGIIERVERDSETGDIAALVLDGDRRLEADFFIDCTGFRALLIEGAMEAGFDDWSNLLPCDHALAVPCASGGDFTPYTRAMARKAGWQWRIPLQHRIGNGYVFSSQFCSEDEAADTLLANLDGSPDGTPRLLSFTTGKRRRQWIGNCLALGLAAGFMEPLESTSIHLVQSALARFLQLLPAGRSTPSTIDHFNTQADFEWSRVRDFLVLHYWANGREGEPFWEAMRALDLPATLQARIDQWRDTGHIHREHEELFTEVAWFQVFAGQGVSANHYNPLADAMAEQDLRDFLASQERALEQAAAAMPHHADTLGRLMARPAKRNTAA

SEQ ID NO: 83321 - protein, 516 aa, Pseudoalteromonas sp.
  REGION 1..516: note = tr|A0A2N1BF72|A0A2N1BF72_9GAMM Tryptophan halogenase; OS = Pseudoalteromonas sp. GutCa3 OX=888433 GN=CXF64_06110; PE = 4 SV=1
MTKPITKIVVLGGGTAGWLSAGLLAAEHPHLNVTLVESANVPILGVGEGTWPSMRNTLQRIGTKESDFITQCDASFKQGSKFINWRNLSEGENYYHPFMNPQGYEHTNLHASWQRIAPDQKFADVVNMQSFVCQAALAPKQLQTPEYAAVTNYGYHLDAGKFAEFLKNHCVKNLNVTHIIDDVTEVINDEHGYITSLKTNNNGDITGDLFIDCSGSRARLIGEHFNSEFIAQDHILFNNSAVAAQIPNAHINQPIASATLSTAQSNGWIWDIALPTRRGTGYVFSSKYQSDESATNTLKSYIAKSTSEQQAEQLTYRVLKFSPGYRQKFWIKNCVAVGMSAGFLEPLEASALAMVELSISMISEQLPQNRPHMSQLGTRFNDRFSTRWQRVIEFLKLHYVLSERDDTPYWQDISNLNTAPERLQNLLKLWQFQPPSRFDFIENEEVFSSSSYQYVLYGMGFNTQTVSAQNTFNDPRAGDYYYQQNREKIAQCLNGLPSNRALLNHLLLNNGQPHND

SEQ ID NO: 83322 - protein, 497 aa, Duganella sp.
  REGION 1..497: note = tr|A0A0Q8RH14|A0A0Q8RH14_9BURK Tryptophan halogenase; OS = Duganella sp. Root198D2 OX=1736489 GN=ASE26_21970 PE=4; SV = 1
MRRVVIAGGGTAGWMVAAAISRSLGKVLDIKLVESDEIGTVGVGEATIPSLLNFHRLLEIDEQEFMAATKATFKLGISFENWRNVNEDYIHSFGMTGTDHWTAGFNHFWHKGRERKLAGDYGDYCLELKAAQMNRFGHLPCEGINYAYHLDASAYARYLRRYSEGYGARRIEGRIAKVHTDAASGCITALQLDSGAMLEGDLFIDCTGFRALLAGETLGAEFEDWSQWLHNDSAIAVQTSSSGPAVPYTRAIAHEWGWQWRIPLQHRVGNGIVFSSKFVDDETARARLMSNITGEQLVQPRVIRFKPGQRRKVWNKNCIAIGLASGFLEPIESTSIHLIQRGIIRLLQMFPSNGIFQSEIDEYNTQAWSEIEHIRDFIILHYKVTNRRDAAFWRHCAAMEVPASLRHRIDMFRETGRVFRLSNELFAENSWVQVMLGQGITPMQHHPSADLMGDAELSCFLDSIRSNVARTVVQLPPHQQYLENYCAAYMEEYLAPK

SEQ ID NO: 83323 - protein, 508 aa, Dyella thiooxydans
  REGION 1..508: note = tr|A0A160MZV5|A0A160MZV5_9GAMM Uncharacterized protein OS=Dyella thiooxydans OX=445710 GN=ATSB10_14160; PE = 4 SV=1
MRHIAIVGGGTAGWMTALLLANSSYGERIKVTVLESPQVGAIGVGEGSTPWMRGFFEEIGIEESEWMPACDATYKAGITFDGWSTRPGFERYFHAFASMLDNLTMTQFVDNVHRRLNREDVHAHPDHYFIAARLARECKAPRPRHEFPFDVWYGYHFDSVKLGQFLHRKALERGIRHLPRHVNAVQCDEHGDIAALQLEGDERFEADFFIDCTGFSGLLIEKTLKTPYTSYADALFNDAAVAMPTPLDGPIMSQTISTALRHGWAWKIPLTARYGNGYVYSTAHCTPEQAETELRRHLGLLDADVPARHLRMRTGRVDRHWHRNCLAVGLAQGFIEPLEATALMLVQRTASLFVKALEKGDLGEAAQAGFNAAMNTQFDGTRDYIVAHYKTNTRSDTDYWRANAANTHLSEPLVRLLRTWLASRPIADGIRRGTFGQGYPVMSWYSLLAGMGLFPDDVGSHVSGDAPHSLAAIDNLIERSARNFPDHRELLGAIPPRPREETLQVYFW

SEQ ID NO: 83324 - protein, 509 aa, Stenotrophomonas sp.
  REGION 1..509: note = tr|A0A1W1GVP6|A0A1W1GVP6_9GAMM Tryptophan halogenase; OS = Stenotrophomonas sp. 92mfcol6.1 OX=1761901; GN = SAMN04488690_1020 PE=4 SV=1
MNAADTTQGPIRRVVIAGGGTAGWLAGCALAHQFRQQLNITLVESEQIGTVGVGESTVPPIRTFHRFLQIDEQEFLRAVAGTFKLSISFENWRRPGERFIHPFGTIGQGTWATPFHHFWLDSLRRGMPSELGDFCLESAASLADRFSLQTQPQVNYAYHFDAGLYARFLRGKAEANGLRRVEGKIREVRQHPHDGSVASLVLDDGQVIEGDLFIDCTGFRGLLTEQTLHTGYEDWNEWLPSDRAVAVQTDSPAPPVPYTRAIAHEAGWRWHIALQHRVGCGLVFSSRHMSDDEAQAKLLRDVDGQPLRDPWLVPFRSGRRLQAWNRNVVALGLASGFIEPLESTSIHLTISAVVRLIQLFPSDGITPSLVALYNDVSRQEMEHVRDFIILHYHANQRDEPMWKACREMALPESLQVRLRAWRERAHAWQDPGELFRVDSWTSVLMGQGIQPGPPHPLARAIGDADLRTLLHRIRQPVQHTVAKMPTQAEFIERYCKAAPDAWQRGRAVA

SEQ ID NO: 83325 - protein, 256 aa, unidentified
  source 1..256: note = Sphingomonadaceae bacterium
  REGION 1..256: note = tr|A0A431JUJ1|A0A431JUJ1_9SPHN Tryptophan halogenase (Fragment) OS=Sphingomonadaceae bacterium OX=1930536; GN = EKK50_00895 PE=4 SV=1
MPCRTETAVTPYTSAIAMPAGWRWRIPLQHRTGNGYVYASAFLSDDAAAAALRSVVEGEALADPRPLRFKAGRRRHSWSHNCIGIGLASGFLEPLESTSIYLVQQAITLLVELFPDGRTSAADRDEFNRVIDLEYDRIRDFLILHYHATTRSDSPFWDYVRTMPIPDSLAEKLELWRRRGRVVKYREGVFLDASWIAVYMGQGIVPAGWDPRADVPPEGDLRRGIGSLAEQIAADVARRPGHRAFIDGYCPMAEAA

SEQ ID NO: 83326 - protein, 501 aa, unidentified
  source 1..501: note = Sphingorhabdus contaminans
  REGION 1..501: note = tr|A0A553WB75|A0A553WB75_9SPHN Tryptophan 7-halogenase OS=Sphingorhabdus contaminans OX=1343899; GN = FOM92_12305 PE=4 SV=1
MMTDKRIESIVIVGGGSAGWMTAAALSNSLRQGCRITLIESDDIGTVGVGEATIPPIRTFNEMLGIDEREFVKATQGSFKLGIEFVDWGHLGNRYFHPFGPHGRAFDIVSLHHYWLKAREAGETAAFDEHSMAWALARAGRFTRPGQDPRNVLSTFDYAYHFDAGLYARYLRRYSEERGVKRVEGKIASVAQHGENGFVSSVQLEDGQVFGADLFIDCSGFRGLLIEGSLQTGYEDWSHWLPCDRAVAMPCAKAGEFTPYTRSTARTAGWQWRIPLQHRTGNGYVYCSQFISDDEAEETLRANLDGEALAGPNRLRFTTGRRRKFWNKNVIAIGLSSGFMEPLESTSLHLIQAGISKLLALFPDKDFNPLLADEYNHIAVTEFERIRDFLVLHYKLSTRDDGELWRYCAQMAIPDTLQFKIDHFKSYGRHIARDMDLFGPPSWLAVHIGQGNIPEAVDPLFDYRGIDGREWLGKLRGAMQFEAGRQPTHQQFIDQHCKAGI

SEQ ID NO: 83327 - protein, 520 aa, unidentified
  source 1..520: note = Rhodanobacteraceae bacterium
  REGION 1..520: note = tr|A0A522R7N7|A0A522R7N7_9GAMM Tryptophan 7-halogenase OS=Rhodanobacteraceae bacterium OX=2052182; GN = EPN40_07840 PE=4 SV=1
MSESAIRRVVIVGGGTAGWLAAALLARALGPERQIRLVESAEIGTVGVGEATIPQILHINAFLGIDEDDLMRFTHGTYKLGVQLNDWGRLGDSYIHAFGDVGLPLGLLPFHHYWLRSRGRSGAHPLWAYSLNAAAAAANKFARLDTVPDSPIGGIRYAYQFDAARYARYLRERMPEGAVQRIEGKVVDVKLRGEDGFIESLRLENGEIVEGDFFIDCSGFRGLLIEGALKTGYENWQHWLPCDRALAVASTRAAPMRPYTQAFARTAGWQWRIALQHRTGNGHVYCSRCISDDEAAAQLLANLEGEPLEEPRPLRFTTGMRKLAWNRNCLALGLAAGFMEPLESTSIHLVQSGVARFLGMFPDRHCDPVLVDTYNRQTRFEYERVRDFLILHYKATERDDTPFWRQCGAMEVPPALAQRISLFRRTGLIFRDAEELFTETGWLQVMLGQRIEPERYHPLADELEEAKLQGFLSDIRTLVSRTAARLPSHDEFVARVATPPQETAVAPSATPTQVLERSAS

SEQ ID NO: 83328 - protein, 496 aa, Pseudoalteromonas sp.
  REGION 1..496: note = tr|G7F2X9|G7F2X9_9GAMM FADH2 O2-dependent halogenase I OS=Pseudoalteromonas sp. BSi20429 OX=1097676 GN=prnA; PE = 4 SV=1
MKPIKHVVIAGGGTAGWITAALLNKVLGKVINITLIESSAIGTVGVGEATIPPIIQLNNALGINEQDFINATNASIKLGIEFENWKTPGHSYMHAFGSFGKNFPFCDFYNFWLKGQITGCEDDLWDFSLNYQAAKQHKFAPLNTIPNTQLPGLSYAYHFDATLYAEYLKKLAISRGVKHIDAKISHVEQCDTGNVKSLALDNDSQISGDLFIDCTGLRALLIEQTLNTGFIDWSHYLPCDSAVAVQTKSTHELKPYTRSIAHSAGWQWQIPLQNRIGNGLVYCSRYLSDDDAKQLLLKSLPAEPITEPRIIKFKTGRRLKQWHKNVVSVGLSSVFLEPLESTSIHLIQTAVTRLIKLFPHNGISDALVTEFNKQSVIELEHIRDFIILHYKLTEREDSPFWRQCIQMDIPNSLTHKLNLFKHTGKVIREDDELFAEVAWQQVMIGQGLIPDDYNSIVDSLSDDQLSDLFSTLKTLISSTVTQLPTHQNFLASIKKV

SEQ ID NO: 83329 - protein, 517 aa, unidentified
  source 1..517: note = Sphingomonadaceae bacterium
  REGION 1..517: note = tr|A0A2D6UJB6|A0A2D6UJB6_9SPHN Tryptophan halogenase; OS = Sphingomonadaceae bacterium OX=1930536 GN=CMN65_00775; PE = 4 SV=1
MADHTQPNRARRPRPGRRIVIVGGGTAGWMTAAALSRFCGRDWGITLVESDAIGTVGVGEATIPMIRNFNAALGIDEAEFIAATNGTYKLGIEFVGWGAPDSRYLHAFGLVGRGLGLLPFQHYWLRARAEGFGGPIGDYVFNAIACREERFAHVERQPGSALPPLPFAYHFDAGLYAAFLRRYAETRGVLREEGRIDHVETRAEGGDITSVRIDGGRVVEGDLFIDCSGFRGLLIEDTLQTGWTDWSHWLPCDRAIAVPCEPSEPWLPYTRSTAREAGWQWRIPLQNRIGNGHVFSSAHMSEDTAQEALLANLDGEPTAEPRLLRFTTGMRKQAWNRNVVAIGLSSGFLEPLESTSIHLIQTGINRLLDYLPVSGFGPRDRENFNRRTAYEMERIRDFIILHYHANGREGQPFWDMLRTMAVPDTLAEKIEMFRAGGKIVRDQDELFDVPGWGQVMLGQGVEPQGWHPLADELPRDQLEQFLATVKSAYERDVARMPSHQDYVRRLARQGRSKLETA

SEQ ID NO: 83330 - protein, 537 aa, unidentified
  source 1..537: note = Rhodanobacteraceae bacterium
  REGION 1..537: note = tr|A0A522QWT0|A0A522QWT0_9GAMM Tryptophan 7-halogenase OS=Rhodanobacteraceae bacterium OX=2052182; GN = EPN40_13135 PE=4 SV=1
MSEATATVYNRNVTARHPGVGTDAEPPVKRVVVVGGGTAGWMTALLLANSAYGLRLKVTVLESPQVGVIGVGEGSTPWLRGFFESLGIEESEWMPECHATYKAGITFDGWSTRPGFESYFHSFASMLDNMTMAPFIDNVHARLDRADVYAHPNRFFISARLARECKAPRPQASFPFDVWYGFHFDSVLLGRFLQKKAVERGVQHVAGHVVDVQLDDSGDIASLRLQDDATLAGDFYIDCTGFASLLMGKALGTPFVSFKDNLFNNAAVAIQAPHDGPIQPQTISTALRYGWVWKIPLSHRYGHGYVYSTDFCTPDAAEQELRRHLGLLDADVPARHLKFRPGRVAKPWNRNCVANGLAQSFIEPLEATTLLYVQRTAEMLVKVLEQGDLGEEARTRFNDSINAGVEGTRDYIVTHYKTNTRSDTDYWRANAANTHLSAPLQQLLRTWLASRPISAGIAKGTFGRGYPIMSWYSLLAGMGLFPDDREMRPPTQQEAKYDMAEIDTLLERSAINFPDHREFLRAIPPKPKPSSLQVYFW

SEQ ID NO: 83331 - protein, 268 aa, unidentified
  source 1..268: note = Sphingomonadaceae bacterium
  REGION 1..268: note = tr|A0A431J5E0|A0A431J5E0_9SPHN Tryptophan 7-halogenase (Fragment) OS=Sphingomonadaceae bacterium; OX = 1930536 GN=EKK50_15295 PE=4 SV=1
MAGERRQATRVVIVGGGTAGWMTAAAIARLLPHRAEVHLIESEAIGVVGVGEATLPHIRAFNERLGIPEAEFMARTRATFKLGIEFRDWGAIGDSYIHPFGTFGTGSGAVDFHHYYARLLREGAELPPLDRLSYACALAREGRFAMPETDRRSLAGTFGYAYQFDALLFAPYLRGLAEEMGARRSEGIVVDVARDGESGDIVAVTLADGTRIEGDLFVDCSGFRSLLLGEALGEPFEDWSRWLPADRAVAMPCRTETAVTPYTSAIAM

SEQ ID NO: 83332 - protein, 380 aa, unidentified
  source 1..380: note = Sphingomonadaceae bacterium
  REGION 1..380: note = tr|A0A431JUY3|A0A431JUY3_9SPHN Tryptophan 7-halogenase (Fragment) OS=Sphingomonadaceae bacterium; OX = 1930536 GN=EKK50_00605 PE=4 SV=1
MNAVTPRRIVVAGGGTAGWMTAAALTRTLGRTATVTLVESDAIGTVGVGESTIPPLITFNRLLGINEAEFMAATQATFKLGIQFDGWKGPDDSYFHAFGLTGKDHWAAGFQHFWLDGQARGHTESYDDYCLELVAAREGRFAHLPDDRMSYAYQLDSTLYGRFLRRMAEGDGATRIEGKIARVELDGESGDITALVLDSGVRVEGDLFLDCTGFRALLIEQALHVGYDDWTHWLPCDAAIAVQTESVRPPVPFTRAMAHDAGWQWRIPLQHRVGNGIVYCSRYLSQDAALDRLLGNVEGAVLTEPNRLRFVTGARRKQWHRNCIAIGLAGGFMEPLESTSIHLIQRAILRLIRLLPPAGAISAHDIAEFNDQQLTDMDQI

SEQ ID NO: 83333 - protein, 510 aa, Dyella thiooxydans
  REGION 1..510: note = tr|A0A160N594|A0A160N594_9GAMM Uncharacterized protein OS=Dyella thiooxydans OX=445710 GN=ATSB10_34900; PE = 4 SV=1
MEPTDRRIRSIVIVGGGTAGWMTAAALAQALQGSCRIELVESEQIGTIGVGEATIPPIKLFNQTLGIDENTFLAATQGTFKLGIEFVGWGRAGHRYFHPFGQIGAEFDKVPLHHYWLRERSRGDTSALEDHSLAWVAARDGKFTLPSTDRRQVLSTLDYAYQFDAGLYAAFLRRYAEARGVRRTEGRIVGTDLRADDGFIERVRLDGGATIEGDLFIDCSGFRGLLIEEALHAGYEDWRHWLPCDRAVAVACEHDDTFAPYTRSTAHEAGWQWRIPLQHRVGNGHVYCSAFTDDDTATRVLLESLTGKPRGTPRPLRFATGRRRRFWHRNCVAIGLSAGFLEPLESTSIHLIQTAITRLLALFPDRDFDAVTTAEFNRLTGAEYERIRDFLILHYHANTRDEPMWRHVATMEIPEPLAYKLAHFRGHGRLVAESLELFQNPNWLAVMVGQEVWPERHDPLADLRTGVDAASRLASLRQVIAEVAAAMPTQREYINRHCRAPSVEAAAMAR

SEQ ID NO: 83334 - protein, 498 aa, Alteromonas sp.
  REGION 1..498: note = tr|A0A2S9V6M5|A0A2S9V6M5_9ALTE Tryptophan halogenase; OS = Alteromonas sp. 190 OX=2079529 GN=C6Y40_18115 PE=4 SV=1
MAQKKTRVVVAGGGTAGWLTAFSLVTRLGNVLDITLVESDQIGTVGVGEATIPTMCNFHQLMGINEQEFMAATNATFKLGIQFDNWANDGDSYIHSFGEIGQRSWMAEFHEFWMEAVANGQQDSLEDYCLELKAAKANKFATKIGNRPLNFAYHLDATAYAAYLRNKSEAAGVTRCEGKIQSVDTDPQSGNLTRLTLDTGITIEGDVFIDCTGFRGLLIGEHLGVGYEDWSHWLAADRAIAIQTQSTEAPKPYTIATAHKAGWQWRIPLQSRVGNGIVYSSRYLSDEDALATLKQNLDGEMLTEPRYLKFKTGRREKAWHKNCIAVGLASGFLEPLESTSIHLVTTALIRLMKLFPFSNDHELLAEQYNRETQKEMETIRDFIILHYNLTKRTDSDFWDHYRTMDIPEPLAHRMAIFAQNGYVWPDDVALFRVDSWVQVMMGQGLMPAQHHGASRMLPIDGLKQQLSAFKQSVNNALGQLPAHADFIARYCPAGEQVK

SEQ ID NO: 83335 - protein, 492 aa, unidentified
  source 1..492: note = Sphingomonadaceae bacterium
  REGION 1..492: note = tr|A0A431JEV5|A0A431JEV5_9SPHN Tryptophan 7-halogenase OS=Sphingomonadaceae bacterium OX=1930536; GN = EKK50_08135 PE=4 SV=1
MSDTRIRRIAILGGGTAGWMTAAALSRALAGQGVAITLVESDAIGTIGVGEATIPTIHWFNQIIGFDERQFMTETKATVKLGIEFVGWNGEGSRYFHPFGTFGPPGDGAMFLHRLIRARADGDTASTEAYSLTAQAARAGRFTRPVPDRRSLLSTLGYAYHFDAGLYARYLRGLAERAGVTRIEGMVASVERHADSGYVRSLTLADGQVVAGDLFIDCSGLRGLLIGETLGVGYDDWSHWLPCDRAWAAPSAAEVGRTPFTRATAAEAGWRWRIPLQHRVGNGYVFSSRFQDEEAARASLIAGMDGPPLADPRLIRFTPGMRREAWRANVVAIGLSSGFLEPLESTSIHLIQSGIAKLLSLFPAADCSPLLARQFNRVFGQEMLDVRDFLILHYHATAGRTEPMWQERQAMAIPDTLAEKIAHFRASGRIVLSSDELFRDASWFAVLDGQGERPGDHNPLIEAVGRDDNLRQLAALRADIAKVTATLPPIPA

SEQ ID NO: 83336 - protein, 510 aa, Pseudoxanthomonas spadix
  REGION 1..510: note = tr|G7UTF1|G7UTF1_PSEUP Tryptophan halogenase; OS = Pseudoxanthomonas spadix (strain BD-a59) OX=1045855; GN = DSC_13765 PE=4 SV=1
MSVCSIRSIVIVGGGTAGWMAAAALARVLGPTYKVTLVESEQIGTVGVGEATVPHIKAFNNLLGLNEAEFVRQTQGTFKLGIEFVDWRRKGASYLHGFGTEIGHRLGLLPFHQYWIKAHRAGWAKPLGAYTLNTVAAPMNRFMTSARDVPAQSPLANIAYAYHFDAALYARLLRTYSEQRGVRRIEGIVEQVSQHPESGDVQSLRLQDGTVIAGDLFIDCSGFRGLLIEQTLHTGYHDYTHWLPCDRALAVPCEKVGPPTPYTRATARQAGWQWRIALQHRTGNGYVYSSAHISEDQAAATLLANLDGKALGDPRPLRFTTGRRKLCWNKNVVALGLASGFMEPLESTSIHLIQSGISKLLELFPREGISQVLVQRYNDRLAFEFERIRDFLVLHYHATERDDTGFWRQCRDMAIPAELQSTLELFGDSGRFYRNGDEMFAEISWVQVMVGQGIMPASYHPLVDQVPEADLKAFLASVEKTIDHCAQAMPGHQQFIDRYCAAPPLGTAAA

SEQ ID NO: 83337 - protein, 505 aa, Xanthomonas theicola
  REGION 1..505: note = tr|A0A2S6ZCY9|A0A2S6ZCY9_9XANT Tryptophan halogenase; OS = Xanthomonas theicola OX=56464 GN=XthCFBP4691_14930 PE=4; SV = 1
MLAAPLRHLVIVGGGTAGWMAAAALARVLGPAYRITLIESEQIGIVGVGEATVPHIKAFNNLLGIDEAQFVRQTQGSFKLGIEFVDWHRPGASYVHGFGTEIGHPLGLLPFQQYWIKQALLGKAKPLGAYTLNTVAAKRGKFMTSASDAPPNSPLANIAYAYHFDASLYAAFLRRFAEQRGVARREGIVEEAQLHPESGDVVSVRLASGEVIAGDLFIDCSGFRGLLIEQALHTGYHDFSHWLPCDRALAVPCAKVGPPTPYTRATARAAGWQWRIPLQHRTGNGYVYSSAHLSDDEAAATLLANLDGPALADPRPLRFLTGRRKQAWNRNVVALGLASGFMEPLESTSIHLIQSGISKLLELFPREGISPVLVQRYNERIAFEFDRIRDFLVLHYNATEREDSDFWRQCRNMAITPELQATLDLFRDSGRFYRNGEEMFAEISWVQVMVGQGILPRAYHPLVDQVPAADIERFVASVEQTIGHCVDAMPPHQAFIDRYCAAAPA

SEQ ID NO: 83338 - protein, 503 aa, unidentified
  source 1..503: note = Opitutae bacterium
  REGION 1..503: note = tr|A0A351MTY8|A0A351MTY8_9BACT Uncharacterized protein OS=Opitutae bacterium OX=2026771 GN=DCY41_07115; PE = 4 SV=1
MVKDIVILGGGTAGFMMAISLRTRLPDMRVRLVRSPTIGIIGVGEGSTTDLPAFFHGYLGIPPDEFYREVKPSLKLGIKFIWGSGDAYHYGFSGALRQHIQETALPVGFLCDQTLSGVDLSSALMEHGKVFLQHAEGRWPDVRHTVGYHIENAELVAWLEKHAARLGVEVIDGDLASVVRKGDSITSIHLADGQELAADFFVDASGFRSELLGKAMGVPFVSYADSLICDRAVVGGWTRTDEPILPYTTAETMDAGWAWQIEHPGRINRGYVYCSKFITDAAAEAEFRAKNPKVGPTRVVPFVPGRYAQQWIGNVYAVGNSSGFVEPLEATSLLVIAHECRFLCGALAESGGEVGPELRSSIDRTLGRLWDEIRDFLAVHYRFNRRLNTPFWKHCHKHVALHGAQRWVDFYGENGPTLIAETELLAPVQSVFHLEGVWTHLVGMQVPHARAERATAAERAAWANHTAANLNQAKMHGLTVEETLAVLQDPRWTWTPGFYALRR

SEQ ID NO: 83339 - protein, 500 aa, unidentified
  source 1..500: note = Sphingomonadaceae bacterium
  REGION 1..500: note = tr|A0A2D9X821|A0A2D9X821_9SPHN Tryptophan halogenase; OS = Sphingomonadaceae bacterium OX=1930536 GN=CMN69_04425; PE = 4 SV=1
  VARIANT 164: note = Xaa can be any naturally occurring amino acid
  VARIANT 333: note = Xaa can be any naturally occurring amino acid
  VARIANT 345: note = Xaa can be any naturally occurring amino acid
  VARIANT 370..371: note = Xaa can be any naturally occurring amino acid
  VARIANT 373: note = Xaa can be any naturally occurring amino acid
  VARIANT 427: note = Xaa can be any naturally occurring amino acid
  VARIANT 432: note = Xaa can be any naturally occurring amino acid
MSSDYTPRRIVVAGGGTAGWMTAAALAKTMGDAIDLTLVESDAIGTVGVGEATIPPLINFNRLLGINEAEFMRETQATFKLGIEFENWKRDGEKYFHSFGSTGRDHWSAGFQHFWGEGLLRGHNYSYDDYCLELCAAYAGKFAHLPDNRLNYAYHLNATAYAAXLRRIAEGAGASRVEGKIAHVELDGESGNIAAIGLENGQRLEGDIFVDCTGFRSLLIEGALHVGFDDWSHHLPCDSAIAVQTELSASPVPYTRAIAHDAGWQWRIPLQHRGGNGIVYCSRYLSKDAAHDRLMSTLEGKAISEPRAIPFTTGARRKQWHRNCIAIGLSSGXLEPLESTSIHLXQRAVIRLLRMMPAGEVSERDIAEFXXQXLTDMIQVRDFLILHYKATDRRDSAFWRQCATMDIPDSLTQKMELFRETGRVFRXNDELXVENSWVQVMLGQGILPQAFHPVAKKMSDEELSKFLEMLRTNVARTVQGLPAHHAYVAQFCGAKEVAAA

SEQ ID NO: 83340 - protein, 517 aa, unidentified
  source 1..517: note = Sphingomonadaceae bacterium
  REGION 1..517: note = tr|A0A2D9X7Z4|A0A2D9X7Z4_9SPHN Tryptophan halogenase; OS = Sphingomonadaceae bacterium OX=1930536 GN=CMN69_04440; PE = 4 SV=1
  VARIANT 7: note = Xaa can be any naturally occurring amino acid
  VARIANT 23: note = Xaa can be any naturally occurring amino acid
  VARIANT 61: note = Xaa can be any naturally occurring amino acid
  VARIANT 162: note = Xaa can be any naturally occurring amino acid
  VARIANT 165: note = Xaa can be any naturally occurring amino acid
  VARIANT 171: note = Xaa can be any naturally occurring amino acid
MSGEFTXLVIVGGGTAGWLSACXLAARRPELAITLIEAPDIPTVGVGEGSWPTLRETLAVXGIDETEFLTECDASFKQGSRFDGWVDGSERDCYYHPFSAPLSGAMPDILAAWKMQNDGQPYAEAVSPQAAICNRDLAPRQRTMPPFAGALNYGYHLDAGKXGAXLASHGXKKLGVRHVHGKVTRTERGVDGLFTRLLLDNGSAIEGDFFIDCTGMASKLMGEELGIGWVDRSNVSFNDRALAVQVPVVPDSAIASLTIGTAHRAGWLWDIGLPTRRGVGCVYSSGFLSDDEAQAILMNYIGSRIAGAEQTALTPRGLKFSTGYRDKFWAGNCLAIGLSAGFIEPLEASAIVLIELSLKALADGYPQSRAALPRLADRFNSLFRYRWERIVDFLKLHYVLSTRTEPYWQAHRDPATIPSSLAAHLDLWRDHAPSSGDFPQIDEIFSATSHQYVLYGMRFPQPADISSAPSSEVQRQFAKVAERSRALSAALPSNRAYFDALCSSMDKNSARGVPTRQ

SEQ ID NO: 83341 - protein, 561 aa, Phaeobacter inhibens
  REGION 1..561: note = tr|A0A135IFJ6|A0A135IFJ6_9RHOB Tryptophan halogenase; OS = Phaeobacter inhibens OX=221822 GN=AT574_18520 PE=4 SV=1
MNNRLRKITIVGGGTAGWMTALILETELSRTSAPKDRPKICLIESPNIATVGVGEATVPRMPKTLRQAGISERAFFRETNASFKLGVKFCNWNTDAKGNRIDYVNPFAHGQLLEGLEPAEYFLRFGNGDRDYTQSISPHDDLGRLCKGARPLGQPEFEQRFGYAYHLDAVKFAGMLTKVCTKHGVEHIQDEVTSVELDEQGNVSHLMLAQRGRHDIEMVIDCTGFRGLIINQALGEPFMDYSDYLPNDRAMALQIDHPDPEKIESLTRSTALGAGWTWRVPLYNRVGTGYVFSSAHRTDDQAADEYLEWLGDSGKGATPRIIPMRIGRVRNAWVKNCVAIGLAGGFIEPLESTAIHMIDHAVRWLTEHMPTRDIAPSLRTRYNRQMDKLYDEVLEFICLHYRLGNRTDDQYWIDARTEMKIPDRLAENLELWQHRLPMPHDIEFATLFDYRVYQTVLLGKQVYDTGYGPGIRDRLRPLKKPIWFQWWKGAKVDLANILKSMPDHKTLLRDIRGELDQPSFGMAAAMKPTVPMPGAAPMPWAIQNMPSFSEIESGQKDLQLF

SEQ ID NO: 83342 - protein, 498 aa, Sphingomonas sp.
  REGION 1..498: note = tr|A0A0Q4FRV7|A0A0Q4FRV7_9SPHN Uncharacterized protein OS=Sphingomonas sp. Leaf17 OX=1735683; GN = ASE75_12495 PE=4 SV=1
MPDAVRRVVIVGGGTTGWSAAAALATAPGMGHLHVTLVETPDIPTIGVGEATIPHIRGFNAAIGLDEARFVANTGATIKLGIRFDDWHRRGARYFHPFGETVRRIGGVDPHHHLVRGQMTADDLAALSPGAVAAATGRVVDASPPDPAMVERADYAYHFDAGRYAPLLRDHAVARGVVRVTGRVAGIRRAPADGMVEAVLCDDGRAIAGDLFLDCSGFRGLLIGDAPDNRFVDWSHWLPCDRAVAAPCARLGELVPFTRSTADVAGWRWRIPLQHRTGNGHVYCSAFLDDTAAADALLAAMDGPPLADPRVIPFRTGHRDRVWDGNVVALGLAAGFLEPLESTSIYLAQKGALLLLDLFPGRQGAGPLRDEYNRVMLDEFAQIRDFLVLHYSATTRDDSAFWRARRGMPPPDSLSARLALFENHGVLWQHQRFFNEVSWRAVLIGQGIVPRGHDPRLDAVPEDWARSAIAAARAATRDWVARYAGHAETVAAIVGAAR

SEQ ID NO: 83343 - protein, 339 aa, Pseudoalteromonas sp.
  REGION 1..339: note = tr|A0A4Q6JG04|A0A4Q6JG04_9GAMM Anthranilate phosphoribosyltransferase OS=Pseudoalteromonas sp. MEBiC 03485 OX=2571103 GN=trpD PE=3 SV=1
MEATTQTQLNQLLAKQDLSFLQATALFDAIMNGQLNDIELTAALIALKLKGETSDEIAGAAASMRANAVPFKTSKTLLADSCGTGGDGSNTINISTTAAIVAAAAGINMVKHGNRSVSSNSGSADLLKALGINIDMSPEQAAICLENTGFTFLFAPHYHSGVRHAMGVRTALKSRTIFNILGPLANPAAPEVQLLGVYDASLCLPMAETLKTLGTKRAMVVHGAGTDEIALHGTTKVVELNNGELSEYTLTASDFGLANYSLEQLAGQGPEYNAKASLAILQGQGEMAHNAAIIANVAALLYLTDKTSDLKAAADQVSELLASGKAMDTLNAIIEVSHG

SEQ ID NO: 83344 - protein, 517 aa, Caulobacter sp.
  REGION 1..517: note = tr|A0A2G5QSQ5|A0A2G5QSQ5_9CAUL Tryptophan halogenase; OS = Caulobacter sp. FWC2 OX=69664 GN=CSW62_19135 PE=4 SV=1
MQDNRIRKLVIVGGGTAGWMAAAALRRHFQGGPLEITLVESAEIGTIGVGEATIPTIRAFYNQLGLTDIEVMRATGATCKLGIRFNGWVREGQSFIHPFGHFGQDLRGVSFYHYWRKLAQAGEPTDIADYSLGASLAEAGKFMAPSRNPTSTLSIFDWALHFDAGLFAQLMRRVAEENGVRRIDAKVTKVNLRPGDSFVASLDLHTGETIEGDFFIDCSGFRGLLIEEALQTGYEHWNDVLFCDRAWAVQSEGMGDPMPYTDVTAHSAGWRWRIPLQHRYGNGYVYSSRHISDEDALAELKAAIPDPLLHEPRLIRFNPGRRKQVWNKNVIALGLASGFLEPLESTSIALIETGIEKIKTLFPDKDFAPEVVDEFNDWSRREMERVRDFIILHYWANKRGDTAFWRDCNQIVLPEPLRRKIDLFTQRGHFVRYRWEMFAPPSWMAIYAGFELLPEAVDPSLDGIDPKTLSAPLAEMRKAVREVVANAPPHAAFLDQYCRPAPPSPPSAQARSEVAAE

SEQ ID NO: 83345 - protein, 516 aa, Rhodanobacter sp.
  REGION 1..516: note = tr|A0A1M3NZ27|A0A1M3NZ27_9GAMM Tryptophan halogenase; OS = Rhodanobacter sp. 68-29 OX=1895823 GN=BGP10_17670 PE=4; SV = 1
MHRDDMLMNDQVRTILIVGGGTAGWMAAAALAKMLGPAYGIRLIESEQIGIVGVGEGTVPHLSFFNRMLGIDEAEFVKRTQGTFKLGVQFNDWGRLGDSYIHGFGSIGHDVGMQPFHQYWLKARQEGWAGELGDYSLNTLAAPRNKFMTSAADVPPTSPLASIAYAYHFDAGLYAGYLRGYAEKLGVRRTEGRIVQTLLRPDDGFVEAVVLESGERVEADLFVDCSGFVGLLIEQALHTGYEEWTHWLPCDRALAVSCEKVGPPTPYTRSTAHRAGWQWRIPLQFRTGNGHVYSSAHLSDDEAAAILLKHLDGRPLGDPRQLRFVTGRRKRAWNRNVVALGLASGFMEPLESTSIYLIQAGIVRLLTLFPRRDCSPVLQDRFNAQSTFEAERIRDFLILHYHATQRVDSAFWKQCREMSVPATLEDNIRLFRDTGSFFREGNEMFGAASWVQVMIGQGILPERCHALAGQMPEADLRQFMKGVRDVVESCVDAMPSHEAFIARHCAAVMPTATAAA

SEQ ID NO: 83346 - protein, 515 aa, Caulobacter sp.
  REGION 1..515: note = tr|A0A2G5QQY8|A0A2G5QQY8_9CAUL Tryptophan halogenase; OS = Caulobacter sp. FWC2 OX=69664 GN=CSW62_15855 PE=4 SV=1
MQRRRSILIVGGGTAGWLTAAYLAKALRAADRGDLSITLLESPDIGIVGVGEATFPTIRNTLRFLGIDEARFIRETSATFKQGIRFVDWAEAPTDGRHESFFHPFEAPFSTEGTSLAPYWLLQSEATRAPFAEAVTIQARVADAARAPKRPHESDFSGPLNYAYHFDAAKLAQVLAERARELGVRHLRGAVSDTILDETGAIARITSPEHGELTADLYVDCSGFRAELIGKALGSPFKSVKPILFADRALACHTPYERPDGPIQSYTVATAHEAGWIWDIGLVGARGVGCVYSSDHMDDARAETVLRDHVGGAKIEARKISFDAGYREQQWIGNCVAVGLSAGFLEPLESTGVVLIEAAVAMIAELFPHNGPVSAPARRFNALMAARYDNIIVFLKLHYALSRRTEPFWRANRDPASIPERLAELLEQWRYRPPARFDFILDLETFAFFNYQYILYGMGFKTDLGDAAGEFPDVAAAAKLFAKIRGFADRATQDLPSHRDLIAQINRFGFAPEQV

SEQ ID NO: 83347 - protein, 500 aa, Streptomyces sp.
  REGION 1..500: note = tr|A0A2G9DSW2|A0A2G9DSW2_9ACTN Tryptophan halogenase; OS = Streptomyces sp. JV178 OX=858632 GN=CTU88_16025 PE=4; SV = 1
MTVTRSETPSEEFDVIVVGGGPAGSTVASAVALRGHRVLLLDQQTFPRYQIGESLLPSTVHGVCRILGVEDEVARAGFKLKRGGTFRWGRNRDPWQFSFALSPRLSDPTSFAYQVERNRFDAILLDNARRVGVDVREGCRVSDVVADEERVRGVRWTGPGGAIREARARYVVDASGNTSRIHPHVGGKRTYSDFFRNIAVFGYVAGGRRLPKPNDGNIFCATFDEGWIWYIPLRDELTSVGAVVSREHAAAVQGDPTAAWRRLIDSCPEIRDLVDGAPQAGEAPYDEVRVRKDWSYWKTRLWRPGMVLVGDAACFVDPVLSSGVHLATYGSLLAARAINSTLDGTLDEARCFGEFEARYRHEYGLFYEFLMSFYDLHQDERSYFWKARKVTHVGATELEAFVELVGGLASGDAALAAPAEAGARLTAASSDLDRVVGRLPDSDGHRNPLYESTAFRQTFHEGSVLQERGLLGGPLEEEAPLRPGGLVTSEDGLGWAVAAT

SEQ ID NO: 83348 - protein, 503 aa, unidentified
  source 1..503: note = Pseudoalteromonas profundi
  REGION 1..503: note = tr|A0A3A3ELQ9|A0A3A3ELQ9_9GAMM Tryptophan 7-halogenase OS=Pseudoalteromonas profundi OX=1774956; GN = D4741_13400 PE=4 SV=1
MIKKIAIVGGGTAGWLAANHLGHALLQSGIEITLIESPNIASIGVGEGTVPSMRNSLQKFGISESDFINECDVTFKQSIKFVNWLDKHKHGTNFYHHLFDHPHIFSEQLTQQWLAEGNGNDYAEFVSKQHVCCENNLAPKTIATPQYAGINGYAYHFDAKKFASFLGSHATQHFAVKHLFAEIKDVSFDEQGFITHLIDSEGNALEFDFIIDCSGFSAAFIGQKLGVGFVDKSASLLTDTAITLQVPTQSDEEIPPYTIATAHQAGWIWDIALTERRGVGFVYSSKYMSDEQAHAKLHHYLGNKFEHLTPRKIPMKVGHREKMWHKNCVAIGLSQGFVEPLEATAILIADFSAGLLAKRFPRTQDDINLVADDYNQQVNYVWQQTFDFIKLHYCISDRTDSAFWRDNKKTDQLSEKLKNNLARWQRFTPVREDFASKFDLFDLENYLYVLFGMHYVPAKQQSKQSDNQQVAEFKQQRVKQLLSELPKHRELLDKIKKFGLQKY

SEQ ID NO: 83349 - protein, 512 aa, unidentified
  source 1..512: note = Sphingomonadales bacterium
  REGION 1..512: note = tr|A0A258IDS6|A0A258IDS6_9SPHN Tryptophan halogenase; OS = Sphingomonadales bacterium 32-64-17 OX=1970592; GN = B7Y88_01260 PE=4 SV=1
MKQVKHIVIVGGGTAGWLTAGVIAARHQARMKHGFTVTLVESPNVPIIGVGEGTWPTLRNTLRGIGFSETDFLRECDAAFKQGARFNRWTTGEPDEGYYHPLMLPQGFARLNLVPHWQADGTATFCDAVTPQGRICDAGLAPKTIATPEFESLANYAYHLDAGKFSQFLQRHCCEKLGVRHVLADVTSVDVTESGDVRAIQTQQAGEITGDLFVDCTGFKALLIEGAMQVPFRDCNDVLFCDTALAVQVPYADPDAPIASHTISTAQSAGWIWDIGLPTRRGVGHVFSSNHISAEEAERELRAYIGPAADSLTVRKIPIRSGHRETFWKRNVVAVGLAAGFLEPLEASAIVLIELSAKMIAEQMPPNRAVMDVIARRYNETTHYRWGRIIDFLKLHYALTKRTDTEFWRDNLRPETIPDRLLGLMELWRYQPPWLHDEFDRAEEVFPSASYQYVLYGMQWRTELPPGEDQRERDMAVRAMRENRQQTERLMQGLPRHRDLLNRIREHAMMPV

SEQ ID NO: 83350 - protein, 480 aa, Streptomyces olivaceus
  REGION 1..480: note = tr|A0A1D8SIJ7|A0A1D8SIJ7_STROV Tryptophan halogenase; OS = Streptomyces olivaceus OX=47716 GN=BC342_00115 PE=4 SV=1
MTSTGDSASAESFDVIVVGGGPAGSSAATFVALQGHRVLLLEKESFPRHQIGESLLPSTVHGICALLGVSEELHSAGFVKKHGGTFRWGSNTEPWTFDFALSEKFAGPTSYAYQVERMKFDQLLLDNARRKGVVVRERCAVRDVLEDGGRVNGVRYTDEDGTERETRARFVVDASGNQSRLQGRVGGERRYSEFFQNIALYGYFEGGKRPPAPNSGNITCVAFDSGWFWYIPLSDTLTSVGAVVRKECADRIRGDRGEALAEMIADCPLVSDYLSEAERVTSGPYGEVRVRKDYSYLHDGFWRPGLTLVGDAVGFIDPLFSSGVHMATFSALLAARSINSVLRGDLEEEECFAEYEARYRKEYQTFHDFLVSFYDVTRDEQQYFDDARRVTRDSAPGAGAFVGLVGGGASDDTALTSDDYRDQRKKDLRQQSRDVHWEGHRIQMQAAFGEADDDVPAVKDGLVVAQDGMHWTKSADSAAV

SEQ ID NO: 83351 - protein, 509 aa, Caulobacter sp.
  REGION 1..509: note = tr|A0A2G5QTX2|A0A2G5QTX2_9CAUL Tryptophan halogenase; OS = Caulobacter sp. FWC2 OX=69664 GN=CSW62_21615 PE=4 SV=1
MQPLKKILIAGGGSAGWMTAALCSRLFQGLYEIVLIESEQIGTVGVGEATIPAIKKFNELLGLDEDDFLRKTQGSFKLGIEFRNWFRKGEGYLHGFGVLGQDLGWLRVHQYWLRMRELGQAPDFEALSINNAMARQDRFMRARADMAESPIGHIAHAFHFDAGLYAKHLSTYAQARGVQRREGKIVDVTLRPDDGFVQSVTMDDGAVIAADFFVDCSGFRGLIIEQALKTGYDDWTRWLPADRAIAVPTERSAHFTPYTRSTAHDAGWQWRIPLQHRTGNGHVYSSQYIDDDEAERVLLSNLDGAQRADPLRIRFTTGKRKKIWNKNCVSVGLASGFMEPLESTSLHLIQSAVIRMVRLLPDGGFDQANVDEFNRQSDFEYERIRDFIILHYKATERDDTPFWRHCRDMEVPATLQRKMDLFRANGRVFREDDELFTEESWIQVFLGQGVIPRGYDPLVRVHSDEAIATHLGNIQTVIGKCLNVMPSHAEFVARACQAPPLPATPVPVP

SEQ ID NO: 83352 - protein, 516 aa, Sphingosinicella sp.
  REGION 1..516: note = tr|A0A2P7QKH7|A0A2P7QKH7_9SPHN Tryptophan halogenase; OS = Sphingosinicella sp. GL-C-18 OX=2116704 GN=C7I55_18710; PE = 4 SV=1
MPPTFVRIAQWPRRLEVPDSRPIRDVVVAGGGIVGWSAAAALRRHLPNVGVTVIADAPAPDALAERIGSTLPSIAAFHGDLGLSEMNAVARTASGYRVGTQFEGWAGNRPAYVHTYGEHGRPFGATSFHLYWHRVRQAGGTASFDTFSPAAELARMGRFVHPQGGPGSILASFEYGLQLNPARYLDLMRAFAVHLGAREHQAKIAQVDVRGEDGFVGGLRLDDGQVVTADLFVDCTGPAARIRSALDAKFEDWSCYLPCDRVILAEGTAPASLPVMDSVVAMSSGWRWQAASPARTSHGLVYASAHLSDSKAERALRVHSGAEPRGPAVAIRIGRRPDPWLRNCVAVGEAAVALEPLEWTNLHVAHSAIDRIVAMMPDRECAPIELAEFNRQSAAEAERIRDFLMLHYVTSDRREPFWRDAAAMRIPDGLAHTLRLFRERGRLPFQEEETFARDSWLSVLFGQGVLPHRADPLTDALPIARIEAAMGQMRDSIRAMASPLPTHADYLGNMMRRAVR

SEQ ID NO: 83353 - protein, 510 aa, unidentified
  source 1..510: note = Pseudoalteromonas porphyrae
  REGION 1..510: note = tr|A0A0N1EPZ0|A0A0N1EPZ0_9GAMM Uncharacterized protein OS=Pseudoalteromonas porphyrae OX=187330; GN = ADS77_07475 PE=4 SV=1
MAIINKLVILGGGSAGWMCAAYLSKQHPKLDITVVESSKIGSIGVGEGSTPHLKTFMDTLGVSEQQWMPQCDASYKAGIYFNNWNGDERRYFHPFYSQMDEKTAEVYCVNANARRRGNGDWQAPDDYFLTGHIAKHNLSPKVHTPMLKEQTYGYHFDATKLAAVLKAYAQEKAVKHIDGEFSQAQLSECGNIVGITLIDGRQVNGDFFIDASGFNALLIEQTLKTPFNSFANELLNDSAVAVATPVTTDGVISCATQSTALSAGWSWQIPLTSRTGNGYVYSSKHITGEQAQSELADQLNIDAQNSAFRHLKMKVGCMQSAWQKNVMAIGLAHSFIEPIEATSLMVTQHSIKLFSQALVKLQNNEQPLALTEHVNQQLHQLVYGIKDYVVAHYATSQRTNSSYWLAATQLTHSSNALKSLLIAWLNGDDFDVYLSKHAQQQVYFRPSWYCLLGGMDFKSERCQQVFDPASTAINNAAKAYLNELCDQHCEPHAKQLHTMKNQYSTSAKVG

SEQ ID NO: 83354 - protein, 561 aa, unidentified
  source 1..561: note = Rhodobacteraceae bacterium
  REGION 1..561: note = tr|A0A2D5IYN0|A0A2D5IYN0_9RHOB Tryptophan halogenase; OS = Rhodobacteraceae bacterium OX=1904441 GN=CML66_09745; PE = 4 SV=1
MNNRLRKITIVGGGTAGWMTALILDMVFSRTSGPKDRPNICLIESPNIATVGVGEATVPRMPVTMRQAGISERDFFRETNASFKLGVKFCNWNKDAKGNRIDYVNPFAHGQMLEGLEAAEYFLRFGNGDRDFTQSVAPHDDLGRLCKGARMLGQPEFEQRFGYAYHLDAVKFAGMLARVCTRRGVEHIQDEVQSVELDEQGNVSHLMLERAGRHDIEMVMDCTGFRGLIINQALGEPFMDYSDYLPNDRAMALQVKHADPDKIESLTRSTALGAGWTWRVPLYDRVGTGYVFSSAHRTDDQAADEYLEWLGDSGKGLTPRVIPMRIGRVRNAWVKNCVAIGLAGGFIEPLESTAIHMVDHAVRWFAENLPTRDIEPSLRVGYNQRMNGLYDEVLDFICLHYRLGNRTDDQYWIDARTEMKIPDRLAENLELWQHRLPMEHDIAFATLFDYRVYQTVLLGKQVYDTGYGAGIRDRLRPLKKPIWFQYWKGAKADLAQILKTMPDHKTLLRDIRGELDKPAFGVAAPMRPPVAKPDTTSAPGAIQNMPNHAEIRSGVKDLQLF

SEQ ID NO: 83355 - protein, 516 aa, Caulobacter sp.
  REGION 1..516: note = tr|A0A2G5QSN6|A0A2G5QSN6_9CAUL Tryptophan halogenase; OS = Caulobacter sp. FWC2 OX=69664 GN=CSW62_19130 PE=4 SV=1
MTNTHPNAIRKIVIVGGGSAGWISAAMLAHYFKDGGCAVELIESEEIGTIGVGESTIPPFLQLIASLGIDEREFIQATQASFKLGIRFEDWKRKGQHYYHPFGAIGGPIGPHEFYQCWLRAKANGHPSELQDFAPGTVMADQGKFMLPFKAQRSLIAGASYALHIDARLIAKFLRDFAETRGVKRTEGIVTDVVTHSDGSVAKVVMKNGQEVEGDLFIDCSGFRALLIGKTLDVPFNDWSDMLLCDRAVVVQTQNIGEPHPYTLSKAEDAGWRWRIPLQHRAGNGYVFSSRHLSDDEARATLVRNVQGPMLMNPMFIAFKTGMRQRLWDKNVVAVGLAGGFIEPLESTALHLIYRGMDFLLRFFPDRDFSPALAAEYNRRMTADYEEIRDFIVLHYCTTQRDDTPFWRDVRQAPISETLKARMALFKAHGVLREGVDEMFRNPSWQSVMEGMGVRPQRYQQLADTAPYEVITQTLDQSKPMLAAQVAGLPSHGEFLAANCPAPPPEPVAAPFKTVA

SEQ ID NO: 83356 - protein, 513 aa, Sphingosinicella sp.
  REGION 1..513: note = tr|A0A2P7QYW5|A0A2P7QYW5_9SPHN Tryptophan halogenase; OS = Sphingosinicella sp. GL-C-18 OX=2116704 GN=C7I55_01890; PE = 4 SV=1
MTPVQNIVIVGGGTAGWLTAGLIAAKHQERRPHGFTVTLVESPNVPTIGVGEGTWPTLRNSLRRIGVSETELFRQCDAAFKQGARFSRWTTGAEDDGYYHPLMLPQSFGQVNLAQHWLADPEGESFCDTVTPQGRLCDDGLGPKTIATPEYEAVANYAYHLDAGKFSHFLQRHCRDVLGVRHVLADVAQVSMAENGDIESLGTDQGETIAGDLFVDCTGFSALLIGKALHVPFRSCAGTLFCDSALAVQIPYEEPADPIACHTISTAQSAGWIWDIGLPTRRGVGHVFSSAHISPEDAERELRAYLGPRGDDLAVRRLSIRSGHREQFWKGNCVAAGLAAGFLEPLEASAIVLIELSAKMIADQLPPCREVMDVVARRFNETTLYRWGRIIDFLKLHYALTRRTDSDFWRDNVRPETIPERLRDLMELWRFQVPWNIDEFDRAEEVFPSASYQYVLYGMGHRTVLMPGTGDADAEAARRAKRENRAQRQRLLAGLPRHRELIAKIVAHGLQPV

SEQ ID NO: 83357 - protein, 527 aa, unidentified
  source 1..527: note = Rhodanobacter glycinis
  REGION 1..527: note = tr|A0A502C3F1|A0A502C3F1_9GAMM Tryptophan 7-halogenase OS=Rhodanobacter glycinis OX=582702; GN = EAH88_12865 PE=4 SV=1
MARIQKILVVGGGTAGWLTACYLAKALNSTKPESIQVELVESPNIGLLGVGEATFPSIRGTLAAIGLDERRFLVGATATFKQGIQYVNWVRPPGTPGPDRFFHPFSLPSQRAGSPELLPYWLLGGAPEGMPFADAVTMQASLVKRGRAPKRATDPDYQAPMNHAYHFDAACFATVLAEHGQGLGVRRHLATVERAELDESGAIARIVTKEIGELTADLYVDCTGLRGALIGNAMQSPFHSRRDVLFADRAVALQVPYPRPDASILPFTRATAQEAGWIWDIGLQKRRGIGYVYSSQHSGATRAEEVIRGYVGDAATELDALHIKFETGYRPEHWRRNCVAVGLAGGFVEPLESTGIALVELAAYLITHLLPGDVDDMERTARQFNQMMVARYERIIDFIKMHYCLTQRRDSAFWIDNTDLASIPQTLQDRLALWRHRPPHRLDFVTDLEMFMPASWQYVLYGMEFSTDLEPMRSAYPQMEAAQREFAMIQQMATHAQNDLPDHRALVEQLCREHLQRKMGRLAGADG

SEQ ID NO: 83358 - protein, 513 aa, unidentified
  source 1..513: note = Sphingomonas panacis
  REGION 1..513: note = tr|A0A1B3Z9Q5|A0A1B3Z9Q5_9SPHN Tryptophan halogenase; OS = Sphingomonas panacis OX=1560345 GN=AWL63_09435 PE=4 SV=1
MQPIRNIVIVGGGTAGWLAAGVIAAKHQGRMPADFTVTLVESPTTPIIGVGEGTWPTLRTTLSKMGVSETDFFRECHASFKQGARFARWTTGEVDEGYYHPLMLPQGFQRVNMAAHWLADGHDQSFCDAVTPQGLLCDDGLAPKTIATPEFDAVANYAYHLDAGKFAGFLQRHCTAKLGVRHVLADVTSVNQAENGDITSVVTEQAGEIAGDLFVDCTGFAALLIGKALGVPFKSCADVLFCDTALAIQVPYESEDSPIASHTISTAQSAGWIWDIGLPSRRGTGHVYSSSHISDEDAERELRAYLGPVGATADVRKIKIRSGHRETFWKNNVVAVGLAAGFLEPLEASAIVLIEMSAKLIAEQMPVCREVMDIIAARFNATTHYRWGRIIDFLKLHYVLTKRTDSDFWRDNVRADTIPDRLRDLLTLWKYQPPWFHDEFDRVDEVFPAASYQYVLYGMQFGTEVSREALSAEARIAEQTRREAAVQTQRLRAGLPRHRDLIRKIIDHGLPAI

SEQ ID NO: 83359 - protein, 496 aa, Sphingosinicella sp.
  REGION 1..496: note = tr|A0A2P7QHY7|A0A2P7QHY7_9SPHN Tryptophan halogenase; OS = Sphingosinicella sp. GL-C-18 OX=2116704 GN=C7I55_21180; PE = 4 SV=1
MDGQEVRKVVIAGGGTAGWIAAAALSRQLGRLLDITLVESDEIGTVGVGESTIPTARSFNALLGLDEREFMRATQATFKLGIAFEDWARLGDRYLHSFGQIGTSTWIADFHHFWLEARARRIAGGLGDYCFELQAAEAGKFATGPDAAINYAYHLDATLYGRYLRERSERQGVSRVEGKIGQVEQDPESGFIRALVLESGARIEGDLFIDCTGFRGLLIEQTLKAGYEDWGQWLATDSALAVQTGSVGPALPYTRAIAHEAGWQWRIPLQHRVGNGLVYSSAHMDDDAAQALLMAKLEGDALTEPRVIRYRTGRRRKTWEKNCVALGLASGFVEPLESTSIHLIMIAVTRLMQMFPFSGISEPVVRRFNDQAQNELERIRDFIILHYKLTERDDSAFWRQCRDMDVPATLADRIGLFREAGFAYQASDDLFRVDSWVQVMLGQRLEPLGNHQVSRLMPPERMQQSLADLKSKIAAAVQRMPTHQDFIEQYCAPIPA

SEQ ID NO: 83360 - protein, 561 aa, unidentified
  source 1..561: note = Rhodobacteraceae bacterium
  REGION 1..561: note = tr|A0A2E3PLD8|A0A2E3PLD8_9RHOB Tryptophan halogenase; OS = Rhodobacteraceae bacterium OX=1904441 GN=CML68_23085; PE = 4 SV=1
MNNRLRKITIVGGGTAGWMTALILEMVLSRTSGPKDRPSICLIESPNIGTVGVGEATVPRMPVTLRQAGISEREFFRETNASFKLGVKFCNWNTDAKGNRIDYVNPFAHGQMLEGLEAAEYFLRFGNGERDFTQSVAPHDDLGRLCKGARLLGQPEFEQRFGYAYHLDAVKFAGMLTKVCTKRGVTHIQDEVQSVELDESGNVSHLMLERNGRHDIEMVVDCTGFRGLIINQTLGEPFMDYSDYLPNNRALALQVKHTDPEKIESLTRSTALGAGWTWRVPLFDRVGTGYVFSSAHRTDDQAADEYLEWLGDAGKGATPRVIPMRIGRVRNAWVKNCLAIGLAGGFIEPLESTAIHMVDHAVRWFAEHLPTRDIEPSLRNRYNRQMNKLYDEVLDFICLHYRLGNRTDDPYWIDARTQMKIPDRLAENLELWQHRLPMEHDIEFATLFDFRVYQTVLLGKQVYDTGYGPGIRDRLRPLKKPIWFQYWKGAKSDLAQVLKTMPDHKTLLRDIRGELQPNAFALTAGKKPPATQPGMAPMAGPAQSMPNFAEIESGKKDLQLF

SEQ ID NO: 83361 - protein, 548 aa, unidentified
  source 1..548: note = Rhodospirillaceae bacterium
  REGION 1..548: note = tr|A0A545T0Y5|A0A545T0Y5_9PROT Tryptophan 7-halogenase OS=Rhodospirillaceae bacterium R148; OX = 2591009 GN=FKG95_27420 PE=4 SV=1
MSDRVENVTIVGGGTAGWLTAMIINTFINTFREGPAVKVTLIESPKIPTVGVGEATVAGMPSLMQQLGIDEAELFRRCNASFKVSVRFGDWAVDGRGKPFAFYHPFNFPGTVGGYNPAYHFNRFGPYGGDPSITDNMTANSALIHARKGPRALNGENYEKSIGYAYHLDAGLFGEFMRDVALSRGVQHIRDDVVEVFQDETGAVSGLQLEKGGRHPVEFVVDCTGFKSLIMKEVLKEPFISYGDYLLNDRAIPVQLPHRDPTKIEPCTRSTALGAGWVWRVPLYSRVGTGYVFSSAFRSDDEARDEFFRHLRAVGDLPTGAPDPDVKVIKMRIGRSQRFWVKNCVAIGLSNGFIEPLEATAIYSVEMAARWLVGHFPDKKGSPALANRYNGLMTSLYEEIRDFISTHYHTSNRPDPFWKAARYDCRLSESLQERLELWKARLPEITDTQDQKLFNFWNYLYVLHPKGFFKDRHFPLEGSIRHEHWQAFGRRLEERKAELLRTMPDHYQLLANIRGDEPLQQALNLDGLAKPVFESRASVRPTISVPTA

SEQ ID NO: 83362 - protein, 489 aa, Sphingosinicella sp.
  REGION 1..489: note = tr|A0A2P7QSX7|A0A2P7QSX7_9SPHN Tryptophan halogenase; OS = Sphingosinicella sp. GL-C-18 OX=2116704 GN=C7I55_11385; PE = 4 SV=1
MSAAAIARLLGRTVAVTLVESDAIGTVGVGEATIPTIRDFNRLLGIDEEAFVGKTQGSFKLGIEFVDWLRPGHRYIHPFGTLGRDTQTIRFSQLWLKLVQEKADAAEDALGAYSASAIAARLGRFGRPEANPNHPLSTLSYAFHFDAGLYARYLRTWSEARGVGRVEGRIVAVDRGGESGFVRGVRLEDGSTISGDLFLDCSGFRSLLLGETMGEPFVDWSHWLPCDRAIALPCASAGDLLPYTRSTADAAGWRWRIPLQHRTGNGYVYSSAHLGDDEAHRRLFDTLDGAPQGEPRQLRFRAGHRRNLWSGNVIGIGLAGGFLEPLESTSIHLIQTAISRLMLLFPDKSCAGPERVEFNRQSVLEYAQIRDFLILHYKATERRDTEFWQQCAAMTLPDSLRHKIDLFRSKGRLFRFQEELFSEDSWLAVLIGQGIMPAGHDAVADTLSAAELRAQMTGLRQALHRAVEALPRHADFIARCCAAPRSAVS

SEQ ID NO: 83363 - protein, 550 aa, unidentified
  source 1..550: note = Cercospora beticola
  REGION 1..550: note = tr|A0A2G5I4V2|A0A2G5I4V2_CERBT Tryptophan 2-halogenase OS=Cercospora beticola OX=122368; GN = CB0940_02475 PE=4 SV=1
MSVPTRCSVLVIGGGPAGSYAASVLARESVDVVLLEADVFPRYHIGESMIASMRYFLRFIGLEEDFDKHGFTKKFGATFKITDKRAAYTDFSVSLGPEGHTWNVVRSEADEMIFRHAGKSGAQIFDGTKVNDITFVPYEQDGFTSDARVANPGRPVSASWSRKDGSGGSIEFDYLIDASGRAGIISTKYLKNRKMNEALKNIANWAYWKGAAPYAKGERNENSPFFEALKDGSGWCWAIPLHDGTLSIGIVARQDIFNAKKKAAGLPSEEFYRRSLKELCPEISELVKDAQIVSGIKQAADWSYSASAYAGPHFRLAGDAGCFIDPYFSSGVHLAFVSGLSAALTVQAARKGQCSELAAAKWHSGKVTEGYTRFLLVVMTVLKQVRQQSRALLAKEEEEGFERAFNFIQPVIQGTADAESSDAAIQRKAAAGVEFALGVNEISAAQQKAVLDKVQDAGHDVNGLEKLTDDEVEILKGIAGKQQALTLHASNIEALAGDTINGLAAVIERGKIGLRSASVLPEAEALHVLGVEAEERERMMNLNRTLAVEA

SEQ ID NO: 83364 - protein, 514 aa, Sphingobium fuliginis
  REGION 1..514: note = tr|A0A292ZL59|A0A292ZL59_SPHSA Tryptophan halogenase, putative OS=Sphingobium fuliginis (strain ATCC 27551) OX=336203 GN=SFOMI_4187 PE=4 SV=1
MVHPVRNIVIVGGGTAGWLTAGVIAARHRSRIGNGFTVTLVESPNTPIIGVGEGTWPTLRTTLSRMGISETDLFRECDAAFKQGARFARWTTGTPDDGYYHPLMLPQNFGQVNLAPHWLAGEGDESFCDSVCSQGRICDDGLAPKTIATAEYDALANYAYHLDAGKFAPFLQRHCCEKLGVRHVLADVEQVLMKEDGDIRAIRTTQAGEIEGDLFVDCTGFKALLIEGAMKVPFRDCNDVLFCDTALAMQVPYERPDSPMASHTISTAQSAGWIWDIGLPTRRGIGHVYSSNHISDEEAERELRAYIGPLAEGLGARKIAIRSGHRETFWKGNCVAVGLAAGFLEPLEASAIVLIELSAKIIAEQMPACREVMDIIASRFNATTHYRWGRIIDFLKLHYVLTKRTDSDFWRDNVREETIPDRLKELMLLWRYQSPWFLDEFDRVEEVFPAASYQYVLYGMGFRTEVDRPALARDAHLADRARRENTAMTAKLRAGLPRHRDLIDKIVAHGLQPV

SEQ ID NO: 83365 - protein, 514 aa, Sphingomonas faeni
  REGION 1..514: note = tr|A0A2T5U736|A0A2T5U736_9SPHN Tryptophan halogenase; OS = Sphingomonas faeni OX=185950 GN=C8J25_10348 PE=4 SV=1
MTSDGAGRITKVVIVGGGTAGWMTAAALSRLVPSGVSVTLVESEEIGTVGVGEATIPSLLDYNRMLGIDEDAFVRATGATFKLGIEFRDWARLGDAYLHPFGTHGRDIGGVSFHQLWLRQAALDTATDGAGAGPIGDYCLSSVAARRGRFTRPSANPQSVLSTLSYAFHFDAGLYARFLRDLAEADGVVRVEGRVVDVERNAGTGFVEAVRLAGDRRIEGELFIDCSGFRSLLLGGALDVPFTSWREWLPCDRAWAVPSARRGALIPYTRATADVAGWRWRIPLQHRVGNGYVYSSAHVDDDAAKQALLAGLDGEAMGEPRQLRFEAGRRDRLWDRNCVAIGLSGGFLEPLESTSIHLIQSGITRLMSLFPDLGFSAVEIDEYNRVMLREYEQVRDFIILHYHATERSDSAFWEHCRTMALPASLEAKLALWSDKARVFREQGELFTPDSWIAVLLGQGIRPVSFDPLASALPADESARFLAHVRDMIDKTAAAMPTHEAFIAQNCAARTHQAA

SEQ ID NO: 83366 - protein, 522 aa, Alteromonas sp.
  REGION 1..522: note = tr|A0A4Q8TV87|A0A4Q8TV87_9ALTE Tryptophan 7-halogenase OS=Alteromonas sp. KUL42 OX=2480797; GN = EYR97_17995 PE=4 SV=1
MQQANSSIRRIVVVGGGAAGWLTASIIAVTHKHDDNISITLVESPDISILGVGEGTWPTMRSTLLKIGISEEVFLTQCNASFKQGTSFYNWQSDKGENQYYHPFSLPFRYFESDIAAWWQGHAAEQDFAHAVCSQAALCDNHLAPKQRQTPPYAGIANYGYHLDANKFATLLQQHATTKLGVQHIVDHVDNVVGSPSTPIASIVGRQYGAIEGDLFIDCTGFAARLIGQHYGVPLTPCSHVLANDSAVAIQAPYVDSSVDIASTTHSTAQDNGWIWDIGLPSRKGVGYVYSSAHCSEDEARATLDNYLKHDKKTTDVDVSEARKITFTPGYRKTLWVENCVAIGTSAGFLEPLEASALVMIELSATHIAKQLPRTLCECKAAGRQFNNAFEKKWERIVDFLKLHYVLSEREASAYWRDMRDQRGCSTQLQDWLTLWKSRSPISSDFELREELFPAASYLFVLYGMGFRSHYNDTYQANLHTAEQRQAYAKHVQSIQQQLNGLPTNRQFLNQLAQSNCTQMHF

SEQ ID NO: 83367 - protein, 500 aa, Alteromonas sp.
  REGION 1..500: note = tr|A0A4P6AFB3|A0A4P6AFB3_9ALTE Tryptophan 7-halogenase OS=Alteromonas sp. KUL42 OX=2480797; GN = EYR97_16460 PE=4 SV=1
MQAVNKVVILGGGSAGWMTAAALATVLKNNYAEIVLIESQNIGTVSVGEATIPQIALFNSILGIDENEFVRETQATFKLGIEFANWKQKGHTYMHPFGNFGADMDAIQFHHYWLKMFQKGQAEDLDAYSLAAVAAKQGRFMRPQNRGNSPLSKIAYAFHFDATLYAKYLRKIAVSRGVTRIEAKMEDVCIRDTDGFIDSLVLDNGQVINGDLFIDCSGFNGLLIDKTLKSGFEDWSHWLPCDSAIAMPCSAKHDVYPYTVSTAQEAGWTWRIPLQHRIGNGYVFPSQFVDTQKAIDVLTQQMENAPLNEPNILRWKTGMRKEFWVKNCIAIGLSAGFIEPLESTGLHLIQAGIAKLLGMFPYQGCEQVEIDAYNEQTRLEMERIRDFIILHYAVTEREDTEFWRYCKNMPVPDYLRQKIDLYKANGRIYRHGTELFNETSWLAVMNGQGIMPKGYHPLVDTLSEAEIYSRLVHIKQVIDNSVNVMPTQAAFIDRYCKAIS

SEQ ID NO: 83368 - protein, 517 aa, Pseudoalteromonas atlantica
  REGION 1..517: note = tr|Q15SS6|Q15SS6_PSEA6 Tryptophan halogenase; OS = Pseudoalteromonas atlantica (strain T6c / ATCC BAA-1087) OX=342610 GN=Patl_2546 PE=4 SV=1
MAQAIKSVVIVGGGTAGWITAGTIAAKLQSEYADGFSITLVESPDVKPIGVGEGTWPTMRRTLKAMGVRETDFIRQCNVSFKQGAKFAKWVTGAEDDFYYHPLVLPQDFDSTNLARHWMERPFEQSFSQAVSPQEAVCELGLAPKSIATAEYTSIINYAYHLDAGRFSAFLQQHCTEKLNVRHVLDNVTRINAAENNDIASVSTTANGDIEGDLFIDCTGFKSLLLKEHFKVGFKSCKDVLFVDQALAVHVPYESEDAPIASHTISTGQRAGWVWDIGLQNRRGVGHVYSSAHTNEAQASEELLNYIAQTGGHVNEADIRKIPLNPGHREKFWHQNCVAIGLSAGFLEPLEASSLLLVEISASMIADQFPATRDAMEIVAKRFNSTFLYRWERIIDFLKLHYMLSKRDDSSFWIDNRDPASIPQSLQDQLTLWQYQPPWHNDFEHAVEVFPAASYQYVLYGMGFNTQPNPLGMSDSYKQRATNFRQKNTQQIQQMLKTLPSNRALINKIYQYGLQKV

SEQ ID NO: 83369 - protein, 496 aa, unidentified
  source 1..496: note = Shewanella bicestrii
  REGION 1..496: note = tr|A0A220ULC5|A0A220ULC5_9GAMM Tryptophan halogenase; OS = Shewanella bicestrii OX=2018305 GN=CF168_09255 PE=4 SV=1
MGQIKDIVIVGGGTSGWMTAALLAKLFKQTLNITLVESADIGTIGVGEATIPPLQLFNSVLGIPENEFIKATHATFKLGIQFEHWGSQGDSYMHAFGNFGKDIGFTQFHHYWLSTKPQTITAFWDYSLNYQAAINHKFQAIEHIPHSPLAGITHAYHFDAACYAQLLRQYSEKAGVKRIEGKVETVNRSENGHIASLSLISGVEVQGDFFIDCSGFAALLIGKTLNVGYESYQDWLLCDSAFAVPSEKVAEIPPYTRAIAHEAGWQWRIPLQHRTGNGIVYSSRYMSDDEAKAKLLSTLDGKPLCEPKKISFIPGRRLKQWQHNCVAIGLSSGFLEPLESTSIHLVQSAIIRLTKLFPHQGVEQANVDEFNRQSQLEFEQIRDFIILHYHLNQRSVSNQDSLWHACQRMQVPESLQQKITLFNQTGSIFRHKEELFTEMAWAQVMLGQGIIPQDFNPLAHTIEQQDLAEFFSNIRAIINNSVSKMPTHEQYLAQLV

SEQ ID NO: 83370 - protein, 517 aa, Sphingobium fuliginis
  REGION 1..517: note = tr|A0A292ZJH0|A0A292ZJH0_SPHSA Tryptophan halogenase, putative OS=Sphingobium fuliginis (strain ATCC 27551) OX=336203 GN=SFOMI_4135 PE=4 SV=1
MTADIPSPGRIVIVGGGTAGWLSAATFSRTLGMRDVTLVESSEIGIIGVGEGTFPTIRSTLAGLGVGEGEFLRSADATFKQGVLFDGWATGADSYFHPFNMPIGGEDEALLPHWLAMEGQRASWADSVTVQERVIRAGRAPKRVQDPDFSGPMNYAYHFDAARFADYLRTISLAAGVRRIEGMVAHVEQREDGDIAALTLRDGRRVEGDIFIDCSGFRALLIGETLGSGFVGCGDTLFNDRALAMQVPHDRPDAPIRPYTLATAHEAGWTWDIGLPERRGIGYVYSSRHCSDDEAEAVLRRYVGPGGEALTPRQLRFATGYRERQWIGNCIAIGLSAGFFEPLESTGIMLIEAALRMVGDFLLPAGSASDTAARNAAARRFNRLMTARFERIVRFLKLHYCITRRTDTAYWRDNADPASIPADLQDLLAQWRHRPPSRFDFTVDLETFLPPSYHYILYGMGFETRLAGGIGRYPGGQEARAAFARVAGASGAAVSHLPDHRALLDHLRGRQPSARVS

SEQ ID NO: 83371 - protein, 538 aa, Burkholderia sp.
  REGION 1..538: note = tr|A0A1B4G442|A0A1B4G442_9BURK Tryptophan halogenase; OS = Burkholderia sp. BDU8 OX=1385592 GN=WS71_26325 PE=4 SV=1
MSNPIKNIVIVGGGTAGWMAASYLVRALQQQANITLIESAAIPRIGVGEATIPSLQKVFFDFLGIPEREWIPQVNGAFKAAIKFVNWRKSPDRSRDDYFYHLFGSVPNCDGVPLTHYWLRKREQGFQQPMEYACYPQPGALDGKLAPCLPDGTRQMSHAWHFDAHLVADFLKRWAIERGVNRVVDEVVDVHLNDRGYISSLSTKEGRTLEADLFIDCSGMRGLLINQALKEPFIDMSDYLLCDSAVASAVPNADARVGIEPYTSAIAMNSGWTWKIPMLGRFGSGYVFSSKFTSRDQATADFLDLWGLSDKQPLNQIKFRVGRNGRAWVNNCVSIGLSSCFLEPLESTGIYFIYAALYQLVKHFPDTSFDPRLTDAFNAEIVHMFDDCRDFVQAHYFTTSREDTPFWRANRHDLRLSDAIKEKVQRYKAGLPLTTTSFDDSTYYETFDYEFKNFWLNGNYYCIFAGLGMLPDRSLPLLRHRPESIDKAEAMFARIRREAERLRTSLPTNYDYLRSLREGDAGLSRSQPGPTLAAPEIL

SEQ ID NO: 83372 - protein, 507 aa, unidentified
  source 1..507: note = Halioglobus sp.
  REGION 1..507: note = tr|A0A2E0YW51|A0A2E0YW51_9GAMM Uncharacterized protein OS=Halioglobus sp. OX=2024834 GN=CME59_07400 PE=4; SV = 1
MTTQDVLVLGGGTAGFLAALALKKELPPHIGVRVLHSSKIGTIGVGEGSLRQLPEFLHSYLGIDARRFFAEVQPTWKLGIRFRWGAGADFDYSFTPQVCVTHPHPDLSRPLGFYCFDNLREHSVTSVLMDNEHAFLRAPDGSPLMEGNYGYHMDNRKLAAFLERYALEQGIELLDDEVREVSADADGVRTLALASGQSVRADLFVDCSGFRSLLLGDTLGEPFVSYRSSLFCDRAVIGGWQRTQEPVRPYTVSETMDCGWCWQIEHEDRINRGYVYASDFISDEDAEAEFRAKNPHITDTAMVRFRSGRYRRAWVKNVVAIGNSAGFVEPLEATAIAAICSAAKMLAQTLAQAGDCAVRDSNRDIFNRYNERSWDTIADFLAVHYRFNTRMDNAFWRSCVNEVDLRGAQPIVDYYRDNGPCNHWQLILEDPLCRFRLDGYYTLLLGQGVAHAQLDTPSARERDAFAQLQKATVQYAARGVGVTEALGAVRGEHWQWRPQHFGVNPGI

SEQ ID NO: 83373 - protein, 533 aa, Alteromonas sp.
  REGION 1..533: note = tr|A0A4P6AHN2|A0A4P6AHN2_9ALTE Tryptophan 7-halogenase OS=Alteromonas sp. KUL42 OX=2480797; GN = EYR97_18720 PE=4 SV=1
MTQLNEERSVKHIVVVGGGSAGWLAAGVLASKLKSTFQITLIESPSVSSIGVGEGSWPSLRDTLIDIGIEEKHFLTACKASFKQGSTFVNWRKPEQTNSLQQEHVYHHPFTVPVGYNELDIHSCWQAFASNEKYENAFSLQAAMCEANKAPKQVSTPDYAHVLNYGYHFDATALATLLHAHCTEKLNVVYKQAHITSVNNDSEGYIASVTTEDGIQINGDLFIDCSGSQGILIDKHYNVPWHSIEDIMLNNRAIAVQAPYANNDDVISSATIATAQSCGWTWDIGLQHRRGVGLVYSDHFTTQQQAEETLLAHVSKRLPKEHVRELDVRSIRFTPGYREQFWVKNCLSLGMSSGFIEPLEASAIAMVELGIRMLCDAFPQNFTHMKWVEERYNRRFHYRWQRVIDFLKLHYVLSNNNTPYWLAQRDSSTIPDSLAQLLDVWRFQSPSRLDLIENEEIFPSASYQYVLYGMEFQTLPSALQITRSSAQKAQDIRQKMQQTKTAYLQGLPTNRDLLSQIIASKNKEQTHDLIGFR

SEQ ID NO: 83374 - protein, 521 aa, Alteromonas sp.
  REGION 1..521: note = tr|A0A4P6AJR8|A0A4P6AJR8_9ALTE Tryptophan 7-halogenase OS=Alteromonas sp. KUL17 OX=2480796; GN = KUL49_02395 PE=4 SV=1
MESTHTSSEHNLRNIVILGGGTAGWITAGVIAATHRSNNSTNPSIKITLIEAPSIPIAGVGEGTWPSMRRTLKLLGVSETDFINQCNVTFKQGAKFRHWVTGRDDDEYYHPLVAPNHYNNINFAESFATQKFPFSFDKAVCTQGHICDLNLAPKNISHREYEGLLNYAYHLDANAFALFLKKHCTETLGVTHIEAEIERVEGEPDSPIKALVTNSSNRIEGDLFIDCSGFKSHLIGGHFNVEYQSCKDILFCDKAITTHLAYDNNAPLLPYTLSSATDAGWIWDIGLTNRRGVGHVYSSEFIDQKQAKSRLEQYAKRKLRDDEVRTFDIAPGHRKEFWKQNCVAVGLSAGFLEPLEASSLVLVEMAAKFIAEQLPRNTNVMGVIANRFNEVFRYRWSQIIDFLKLHYVLSERKEAFWQQHRNQETWTKSLSENLLLWRYHSPWHNDFTRTEEVFPSASYQYVLYGMQPNYSFINTAAQCQHKHYIELFAQDIELQLHQQKAQLYDQRTLLSNVRKFGFALG

SEQ ID NO: 83375 - protein, 540 aa, Streptomyces sp.
  REGION 1..540: note = tr|A0A255PWD3|A0A255PWD3_9ACTN Tryptophan halogenase; OS = Streptomyces sp. FBKL.4005 OX=2015515 GN=CFC35_02005; PE = 4 SV=1
MSDNIEHIVILGGGTAGWMSAAYLGKALQGAVRITVLEAPAIPKIGVGEATVPNLQRVFFDFLGIPEDEWMRECNASFKMAVKFINWRTPGEGSPTARTLNGRPDHFHHPFGILPQEDGVPITHHWSDRAARGETDLPFDYSCFVDPVLMDRNLAPRHPDGRPATRYAWHFDAHLVADYLRRWSVEKQQVQHVQDRMVDVQLDQNGFIRSLRTESGRTIEGDLFIDCSGFRGALINQVMEEPFLDQSDHLLCDSALACPVPHDDAAHGIEPYTSSIAMKSGWAWKTPLLGRFGTGYVYSSAFATEDEAVRDFTALWGLSADQEFNRIRFRVGRNRRSWVKNCVSIGLSSCFLEPLESTGLYFTYAAIYQLAKHFPDKSFSPIFADRFNKEIAAMFDESRDFLQAHFYFSPRTDTEFWRANKELTLGEEIREKAEMYRKGIPVNLPTADESTYYGNFEAEFRNFWTNGSYYCIFAGLGMLPERPIAPLAYGRDGRASAQRMFDGVAQRQRELVETLPTMYDYLRDFHGAPAGPDDRDRHGR

SEQ ID NO: 83376 - protein, 503 aa, Pseudoalteromonas sp.
  REGION 1..503: note = tr|A0A3D5EPK5|A0A3D5EPK5_PSEAS Tryptophan 7-halogenase OS=Pseudoalteromonas sp. OX=53249; GN = DG048_24665 PE=4 SV=1
MIKKIAIVGGGTAGWLAANHLGHALLHSGIEITLIESPNIASIGVGEGTVPSMRNSLQKFGISESDFINECDVTFKQSIKFVNWLDKHKHGANFYHHLFDHPHIFGEQLTQQWLADGNGNDYAEFVSKQHVCCETNLAPKTIATPQYAGINGYAYHFDAKKFASFLGSHATQHFSVKHLFAEIKDITCDQQGFITHLIDSEGNALEFDFIIDCSGFSAAFIGQKLGIGFVDKSDSLLTDTAITLQVPTQSDDEIPPYTIATAHQAGWIWDIALTERRGVGFVYSSKYMSDEQAHEKLHRYLGNKFEHLTPRKIPMKVGHREKMWHKNCVAIGLSQGFVEPLEATAILIADFSAGLLAKRFPRSRDDIKLVADDYNQHVNYVWQQTFDFIKMHYCISDRTDSAFWRDNKKTDQLSEKLKNNLARWQRFTPVREDFASKFDLFDLENYLYVLFGMHYVPVKQQSKQNDNQHVAEFKQQRVKQLLNELPKHRELLDKIKKFGLQKN

SEQ ID NO: 83377 - protein, 537 aa, Shewanella livingstonensis
  REGION 1..537: note = tr|A0A3G8LW96|A0A3G8LW96_9GAMM Tryptophan 7-halogenase OS=Shewanella livingstonensis OX=150120; GN = EGC82_14765 PE=4 SV=1
MQKPITQIVIVGGGTAGWITAGLLAAEHNVDKGVLAHAPKLNITLIESPDVATIGVGEGTWPSMRSTLSKIGIDENEFIRRCDASFKQGSRFIHWRNDPAKGNQADTIAQSDTIAQSNRYLHPFSLPHGHQELDLCPFWLPHADQVSFAEAVSSQEILSQLGLAPKSISSAQYHFQNNYGYHLDAGKFSQLLSEHCTQKLGVTHIRDHVCQIINNDQGDIDKLITTEHGEISGQLFIDCTGTKSLLLGEHLQVPFLCQKSVLFNDSALAVQVPYSNENSPIASCTHSTAQQNGWIWDIGLPTRKGVGYVYSSSHTNDIDAEQILINYLGVDAASADKLQPRKLSFNPGYRAKCWQNNCIAIGMAAGFIEPLEASALALIEWTASTIAQQLPPNRQTMDTIAARVNQRYQWHWQQIIDFLKLHYVISQREVDSYWRDHRESNSIPDSLQAMLELWRYQVPSQFDISYKEALFPAASFQYVLYGMGFNTQLPTHVKPSMQQAAQRLFNDNQQRTQALSKSLPSNRALLDKVAQYGFPKL

SEQ ID NO: 83378 - protein, 499 aa, Pseudoalteromonas atlantica
  REGION 1..499: note = tr|Q15XQ3|Q15XQ3_PSEA6 Tryptophan halogenase; OS = Pseudoalteromonas atlantica (strain T6c / ATCC BAA-1087) OX=342610 GN=Patl_0807 PE=4 SV=1
MKKTTITILGGGTAGWMSAAILAKGLPNDRFHIRLVESPDIPSVGVGEASIPPLTLLLKYLELDEHRFLMRLNGTYKYGIQFEDWSEIGNRYMHAFGDIGTPFNALSFPQAWLKYAGPLNLTDLGSYIPSAVAAKAGKFHPPLAIPKGANPQHFYPLSLLFYAYQFDASKLADLLKQYAQEHLVEHIEGTVSRVNNKRNGDISSLSLRDGRNVSGEYFVDCSGMYGRLNKVHYGCKFNDWSHELPCDAAIAVQTKRDTPAAAYTKSIAMNAGWRWEIPLRDRTGNGYVFSSRFLTDEQALQELKKALAGEQLITEPKILHFKTGCLTTPWHRNSIAIGLASGFLEPLESTSIHLIHKYALELKDALISGQDRAHEAKRFNRMFYHEAVSIKDFLLTHYHVSKRTDTPFWQHCKTMPIPQTLQHYLAEFNRTGYINLPESSLFPFQSWFQVLVGQGYLGDYSAFSDKQFDAQQAEPFFNNVKLAIQSEVARLAPHQSYLQ

SEQ ID NO: 83379 - protein, 557 aa, Shewanella livingstonensis
  REGION 1..557: note = tr|A0A3G8LV45|A0A3G8LV45_9GAMM Tryptophan 7-halogenase OS=Shewanella livingstonensis OX=150120; GN = EGC82_11095 PE=4 SV=1
MQTKAMQVVIVGGGTAGWLTAAIIAAHARQHSPKHESSVCVTLIESPDIPTIGVGEGTWPSMRETLRKIGIKETDFMTQCDASFKQASEFRQWRVAPSVSNDRYLHPFSLPSISGNSLLLSAYTTANNVNLMNSSFCDNFCYQQGLATHSLAPKQITTPQYQFISNYGYHLDAAKFSAMLKQHCCNELGVRFISANVVKVNNHANHDIASVVIDKASDSNDINAVTEVKGDLFIDCSGSKALLIGEHYGIELNSQKHILFNDSALAVQIPYEHADSPIYSSTVSTAQDVGWVWDIGLQSRRGVGFVYASDYLNHASALQRLQGYLRDNSTLNNQQIEQLSVKKLSFTPGYRQTFWHKNCVAIGMAAGFIEPLEASALALIEQSATMVAEKLPLNQTVMPIVAQQFNKRMQQHWQHIISFLKLHYVLSSRDDSEYWIHNRHPSSIPENLSALLLLWQHQPPSHYDIDYANPLFPIASYQYVLYGMQQSANVNRLHNSDPVHTCDSQTSINNIDEITKYLTPLAEHIDINKQKQQRLLSAMPTNRALLTKMAQYGLSPV

SEQ ID NO: 83380 - protein, 527 aa, Mastigocladus laminosus
  REGION 1..527: note = tr|A0A4D9CBM5|A0A4D9CBM5_MASLA Tryptophan 7-halogenase OS=Mastigocladus laminosus UU774 OX=1594576; GN = BLD44_027715 PE=4 SV=1
MNLENKIQSVIIVGGGTTGWMAAAYLAKALQGSVAITLIESDRIPTVGVGEATVPSIRPDLFDFLEIPESEWMPQCNATFKIGIKYVNWAYPPSVTKNNTFYHIFGESKECDGIPLTHYWLKKRLSGYECPMSFCCYSSAELCENYKSPKFFDGGIGTNYAYHFDASLVAQFLTKWSTKQGVVRVIDQVSDVVLDNTGAISCLKTQKGNIYKADLYLDCSGFQGLLINQVLKEPFISYSDNLLCDSAVATAIPTNDNDNNFRPYTTATALSCGWVWEIPLYGRIGTGYVYSQQFLSPEEAEKEFRAFHGSAAKDIRVKHLNMRVGRTQRAWVKNCISLGLASGFIEPLESTGIYFIYAALKQLLRYFPDKSMNSVLRDKYNERIAYMIDDVRDFIVLHYCTTSREDTLFWKTNKFDIKIPESLKTLLEIYKAGSPINIPYTDEHGYNQVFDAGFDRFWTNSNYLAILTGMNYLPNSVLPILHHKQHSLEKAEIIFKSVQTQTEILLKELPSHYSYIKNLHSAGLLCK

SEQ ID NO: 83381 - protein, 508 aa, Sphingomonas parapaucimobilis
  REGION 1..508: note = tr|A0A0A1W2K8|A0A0A1W2K8_9SPHN Putative tryptophan halogenase OS=Sphingomonas parapaucimobilis NBRC 15100; OX = 1219049 GN=SP5_008_00040 PE=4 SV=1
MDDRPTADHIAQRIVIVGGGTAGWMAAAALARFVPATTRITLIESDAIGTVGVGEATIPGIRLFNQMLGLDEAEFLRATNGSFKLGIRFEGWSGEGSGYLHAFGSIGRGLGLVPFHHYWLRGGGAANPASLWGHMASAQAAMAGRFAPDPGRPDLPSGLAWAYHFDASLYAALLRRHAEAAGVERVEGRIASVARDMAGRIDHVVLDGGEAHAGGLFIDCTGFRALLIGETLAEPFDDWSQLLPCDRALAVAGERTSPLPPYTRAIAHGAGWRWRIPLQHRTGNGLVYDSRHLSDDEAADRLLTALNGEAMGELRRLRFTTGRRARAWVGNCVALGLAAGFLEPLESTSIHLIQSGLARLLDYWPGQTLQPVEVDAYNRETAAEWLAIRDFLILHYHANARSEPFWAERRAVPLPDSLAARIALFRANGRFRREGDELFAEPAWVQVMIGQGIVPAGYQPLADTLSADELDDFLSLTRRHAAQVAARLPTHDAFLAAHCAAPAPEVFA

SEQ ID NO: 83382 - protein, 390 aa, Corallococcus sp.
  REGION 1..390: note = tr|A0A3A8GFB5|A0A3A8GFB5_9DELT Tryptophan halogenase; OS = Corallococcus sp. AB011P OX=2316735 GN=D7X30_18390 PE=4; SV = 1
MSEDSCDVAVIGGGPAGAAMAVALRRKAPSLSVTLVERTTYDAPRLGETLPPDVRLALSRLGVWDGFLRDGHLASRGTSSCWGRAEPGFHDTMMSPWGSAWHLDRARFDERLSLEAFRQGARVQRATTLVDSESLGRNGYRLRLAHEAADPSTLRARFVVDATGGKATFASARGARRLVSDRCFAVYGAFQLPGDAAFPTHALVEACPEGWWYSALLPRGRVVVALVGDGDSLRGLRWATPASWMNLLRQAPATRARLDVCDFAGEALVAVPVLVGQLDRPRGEQWLAVGDAACTYDPLSSQGITKALDSALLAADALERCLRGDADALQDYESTLNTRFQDHQRTRAAYYRQEQRWPQAPFWKNRWEALPAPAAPPAQLLRPHSTEVNP

SEQ ID NO: 83383 - protein, 495 aa, Pseudoalteromonas sp.
  REGION 1..495: note = tr|A0A2E4CJS5|A0A2E4CJS5_PSEAS Tryptophan halogenase; OS = Pseudoalteromonas sp. OX=53249 GN=CMK68_05430 PE=4 SV=1
  VARIANT 23: note = Xaa can be any naturally occurring amino acid
  VARIANT 347: note = Xaa can be any naturally occurring amino acid
  VARIANT 417: note = Xaa can be any naturally occurring amino acid
MRHQSIKQVIIAGGGTAGWMTAXALAKLLNKDIKVSLVESDDIGTVGVGEATIPPIRTFHKLLGIDEKLFMKATQATFKLGISFEDWHKPQSDYIHSFGMTGKECWAGEFHHFWLHAKKMGNKDDFGDYCYELQAAKQGKFGISPHNPINYAFHMDASRYAAFLREFAENLGVKRFEGKIERVNKHADNGFIKSLLLDDGTEITGDFFIDCTGFKGLLIEQALHTGYEDWSHLLPCDSAVAVQTKGTPEIAPYTRSIAHQSGWQWQIPLQNRVGNGLVYCSRYLSDHDATQLLLNNLSSETLTEPKIIKFKTGRRRKGWNKNCLALGLASGFLEPLESTSIHLIMTXIIRFMRLFPFTGITQHAIDEYNKQLQSELESIRDFIVLHYKVTDRDDSEFWQHCKTMETPKSLAHKVALXKETGRVFLDDGDIFRVDSWVQVMLGQGIMPEQYHHVASLMNDQELSRFMQGIKQQIAQRLQQLPTHRAFIEQYCPVDT

SEQ ID NO: 83384 - protein, 513 aa, Sphingomonas faeni
  REGION 1..513: note = tr|A0A2T5UBI6|A0A2T5UBI6_9SPHN Tryptophan halogenase; OS = Sphingomonas faeni OX=185950 GN=C8J25_101353 PE=4 SV=1
MHEIQNIVIVGGGTAGWLTAGVIAAKHQARRQHGFTVTLVESPNVPTIGVGEGTWPTLRSTLKKMGVSETELFRQCDASFKQGARFNRWTTGAPDDGYYHPLMLPQHFGQVNLAPHWLADEGSATFCDTVTPQGRICDEGLGPKTIATPEYDGHANYAYHLDAGKFSHFLQRHCCDTLGVRHVKADVTEVRLDESGDIASLDTEQGVSIAGDLFIDCTGFAALLIGGAMKVPFRSCTDILFCDTALAMQVPYDVPDAPIASHTISTAQSAGWIWDIGLPTRRGVGHVFSSSHISADAAEQELRDYIGPAARDLTSRRLAIRAGHREQFWVRNCVAVGLAAGFLEPLEASAIVLIELSAKMIAEQMPACREVMDVVAHRFNDTAHYRWGRIIDFLKLHYALTKRTDTAFWRDNVRPESIPDRLAGLMELWRFQSPWVHDEFDRAEEVFPSASYQYVLYGMGARTAVMPGSIDDDLALARRARHDNQVQTQRLVSSLPGHRELIDRIKRHGLQPI

SEQ ID NO: 83385 - protein, 499 aa, Pseudoalteromonas sp.; identical to SEQ ID NO: 82701
  REGION 1..499: note = tr|A0A3D4AWC3|A0A3D4AWC3_PSEAS Tryptophan 7-halogenase OS=Pseudoalteromonas sp. OX=53249; GN = DIT74_14230 PE=4 SV=1

SEQ ID NO: 83386 - protein, 510 aa, Sphingomonas faeni
  REGION 1..510: note = tr|A0A2T5U934|A0A2T5U934_9SPHN 2-polyprenyl-6-methoxyphenol hydroxylase-like FAD-dependent oxidoreductase OS=Sphingomonas faeni; OX = 185950 GN=C8J25_102111 PE=4 SV=1
MIDGLGQHIVILGGGTAGWMTACLIAHRWRDRAVRVTLVESPEIGIVGVGEGSTPQLKHFFDTLGIAGADWMPACDATYKLGIGFEGWSDREGYDQYFHPFPTELDGHAAPQFFYNTRARRTGRDVEAHPDQFLLPARLAAQNRAPQPAANFPFEVSYGYHFDAYKVGAFLATHATEMLGVVHLQRRIASVERASTGEITALIDTDGERIAGDFFIDASGFRSTIFSALDVPFVSYADALFNDRAVVMPTAHPPGAPIPSQTRATALSAGWAWHIPLTSRNGNGYVYSSRHLTEAQAEAELRAHIGTDAGEARHLKMRVGRVRDSWSHNALAVGLAQGFLEPLEATALHLVIATVEAFLDMVDQGGATEAVRAAFNTRIAARYDGVRDYIVAHYRLNQRHDDPTGYWAEARRVEALSDDLKMLMSTWFTGGDMVAAIDRAGLGRYYSAISWHCLFAGYGTFPNAARLSPPGADIDPIDLPKIDNFLTRCASNFGSHASRLRDLADHKDTV

SEQ ID NO: 83387 - protein, 516 aa, Sphingomonas faeni
  REGION 1..516: note = tr|A0A2T5U735|A0A2T5U735_9SPHN Glycine/D-amino acid oxidase-like deaminating enzyme OS=Sphingomonas faeni; OX = 185950 GN=C8J25_10347 PE=4 SV=1
MGKRILIVGGGTAGWLTAGYLAKRLGADLPGGVAITLVESQDIGILGVGEGTFPTIRRTLATIGIDEADLIRRCGATFKQGAKFVHWRHAPGQGATDHYSHPFQVADSSDGLDLLPYWLLGLGGTENWDEVSNPQKKASDRHRAPKLPTNPDYVGPLNYAFHFDAVALAGLLREQGVKNGVRHLTDTVSEVLLDAEGAIGGVRTEQNGVLDADLYIDCTGFRAELIGKAMKVPYRSCRDVLFCNRAIAAQLPYARPDDPIASYTISTAQKNGWIWDIGLDRRRGIGHVYSSDHGDDETAERVLRGYLGAAGEKADVRHFKFDAGYREVNWYKNCVAVGLSSGFFEPLEATGIAFAEVSAGMIANLFPWGGDYETSARQFNANMLRRYERALDFIKLHYCISERRDTAFWRDNVADASVPDSLLELLDRWRFRPPNELDIDGQVDIFTEASWQYVLYGMGWKTDLSAKAGALRYHEDARRAFAEVERQARYAIANLPSNRDLVAYAQTHSFGARAAA

SEQ ID NO: 83388 - protein, 499 aa, Sphingomonas haloaromaticamans
  REGION 1..499: note = tr|A0A1S1HCN9|A0A1S1HCN9_9SPHN Flavin-dependent tryptophan halogenase PrnA OS=Sphingomonas haloaromaticamans OX=653954 GN=prnA_1 PE=4 SV=1
MSAPIETVVIVGSDTTLWLAAAVLRNALRPAGLAVEAVELPATLRPADVHATLPPLEALHAQLRIDEKALLRSTGGAFSLGQNFTDTSGAATAFLHAYGSCGAPIEDREFFAYWLKARRLGLGVPLDDFSLTASAARHGRLMIPDDETDRYGRADYGYHLPALAYARSLKMLAIRDGVRAHETSALGIALDPDRGTIKAVELEGGRRIEGQLFIDATADARLIGRALGVRVESWRDHFPVDRVLAATGPRFASIPIYAEVRASEGGWTALHPTQAATHVVHAYASASASDEEAAVAAARAAGMPIADIAIRSPEPGRRESAWAGNCVAIGAAACTFDPVHGVDLHAAQLGLVHLLSFFPAGTDHAAERAEYNRIMRSGLCRLRDFQSAHYALNRYGDAPFWTTAREAVLPAELAQDIATFRARGLVAPREDESFSPDSWRALFVGHGTVPESYIPAVDTVPADMVKEHFRRMLGFVRDQVMRQPTHDQYLDGIGGASRG

SEQ ID NO: 83389 - protein, 498 aa, Pseudoalteromonas luteoviolacea
  REGION 1..498: note = tr|A0A167E3C6|A0A167E3C6_9GAMM Uncharacterized protein OS=Pseudoalteromonas luteoviolacea H33 OX=1365251; GN = N476_16725 PE=4 SV=1
MTERIQNVLIVGGGTAGWLSASLLKRVLKDLVNITLIESDDIGTVGVGEASIPPMVNFNAALGLDERTFIEQTQATYKLGIEFEGWGHQDSRYMHAFGEQGKSFPFCDFFQVWLKAKQQGLTDSLAEYSLNTQAAKANRFAHLQHIPNTQLQGLTYAYHFDAGLYAKLLSKQSQSQGVRRVEGRITEVKTDPNTGNIAAVILANGERYSADLYLDCSGLKSLLIDQTMNVGFEDWSHWLPCDSAWALPSEQLDGEIKPYTRAIAKQAGWQWQIPLQHRVGNGYVFSSKFISEQDAKEALLQSLPSRPLAEPKLIKFKTGMRRKQWQGNVFAVGLSSGFLEPLESTSIHLIQTSILRLIRHFPFDAIKDSAIENANMEFANEMEQVRDFIILHYKLTERDDSRFWQWCKNMSIPPSLHRKMALFEETGHFAAKTDDLFQNVAWQQVMVGQGLVPKTYHPLAEQFDGEHLKSLLDSLKVLLQTTVNKLPSHQAFIDKMTK

SEQ ID NO: 83390 - protein, 502 aa, unidentified
  source 1..502: note = Unknown
  REGION 1..502: note = tr|A0A2E5AV29|A0A2E5AV29_9BACT Uncharacterized protein OS=bacterium OX=1869227 GN=CL660_05620 PE=4 SV=1
MKIVIVGGGTSGLVAAALMNNFWKDKVDITLYYNPETQSIGVGEGTTPSFVDVFQETLGYNTEDVIRELDATIKLGVLFKDWIPDTEYYHGFVEVANDETDTRSEILTSNVSSFYSLVNDCYNGGINFNEATNTVPANSELHRHDFAFHITTDKLCSFLFKYLEGRVNIVEDIISEVKTDGKNIQSIICEKSGEVSADLFVDASGLNAMLLSKLDSAEWVDLSEHLPIDRAIPQKVKNNSGYIPSYTLANATKNGWIWQIPSQTEYGTGYLYSSKFTTDEEAKHDFNNWLQKNHSEKLNEEPKILKWKSGYWKKPWIGNCVAVGLAGGFIEPLEALTHQYLTFMIEVFLSVNSTLKMLDYNRDRFNMCQNKRLFDYTQFLNLHYCTNRTDSKFWKYMKDHKTDWVRTLEEKCKHEFLDVFDTDDMLDFWGNDNYIQIMKGINMINKDAIKEYMWSRKNPELLYDDARQQHDYIVDEKSKTVMVDHKEYLETIKKSSHLPYLV

SEQ ID NO: 83391 - protein, 614 aa, Mastigocladus laminosus
  REGION 1..614: note = tr|A0A4D9C9Z7|A0A4D9C9Z7_MASLA Tryptophan halogenase; OS = Mastigocladus laminosus UU774 OX=1594576; GN = BLD44_027270 PE=4 SV=1
MYTTQSLKYDVVILGTSLAGLSQARHLMLNIPNIKVALVDLPAQELDNEPAINDSTIEIADLFFCKELGLHDYLIENHILRSTLSFHWPKRPDQTTTLDDYYHIWCNRQLSIASYQINRTKFEQDLLLMNEAMGATVYKGSVVDVELTEGDAVNTVKIQVADQQIALKADHVIDGAGRQFIIGRKTDNLLLGPQNLCGLNNGTAWLRVKNVNRTIFDDGYNPNETSTSRYYSTNHYFGYGHWSWMTPTDIPSRELSVGIVHYNEVLPAQGIDTQEKFVAFMQANHNLVYQLIESGEIIDFHYSPRIAYKSKKLFSEDNWYVIGNSASFFGGFYCIETTLLAFAVESVTEIIRAKIAGEADVDKKRSAYNEFNLYYHNLINHVYFDHGKQLGHASIMSWRIYLDWMWWFSIHVPTYAGKWHLNPEFTDMYLKLSYKNIGGFWIDLFKEFQQLVNQGTNIGLMDLYRADQLLGGYHTPKYFDNFLENTKFEPLRCNVFAGVKVNFFNAAIWYALFQWKSFGLAGCLNPRHLYHFFRLLSVSGQWAFLELIYRFQLKKGLSDNSSIEKMRQEFKNYQYRPELQPWISEESTQEKQLSQGELNSSLDEAKICTTSAKI

SEQ ID NO: 83392 - protein, 526 aa, Rhodanobacter sp.
  REGION 1..526: note = tr|I4WBG6|I4WBG6_9GAMM Tryptophan halogenase; OS = Rhodanobacter sp. 115 OX=1162282 GN=UU5_06223 PE=4 SV=1
MARLQKILVVGGGTAGWLTACYLAKSLNSVAPGSIKVELVESPRIGLLGVGEATFPSIRGTLSAIGLDERRFLAGSTGTFKQGIRYRHWVRPQGAPGASDFFHPFSMPSQRTGGPELLPYWLLGAAPAGVPFADAVSMQKRLVDGNRAPKRAKDADFHGPMNYAYHFDAARVAEVLAEHGQTELGVVRHLATVERAELDAQGAIARIVTREAGELSADLYVDCTGLRGYLIDGAMKSPFRSRRDVLFVDRAVAMQVPYPQPDSPIPCYTMATAQEAGWIWDIGLQQRRGCGYVYSSQHSDATRAEAVFRQYLGAAAEGVTAQHIRFETGYRPEHWRKNCVAVGLAGGFVEPLESTGIALVELGAYLLTHLLPGDVDDMERTARYYNEMVVARYDRIIDFIKMHYCLSQRRDTAFWHDNANPDSIPDTLKDRLALWKHRPPHRLDFVGDLEMFLVSSWQYVLYGMEFKTDLEPMRSVYTRVDDARREFAMIQQMAGHALGDLPGHRELVEQMVREYRQRNEVAEAVA

SEQ ID NO: 83393 - protein, 498 aa, Shewanella livingstonensis
  REGION 1..498: note = tr|A0A3G8LUE5|A0A3G8LUE5_9GAMM Tryptophan 7-halogenase OS=Shewanella livingstonensis OX=150120; GN = EGC82_11105 PE=4 SV=1
MHNNNIKKVVIAGGGTAGWMAAAAFSKLFGHSLSVTIVESDLIPTVGVGEATIPTLHIFHDLLKINEAEFMAATNATFKLGISFENWRDVSQDYLHSFGYIGQGCWAAGFQHFWLKGMQQGIAKDIGEYCLEHLACRQGKFAVLPNQDRNYAYHTDAGLYAKFLRKLSEQHGAERIEGMIDKVNVNQQNGFIDSLTLADGTVIEGDLFIDCTGFKGLLIEQALHTGYENWNHILPCDSAIAVQTKQTKALVPYTRSIAHDSGWQWQIPLQNRMGNGLVFCSQYMSDDQAKALLLANIEGELINEPRVIKFQTGTRRKHWNKNCVAVGLASGFIEPLESTSIHLIQQSIVRLMQNLPTKAMDAGVVDNFNQKMRTEINNIRDFIVLHYHVTERTDSEFWRYCKNMEVPNSLQQRIDLFNQSGQVYKNDLELFGESSWLQVMIGQGLMPQSYHPIVDNMPDDQLAKFLDSIETGVKRRADNLPNHVDFINHYCRAPNSLV

SEQ ID NO: 83394 - protein, 495 aa, Pseudoalteromonas sp.
  REGION 1..495: note = tr|A0A2D5SXP2|A0A2D5SXP2_PSEAS Tryptophan halogenase; OS = Pseudoalteromonas sp. OX=53249 GN=CMK64_00775 PE=4 SV=1
MKLEKIVILGGGTAGWMTAAALSKHFANKVEITLVESEQIGTVGVGEATIPTIRRFYQQLGLSDKTVIAKTNATFKFGIEFVDWQKSGHSFIHPFGLFGQGTPSLDFHHYWLRARTHDSTIDLQDYSLGVQLAKNNKVLMPNKPQNQLEVFDWALHFDAALFARLMRETAETLGVNRVEAKVKSVQKSKEDIGALILESGELISGDLFIDCSGFKAELIGKALEVDYLDWSNYLLCDSAIAVQTEKTGEISNKTISKAKSAGWQWRIPLTTRMGNGYVYSSKHINDEDAELEFLSSLEGDMTTALRKFKFTPGRRANAWQSNCVSIGLSSGFLEPLESTSIALIETAIAKLIDLIPDNQISSDTAKKFNYATALEYERVRDFIIMHYVLSQRDDTQFWLDCRNVSIPETLKSKLQNYEQNAELKPLPWDIFGKDSWLALLDGLGMYPRKYNERANNMPIEYLQKHLAFMKQEIDNLVGKGVEHERFLREEINLNE

SEQ ID NO: 83395 - protein, 424 aa, Shewanella loihica
  REGION 1..424: note = tr|A3QIT9|A3QIT9_SHELP Tryptophan halogenase; OS = Shewanella loihica (strain ATCC BAA-1088 / PV-4); OX = 323850 GN=Shew_3521 PE=4 SV=1
MTPFAQTAAQTDHYDVIVIGAGPSGSVAASLLHQQGKRVLVLEKQHFPRFSIGESLLPCCMQVIAEANMLDAVNQAGYQFKNGAAFNANGRSTYFDFTDKFTPGPGTTFQVERGDFDKLLADTAASQGVEIRYGQRVDAVDLSHNPRLTISDEQGASYELSADYLLDASGFGRVLPRLLDLERPSNLPSRTAIFTHIQDNIDSVDMGDYHFDRNKILISVHPDNRDIWYWLIPFSNGRCSLGVVGEPHLLGQDADLEATNLEATLIRLVREEPRLKQLLSRAEIIRKPAKLAGYSANVSTLASDKFALLGNAGEFLDPVFSSGVTIAMQSASIAAKCVVKQLNGESVDWQTEYAQPLMRGVDTFRTYVQAWYDGRFQDVIFYQDPNPKIKQMICSILAGYAWDESNPFVAESERRLNMVVELCR

SEQ ID NO: 83396 - protein, 520 aa, Pseudoalteromonas atlantica
  REGION 1..520: note = tr|Q15QQ6|Q15QQ6_PSEA6 Tryptophan halogenase; OS = Pseudoalteromonas atlantica (strain T6c / ATCC BAA-1087) OX=342610 GN=Patl_3276 PE=4 SV=1
MSNRSIKNIVVVGGGSAGWLTAGIIAAEHQCGSQQSKICVSLIESPDVDIIGVGEGTWPSMRNSLQRMGISETEFIRHCGAAFKQGSKFVGWKNGADNDFYYHPFVIPSGYGKANQYSAWKTYASEHPFADVVCAQSHICQAGLAPKQNATPEYAGVLNYGYHLDAGKFGQLIQQHCVAKLGVRHIQDHVEGVISHDDGDIKALQTRQSGELTGDLFIDCTGARSLLLGQHFNVPFIDKSDVLFNNSAMALHVPYTNDDDPIVSATVSTAQEAGWIWDIGLQDRRGVGYTYSSKHTDDEQAQRTLKAYVAQSIGPERANALKARKINFEPGHRSHFWHKNCVAVGLSAGFLEPLEASALALVELSATAIAENLPVTTDHMKVTQDNFNRRFLLHWENIVEFLKLHYVLSARSEPYWHQMRAPESISPRLSSLLTQWRFQPPSRNDFVQNEIMFPSASYQYVLYGMGFETLNDVSSREFDTPQSAVKHLQENQQHVRKLMAGLKSNRQLLSHVKQYGFQKV

SEQ ID NO: 83397 - protein, 530 aa, Umezawaea tangerina
  REGION 1..530: note = tr|A0A2T0SVJ0|A0A2T0SVJ0_9PSEU Tryptophan halogenase; OS = Umezawaea tangerina OX=84725 GN=CLV43_110229 PE=4 SV=1
MEDRRIKNVVVLGGGTAGWMTASYLGKALGPAVKITVLEAPSVPRIGVGEATVPNLHKVFFDFLGLAEEDWMRECNASFKMGIKFTNWRTGGRGDANPRPYRDTTDHYYHLFGLLPNHENEPLSAYWSHKRLTGQTTEAFDYACYREPPILDAKLAPRFADGTKWTNYAWHFDAALVAEFLRKFATNKQGAIHIQDEFIDADVDTRGHVTALNTKGGRKIEGDFFVDCSGFRALLINGVMREPFLDMSDHLLNDRAVATQVPHDDEANGVEPFTGSIAMTNGWTWKIPMLGRFGTGHVYSSRFTTQDAATQEFCDMWGLDPSEQKLNHIKFRVGRNRRTWVRNVAAIGLSSCFLEPLESTGIYFITAALYQLAKHFPDKNFDPIFADRFNAEINTMFDDSRDFLQAHFSLAARNDTEFWRACKDLVLADDIKEKIRMYKAGLPINMPVTDESTYYGNFDAEFRNFWTNASYYCVFTGLGFDPQQTLTKLTHHPSMLDSAEHVFADIKRKQAELLKTLPTTYDYLKQLHAK

SEQ ID NO: 83398 - protein, 527 aa, Pseudoalteromonas atlantica
  REGION 1..527: note = tr|Q15PK1|Q15PK1_PSEA6 Tryptophan halogenase; OS = Pseudoalteromonas atlantica (strain T6c / ATCC BAA-1087) OX=342610 GN=Patl_3685 PE=4 SV=1
MLECNTQCSTLVTTRINSFMSKAVKKIVIVGGGTAGWLTAAIVAAQHRTDDNNGLQILLVESSDIPTVGVGEGTWPTMKNTLQQIGLKESEVFARCHAGFKQGGKFVDWVHGNGDFYYHPFTVPLGYGRIDLAPYVENIENYAVESNFQHHVCEAGLAPRSMAEAEYKGQCNYAYHLDAGEFAEVLKGHCKNALNVTQIIGTVDKVNLTEDGAIGSITLTNHKQIEGDLFVDCTGFASLLLGQALDVPFISADKVLFNDSALALHMPYEDPTSPIASHTIATGQNAGWIWDIGLTHRRGVGHVYSSQYLSDDEAEANLRRYLGPRSDDIPVRKISFKSGHRAQVWKKNCVAVGMAAGFVEPLEATAIMLVEISARFIADNIPPDTRLTPIIEKRFNQQMAYRWSRIIDFLKLHYMLTKRPEPYWQAHTDPDSIPESLQEDLALWKFRGPITADFDAAIELFPAASYQYVLYGMGFKPDFSRQPHLYNEQGNAQKIIHRNQQLTQQLLQTLPPHREYIERWLSTQSMR

SEQ ID NO: 83399 - protein, 510 aa, Pseudoxanthomonas sp.
  REGION 1..510: note = tr|A0A1H7RN05|A0A1H7RN05_9GAMM Tryptophan halogenase; OS = Pseudoxanthomonas sp. GM95 OX=1881043; GN = SAMN05428989_2065 PE=4 SV=1
MSVSSLRNIVIVGGGTAGWMAAAALSRVLGPTYNVTLIESEQIGTVGVGEATVPHIKAFNNLLGLNEAEFVRQTQGTFKLGIEFVDWRRKGASYIHGFGTEIGHMLGLLPFHQYWIKAHHAGWAKPLGQYTLNTIAAPRGRFMTSASDVPPQSPLANIAYAYHFDAALYARFLRGYSEQRGVRRVEGIVESVQQHSESGDVLSVRLQDGIEITGDLFIDCSGFRGLLIEQTLHTGYHDYTRWLPCDRALAVPCEKVGPPMPYTRATAREAGWQWRIPLQHRTGNGYVYSSAHLSDDEAAATLLANLDGKALGDPRPLRFTTGRRKACWNKNVVALGLASGFMEPLESTSIHLIQSGISKLLELFPREGISPVLVQRYNDRLAFEFERIRDFLVLHYNATERDDTSFWRQCRDMAIPAELQDTLDLFRDSGRFYRNGDEMFAEISWVQVMIGQGIVPRGYHPLVDQVPEADLRGFMASVEKTLSHCADAMPGHQQFIDRYCAAAPMQMSAA

SEQ ID NO: 83400 - protein, 510 aa, Streptomyces rimosus
  REGION 1..510: note = tr|A0A0M9XEE8|A0A0M9XEE8_STRRM Tryptophan halogenase; OS = Streptomyces rimosus subsp. rimosus OX=132474; GN = ADK43_23050 PE=4 SV=1
MGERAVANSANAGNPANPETYDVVIVGGGPAGSTLGALVARQGHRVLILEKEFFPRYQIGESLLPSTVHGVCRLTGVADDLAAAGFTRKRGGTFRWGATPEPWTFSFSVSEHMAGPTSYAYQVERSKFDEILLRHAGRCGAEVREGCAAADVIADEERVRGVRYTDADGAEREAYGTFVIDASGNKSRLFQRVGGQRTYSEFFRSLALFGYFEGGKRLPEPNSGNILSVAFDSGWFWYIPLSPTLTSVGAVVRREMAEKIQGDQEEALRALIAECPLISEYLANARRVTTGQYGQLRVRKDYSYHQTTFSRPGMLLVGDAACFVDPVFSSGVHLATYSGLLAARSINSVLAGLVDEAVSLREFEARYRREYSVFYEFLLSFYEMHHSEQSYFWRAKKVTHHKRSEMEAFVDLVGGVSSGETALTDADAMAERLRADSAEFAGAVDQLAHSEDGSMLPLFKSSVVSQVTREGSQVQMRALLGADAEPETPLLPGGLVSSPDGMFWLPASSG

SEQ ID NO: 83401 - protein, 550 aa, unidentified
  source 1..550: note = Unknown
  REGION 1..550: note = tr|A0A2E5AS20|A0A2E5AS20_9BACT Uncharacterized protein OS=bacterium OX=1869227 GN=CL660_00195 PE=4 SV=1
MQVNNVVIVGGGTSGWMTCAALLKLCPWVNVVLVESAKSKPVGVGESTLGHFNKYLRALDLEDSDWMPYCNATYKNSIQFTDFADIGKTFQYPFGEYNFNHGNINGIEDWFDLKKKYPEEFTNDDEGISFAKYWNTVNTELALKNKESDAFGDFNPGSDRAYHLDAEKFGEWLRINICEPWAEVDRFTHVIGDVRGMVKDVKRGGSPAASNREIKQLAVRLSEDKKTVGVQGDLFIDCTGFKAALIEGIHNINFKPFKDILANDKAFFARVPYNNQEERVKLMHNVTDCTAAQNGWFWNIPLWNRIGVGYCWSSRFALETETRAEFERYIEEEFGADLEEVEIKLIDIKHGYREKAWELNCVAIGLSYGFVEPLESTGLLTTHENVLRLVDILNRRRGYITNIERQWFNYNVQREVIGFSKFVAMHYALSTRTDNPYWRWCTQRNDYMFDEFDGNIKVNDNFERMGSILDLVEPLSSNMNGMNYVAAGMGLNLGNRIQLNNQEPFDILDQVKADRKEWFAEVEKYVEGCPSHYQYLLDNVYGGVDDVQLP

SEQ ID NO: 83402 - protein, 492 aa, unidentified
  source 1..492: note = Alteromonadales bacterium
  REGION 1..492: note = tr|A0A2N0WQ54|A0A2N0WQ54_9GAMM Tryptophan halogenase; OS = Alteromonadales bacterium alter-6D02 OX=2058087; GN = CW748_10045 PE=4 SV=1
MMSKKITIVGGGTAGWMSALIFNHLWQDKGFKIELIESSEISTVGVGEGSTPALKVFFDKLGIDEHEWMSQCSATYKCGITFKNWSTIPDFNSYHHPFPNELDNRYLSTFTQHCQRRLQGENVFAHPDEFFLATQLSQQSLSPIAQHSFPFEQTYGYHFDATLLGQFLAKKAQQRGIIHTKATIEHVSLNPTNGNIKTLHTSDGQAIDGDLFVDCSGFISLLMTKALGVDFHSYQELLFNDKAIAIPTSLEQPISSQTVSTALNNGWAWKIPLTNRQGNGYVYSSSYCDSDQAETELRAHLGILDCDIEARHLSMKVGRLTKHWHKNCLAVGLSQGFIEPLEATALLLIQQTAAIFAQYWEKSEWQDSQQQAFNQRINDLFDGVKDYIVAHYKTNTRNDTQYWRDNQLGLDKISPSLQHILQCWQQGGDLSKELKRQNIEQYYPNMSWYCLLAGMGIFPNQQSLRDARPNIELATIQDFFKRCALNFPTHQP

SEQ ID NO: 83403 - protein, 520 aa, Xanthomonas campestris
  REGION 1..520: note = tr|B0RXY9|B0RXY9_XANCB Putative tryptophan halogenase OS=Xanthomonas campestris pv. campestris (strain B100) OX=509169 GN=XCCB100_4156 PE=4 SV=1
MHAPAPSESQRLVRRVVIAGGGTAGWMAAAALSKLLGRQLQITLVESDEIGTVGVGEATIPSLVTFHRLLEIDEAQFMAATQATFKVGIAFEHWRDVDRHYIHSFGHTGTDHWSAGFQHFWLKAHARGVARDFGDYCLELRAAQEGRFAHLPNGGMNYAYHLDAGLYARFLRRFSEGFGVQRIEGRIGSVQTDAHSGDIAALVLDDGTRIEGDLFLDCTGFRALLIGQTLGVGSEDWSRWLFADSALAVQTESVGAPVTFTRARADRAGWMWRIPLQHRVGNGIVYSSRYTDQDSAAQVLEHNLQGRALTTPRALRFTPNQRHRVWEKNCVALGLASGFLEPIESTNIHLIQRGIVRLLQTFPQVIDPVDIAEYNRQAAEEIAHIRDFVILHYHATDRRDTAFWRDCASMEIPDSLRHRMELFRQSGRVFHQGNELFAENSWIQVMLGQGIVPRHHHPVADLMGDAELSQFLEGIRQRVEATLARLPPHAEFLRRYCPAPAPPAPMPQPAPGTPLAAPAA

SEQ ID NO: 83404 - protein, 497 aa, Pseudoalteromonas sp.
  REGION 1..497: note = tr|A0A2E2M0P0|A0A2E2M0P0_PSEAS Tryptophan 7-halogenase OS=Pseudoalteromonas sp. OX=53249; GN = CMK69_11940 PE=4 SV=1
MKPIKHVVIAGGGTAGWIAAALLNKVLGKVINITLIESTHIGTVGVGEATIPPIMQLNNALGINEQHFINATNATIKLGIEFENWKSSAHSYMHAFGTLGKNFPFCDFYNFWLKGQTQGCKDDFWDFSLNYQAAKNNKFAPLNTISNTSLPGLSYAYHFDASLYAEFLKHLATERGVKHLDAKINEVMQCPTSGNIQSLTLDDGSSISGDLFLDCTGLRALLIEQTLNTGYVDWSHYLPCDSAIAVQTASNDELKPYTRSIAHSAGWQWQIPLQHRMGNGLVYCSRHISDDDAKQLLLNNLPAEPITEPRLIKFKTGRRLKQWHKNVVAIGLSSGFLEPLESTSIHLIQSAVTRLIKLFPRHGVSDALVTEFNKQSITEIEHIRDFIILHYKLTEREDTPFWRQCKQMEIPQSLAHKMDLFKQTGKVVRENDELFAEVAWQQVMIGQGLLPDDYGALADSLTNEQLAELFSNLKTLINSTVEQLPSHTVFLSSLKPK

SEQ ID NO: 83405 - protein, 477 aa, Streptomyces sp.
  REGION 1..477: note = tr|A0A429C0A4|A0A429C0A4_9ACTN Tryptophan halogenase; OS = Streptomyces sp. WAC 05977 OX=2203208 GN=DMC63_19745; PE = 4 SV=1
MSSPQYDVIVVGGGPAGSTVSTLVSKAGHRVLLLEKEKFPRYQIGESLLPATVHGVIPILGVEKEVAEAGFTIKRGGTFKWGKRPEPWTFEFAVSSKMPGPTSFAYQVERMKFDDILLRNARKHGVEVREESSVVKAITDETGRVRGVHYKDSDGKVHEVFARYVVDSSGNTSRLFKASGAERHYSPFFRNLALFTYYEGAGRLPEPNAGNIFSVAFEHGWFWFIPLRPNLTSVGAVVHQDSAELVQGDPDEAMRRFIDACPRIKDILGDAKRITEGPYGSYRVRKDWSYCNSRFSGPGMVLVGDSACFVDPVFSSGVHLATYGGLLAARSINGCLAGTVDEDAAFAEFEKRYRREYGLFHEFLIGFYDMNKSEDSYFWQARKVSESASNDVEAFVELVGGVASNDLRLTADDLAATVESVEHKPGGAANGTVLTRMLKAGAGLQGRALLGSRSGEGAALEPGGLRASDDGLSWVRS

SEQ ID NO: 83406 - protein, 507 aa, Shewanella livingstonensis
  REGION 1..507: note = tr|A0A3G8LQE1|A0A3G8LQE1_9GAMM Tryptophan 7-halogenase OS=Shewanella livingstonensis OX=150120; GN = EGC82_00935 PE=4 SV=1
MAKAIKKIIIVGGGTAGWLTAAIIASHHKSHTSHDLKIILVESSDIPTVGVGEGTWPTMKNTLQQIGLSESEVFKACNATFKQGGKFVNWVHGNGDFYYHPFTVPLGYGRLDLAPYIDNIKDYAQQTNFQHAICESGLAPRSMAEGEYQGTCNYAYHLDAGAFADLLKQHCKSKLAVEHVIGTVEQAHVDNQGNISHISITNQNSIDGDLFVDCSGFASLLLGKTLNVPFVKLDHVLFNDRAIAMQVPYSNPHSPIASHTIATAQDSGWIWDIGLTHRRGVGHVYSSRFMTDEQAEANLRRYIGPQAEGLSVKKISYQSGHRERYWQNNCVAVGMAAGFVEPLEATAIMLVEISARYIADNLPVNDTIMALTAKRFNQQMTYRWGRIVDFLKLHYMLTKRPEPYWQAHCNPDSIPQSLQDDLSIWAYRGPTSKDFNGPNELFPAASYQYVLYGMEFSPDYSQHAHLYQQHAQASQILNRNVQLTQQMLNTLPPHRDFIEQWLTHSQQ

SEQ ID NO: 83407 - protein, 507 aa, Shewanella livingstonensis
  REGION 1..507: note = tr|A0A3G8LVY0|A0A3G8LVY0_9GAMM Tryptophan 7-halogenase OS=Shewanella livingstonensis OX=150120; GN = EGC82_12745 PE=4 SV=1
MDQTIIKNIVIVGGGTSGWMTAAMLAKLFKTQLNITLIESDTIGTIGVGEATIPPLQIFNSVLGISESDFIKATQATYKLGIKFENWHQQGDAYMHAFGNVGRDLGFTSFHHYWLSAQANCSQQNQSSFNANDFWQYSLNYQAAKHNKFQPIQSIAQAQMSGITHAYHFDASLYANLLRQYSIQRGVTRIEGTITSTQLTNDGSIDSVTFQNGRCISGDLFIDCSGFSALLIEKALGVEYQNWQHWLPCDSAYAVPCESTSPLTPYTKATAHDAGWQWRIPLQHRTGNGIVYSSKHMSDEQAKQHLLANLDGKPLAEPRKITFTTGRRVKQWHKNCVAIGLSSGFLEPLESTSLHLVQSAIIRLTKLFPRNGIQAQHIDEFNRQSQTEFEQIRDFIILHYHLNAKQSAGGEHGLWQQCRDMDIPASLQRKIDLFSTTATVFRHQDELFTEAAWIQVMLGQGIIPLDYHPLTQAVSQVDLTDYLSNIRKVIATTVNQMPTHEAYIKKC

SEQ ID NO: 83408 - protein, 510 aa, Massilia sp.
  REGION 1..510: note = tr|A0A0L6VY16|A0A0L6VY16_9BURK Tryptophan halogenase; OS = Massilia sp. WF1 OX=1406431 GN=AB595_22500 PE=4 SV=1
MKNETLTPLKNIVIVGGGTAGWMTAASLSRLLQNRYAIRLIESDEISTVGVGESTIPMIRLFNTALGINEDEFMRETRATFKLGIEFEDWGRLGERYMHGFGTFGQPLWTLEFFQYWLRAWQMGKAPDLERYSLNRMAAKAGKFMRPSTDMPNSPLADIPYAFHLDAGLYARYLRNYAEHHGVVRTEGKVVDVRQRADGFIDSVVMENGETIAGDLFIDCSGFRALLIEQTLKTGFEDWSHWLPCDRAWAVPCELAGDLPPYTRASARPAGWQWRIGLQHRTGNGHVYASRFMSDDEAAAILMRNLDGKALADPKMLRFTAGKRKKTWNKNVVAIGLSSGFLEPLESTSIHLVQSTVSRLVGFFPDAGFNQADIDEFNAQCDFEVERIRDFIILHYHATERNDTPFWDHCRTMEIPETLRRKLELYKSHGRVVRENNELFAEVGWQQVLHGQGVRAQGHHPLAGLLDEKELQDFLGNIEQVIGKCVDVMPAHKDFIAAIVAAGRPGTARR

SEQ ID NO: 83409 - protein, 531 aa, Pseudoalteromonas atlantica
  REGION 1..531: note = tr|Q15UF6|Q15UF6_PSEA6 Tryptophan halogenase; OS = Pseudoalteromonas atlantica (strain T6c / ATCC BAA-1087) OX=342610 GN=Patl_1964 PE=4 SV=1
MQQSNPIKHVVIVGGGTAGWLTAGLLAARLSSRINNDELTITLCESPDMPTIGVGEGSWPTLRSTLHTIGISETDFIRQCNVSFKQGSRFMHWDNEIASQYDHPFDVPEQANQGAQAQHWLYTNKHVPFSHAYCLQSALANQHLAPKLITIAEYSGFANYGYHLDAGLFATLLRQHCVNHLQVKHIFAKVKHVIQESNGDISGLQVVEAEGETEAIPTNNGALSHLTGDLFIDCTGFSALLLGQTLGVENTSVEDVLFANNAIATHVPYATDQDPIESFTLSTAQDNGWIWDIGLPNRRGVGYVYSDRYCDDESAKDALLQYIRRRHKDTDSLTFKHIRFTPGYKQQFWKNNCVAIGLSAGFIEPLEASAIVLVEMSANMLAEQLPVTRQSMDIVAERFNQTFTYRWQRIIDFLKLHYVLSKRTSAFWQDNRAERSIPASLKKLLLMWRHKVPDFADFPARDEVFQAASYQFVLYGAGFKTKLLCTPDPRILEASEQLLSSIQGFTAQLSNKAISNRALINKIHQFGLQKF

SEQ ID NO: 83410 - protein, 511 aa, unidentified
  source 1..511: note = Shewanella bicestrii
  REGION 1..511: note = tr|A0A220UJQ0|A0A220UJQ0_9GAMM Tryptophan halogenase; OS = Shewanella bicestrii OX=2018305 GN=CF168_05240 PE=4 SV=1
MKIKRIAIIGGGTAGWLAANHLGAELCHDPEIEITLIESLDVPTIGVGEGSVPYLAKGLKRFGISEAEMLLTCDATFKQGIKFVNWLDPERHGEYHYYHSFDTPYPAGVDVSNYWLANAADRPFDDVGIQARICELGLSPKRKGSGDYEGALSYAYHFNALKFAGLLANNAKSRFNVKHQFATIKGAEICQSGRITHLVTADDASLAFDFYVDCSGFASILIDKTLKVPFVSKANELLTDTVLVQQVALGGDEEINPYTTATAHKAGWIWDIPLTTRRGTGFVYSSRHMSDEEALGLYADYLSIDKAQFNPRKIPMKVGYRETFWHQNCVALGLAQGFVEPLEATSILVSDFSAELLARNFPRHLEDIDVLTPHYNQVTTYVWERVVDFIKLHYCVSDRTDSDFWLDNKKSETISEELHQRLARFALRPPHASDFFGRFELFDHKNFLYVLYGMKFNTVATVLSAQEVQHCDALMKGNDQLVVKAASMLLKHRDWLEGLKQAFEQARSTKV

SEQ ID NO: 83411 - protein, 506 aa, Alteromonas sp.
  REGION 1..506: note = tr|A0A4V2I415|A0A4V2I415_9ALTE Tryptophan 7-halogenase OS=Alteromonas sp. KUL17 OX=2480796; GN = KUL49_04345 PE=4 SV=1
MQDPHNNPVKRVVIAGGGTAGWLAASLMKKVLGKAVDITLVESEAIGTVGVGEATIPPIRLVNQVLGIDEAQFLHDTKATIKLAIRFENWKAKGESYYHTFGAPGKSMAFCHFHHYWVKARQQGLKDDLWDFDLNYHAAEAGRFAQINAKAPVVELPFAYHFDASLYAQYLRKLSENMGVVRKESKISRVQRFTHSGFIQALHLESGDVVEGDLFVDCTGFKGLLIEEALGAGYDDWSHLLPCDSAIAVPSERHEKTAPYTRSIAHDAGWQWRIPLQHRNGNGHVYSSRYISDDQACDTLLSNLDTKPLGDPKLIKFTTGRRRKQWYKNVVAVGLSSGFLEPLESTSIHLIQSAIVRLIQLFPHNGFAPSLETEYNKQSELEFEQIRDFLVLHYTVNERTDSVFFNDMRNITLPDSLAHKIALFKESGNLLREQNDLFLESSWLQVLYGQGITPKDYHGLVNSVPEVQLNQMLTRLLEIKKEPIAKLPTHDEYINGMVAKYKRAMS

SEQ ID NO: 83412 - protein, 388 aa, Nonomuraea sp.
  REGION 1..388: note = tr|A0A5D0QQD6|A0A5D0QQD6_9ACTN Tryptophan 7-halogenase OS=Nonomuraea sp. PA05 OX=2604466; GN = FXF51_00890 PE=4 SV=1
MTAQDAGVQEVDVIVVGGGPSGSTLASLVAMQDHRVLLLEKETFPRYQIGESLLPSTVHGVCRLIGVTDELARAGFTVKRGGTLRWGANPKPWTFLFSVSPKMAGSTSFAYQVERMKFDKILLDRARELGVRVREQCSVTDVLTAPDGRVHGVRYTGPDGAETEVHAKYVVDASGNRSRIHNKVGGTRKYSEFFRSLALFGYFEGGKRLPAPNSGNILSAAFESGWFWYIPLSDTLTSVGAVVARDMAHRIQGDPENALKTLIQECPEVSELLDGATRVTTGEYGQIRVRKDYSYHQTRFWRPGMVLVGDAACFVDPVFSSGVHLATYSALLAARSINSVLAGRIGEQAAFDEFERRYRRGYGPRAGAPGGNRPSEAAPPRLRRLEHS

SEQ ID NO: 83413 - protein, 521 aa, Xanthomonas arboricola
  REGION 1..521: note = tr|A0A2S7A4Q8|A0A2S7A4Q8_9XANT Tryptophan halogenase; OS = Xanthomonas arboricola pv. guizotiae OX=487867; GN = XarbCFBP7409_06920 PE=4 SV=1
MPDTTPSDPQQRPVRRVVIAGGGTAGWMAAAAVSKLLGRHLQITLVESDEIGTVGVGEATIPSLVTFHRLLEIDEAAFMAATQATIKLGIAFEHWRDVDRHYIHSFGHTGTDHWSAGFQHFWLKGRQRGIARDFGDYCLELRAAQEGRFAHLPNGGMNYAYHLDAGLYARFLRRFSEGFGVKRIEGRIGQVETDAESGFLTALTLQDGTRVEGDLFLDCTGFAGLLIGKTLGVGSDDWSRWLFADSALAVQTEAVGTPVPYTRSRADQAGWMWRIPLQHRVGNGIVYSSRYMDQDGAAQVLQRNLRGRALTQPRALRFTPNQRHRVWDKNCVALGLASGFLEPLESTNIHLIQRGIIRLMQTFPQVINAVDIAEYNHQAAAEITHIRDFVILHYHATDRRDTPFWRDCAAMDIPDTLRHRVELFRQSGRVFHQANELFAENSWVQVMLGQGITPKQHHPVADLMGDAELRHFLETIRTRVDAALARLPAHADFLRRYCPAPPLPEPATRLPADAALATGVR

SEQ ID NO: 83414 - protein, 532 aa, Streptomyces sp.
  REGION 1..532: note = tr|A0A429TFT1|A0A429TFT1_9ACTN Tryptophan 7-halogenase OS=Streptomyces sp. WAC07149 OX=2487425; GN = EF910_11435 PE=4 SV=1
MTGTDSRIQKVVILGGGTAGWMTAAYLGKALQGTVDITVLEAPAIPRIGVGEATVPNLHKVLFDYLGIAEEEWMRECNASFKMAVRFVNWRTGGQGQPDARELENGGPDHFYHPFGILPDSDNVPMSHYWAKRKLEGQTEEPFDYACFREPPVMDAKKSPKWLDGTPSTRYAWHFDAALVADFLRRFATEKQGVNHVQDEMTHAEKDERGFIKALHTKAGRVLDADLFVDCSGFRGLLINQALEEPFIDMSDHLLCDSAVATAVPHDDEANGIEPYTSAIAMSSGWTWKIPMLGRFGSGYVYSSKFTTKEEATKEFSALWGLDPETTKFNHVKFRVGRNRRAWVNNVVSIGLSSAFLEPLESTGIYFITAAIYQLAKHFPDRTFNPELANSFNHEIEVMFDDTRDFIQAHFYYAPRNDTPFWRANKELTLPKNIQEKISAYKAGLAINSPIADESTYYGNFEAEFRNFWTNGSYYCVFAGLGLEPDAPLPILAHKPDSVAGAEALFGKVKQEQNHLLDTLPSTYDYLRKLHG

SEQ ID NO: 83415 - protein, 516 aa, Streptomyces sedi
  REGION 1..516: note = tr|A0A5C4VBY7|A0A5C4VBY7_9ACTN Tryptophan 7-halogenase OS=Streptomyces sedi OX=555059 GN=FH715_03280; PE = 4 SV=1
MVNKVVIVGGGTAGWMTASYLKAAFADRIDITLVESSRVSTIGVGEATFSDIRHFFAFLGLKESDWMPACNATYKLAVRFENWREPGHHFYHPFEQMRSVNGFPLTDWWLKEKPSARFDTDCFVMPSIIDAGLSPRHTDGRLIDQPFDEEAEEMQGLTMSEHQGKTQFPYAYQFEAALLAKFLTRYSTDRGVRHIVDDVNHVELDERGWISGVRTAEHGELTGDLYIDCTGFRALLLNKALDVPFVSFQDTLPNDSAVALQVPMDMERRGILPCTTSTAQDAGWIWTIPLTGRVGTGYVYAKDYLSPEEAERTLREFVGPAAADVEANHIRMRIGRSERSWERNCVAVGLSSGFVEPLESTGIFFIHHAIEQLVKNFPGDEWSDVHRDLYNRSVEHVMEGVREFLVLHYVAAKRNDTQYWKDTNTRVIPDALAERIENWKRVLPDSENVFPYYHGLPPYSYMCILLGMGGIDLHHSPGLDLSDTAAARREFAAIQDKAAGLTKVLPKAYDYFTRLD

SEQ ID NO: 83416 - protein, 502 aa, Pseudoxanthomonas sp.
  REGION 1..502: note = tr|A0A1H7W7X3|A0A1H7W7X3_9GAMM Tryptophan halogenase; OS = Pseudoxanthomonas sp. GM95 OX=1881043; GN = SAMN05428989_3265 PE=4 SV=1
MDDTASVSKPVRRVVIAGGGTAGWMAAAALSRTLGKVLDITLVESEEIGTVGVGEATIPTMITFHRLLDINEQEFMAATGATIKLGIKFEGWRDVGQDYIHSFGTTGKDHWTAGFQHFWLKGRARGLARDYGDYCLELRAAEENRFAHLPRGGMNYAFHLDAGLYAKFLRRFSEGFGTKRVEGKIASVDTSADGDIAALVMEDGTRVEGDLFIDCTGFRSLLLGQTLGVEFEDWSHWLFADSALAVQTESVKPAIPYTRSMAGTAGWQWRIPLQHRVGNGIVYSSRFMEREAAREALVGGLEAPPLFEPRLLRFTPGQRKVTWKRNCVALGLASGFLEPLESTNIHLVSRNLTRLLQSFPHVIRQVDIDEYNAQTETEMTHIRDFVILHYYVTNRRDTPFWRACAEMEIPATLRHRIELFRQTGRVFRVPNELFAENSWIQVMLGQGITPQQHHPVADLMEDPELSRFLGGIHGHVEQTVAKLPLHADYLKTYCPQARPVAA

SEQ ID NO: 83417 - protein, 502 aa, Rhodococcus sp.
  REGION 1..502: note = tr|A0A554R6Z8|A0A554R6Z8_9NOCA Tryptophan 7-halogenase OS=Rhodococcus sp. KBS0724 OX=1179674; GN = FFI94_029650 PE=4 SV=1
MSSRVDEVDVVVVGGGPGGSSAATLLAKGGHRVVQLEMEQFPRYQIGESLLPATVHGVCRLLGVEKEMEDAGFMRKRGGSFRWGKNPVPWNFLFAITPEFAGPTSYAYQVERMKFDHILLKHAQKCGVDVRQQSTVTGPILDDNGRVVGVTYTDVDGDVCEVRAKYVVDASGNKTRLTKHAGAERVYSDFFRNVALFGYFNGGKRFPEPDSGNILCAAFDEGWMWYIPLTDELTSVGAVIAKEHAAKIQGDPEHALAKFVKRCAIVDDMLSDATRVTDGVYGQIRTRKDYSYANTKFWGNGMVLVGDAACFIDPVFSTGVHLATYSAVLAARSINSVLSGELSEERAFGEFEGRYRREYAVFYEFLSSFYDMEQSEDSYFWKARRVTNFDGQDMTAFVSLVAGAYSQEDVLTDADAVVKRFSASTKALTDATVKTGGMDTDSGQRMNHLFATPVVREVMEEMNSLQARGASSSIQTPPPLLEGGLVPSPDGLAWVEPALVTR

SEQ ID NO: 83418 - protein, 540 aa, unidentified
  source 1..540: note = Oceanicola litoreus
  REGION 1..540: note = tr|A0A1N6IF22|A0A1N6IF22_9RHOB Tryptophan halogenase; OS = Oceanicola litoreus OX=1217970 GN=SAMN05444002_3796; PE = 4 SV=1
MGEPIREVTIVGGGTAGWMTALLLQSMLKGGPEGGVRITLIESPNIPTVGVGEATVPGMPRTLKQGGIDERTFFKTCNASFKLGVVFGHWNVDAEGKRVDYINPFAHPPAIDGVSAAEYALQFGTGGLDFVQCFSPAVDLAAQAKGPRGRGEMPGPPVGFAYHLDAGKFAGLLKEHCVARGVRHVLDDLVEVELDERGYVAALMLERGGRHGVELVIDCTGFRGLIINQALGEPFESYGKYLANDRAMAVQVPHRDPVRLDSVTKSTALGAGWAWRVPLFNRIGTGYVFSSAHRTDEEARAEFLAHLGPDGEGAEPRVIPMRVGRNRNAWVKNCVAVGLSGGFIEPLESTAIHMIDTAVRWLVQYFPDRDFADPLRRRFNHLVDELYNEVRDFICLHYALGNRTDDQYWIDARESLEVPDTLAENLELWQYGLPAVNDIRFVSLFSPATYQAVLLGKQVYESGFGKGKFCSGRTLDGAKWAAYLKRARAGIGAQVQAAAGHRELLRALRGDVVAENGLLPGLGGGPGAAGAGVSEDAAIL

SEQ ID NO: 83419 - protein, 537 aa, Shewanella loihica
  REGION 1..537: note = tr|A3QFB1|A3QFB1_SHELP Tryptophan halogenase; OS = Shewanella loihica (strain ATCC BAA-1088 / PV-4); OX = 323850 GN=Shew_2293 PE=4 SV=1
MSILSIAIVGGGASGWLAANHLGLALKGSSPKVSITLIESPDVPTIGVGEGTVPMIRKSLQAFGIEETALFRRCDASFKQSIKFINWRHRAPGSEMSAFHHLFDPPSPFGVDLSDFWLDGLAKGENPMGFDEALSPQRYSCEAQKAPKTLASAPYQGAHAYAYHFDAAKFAELLRENAIECFGVEHIQDHLLEVETGRLETGRRGTDSVETDMLTEGNESKNDKKIVALHLREGGRRCFDFYLDCSGFSGLLMEKALGVEFISLADKLWMNKALVTQVASAPNAPLPPYTQASAHQAGWIWDIALPKRRGVGLVYCDRYLSDDEARRKLKRYLGDELPSAGEFRSLTMRVGHLQKFWQGNCVALGLAQGFLEPLEATSILLTDFAASLLARKFPTDSETLPVLEARFNRIVGHAWQAVIDFVALHYQLSDRSDSAFWRDYRTHLSAQPASEELARRLALWQHFTPHPDDFFSQFEVFGVDNYLYLLYGMGFSTQPKALDDAARQQAWAQLDKIAHAKAFLAQKLPDHRAFIRALIQG

SEQ ID NO: 83420 - protein, 521 aa, Streptomyces sp.
  REGION 1..521: note = tr|A0A505DH06|A0A505DH06_9ACTN Tryptophan 7-halogenase OS=Streptomyces sp. NEAU-SSA 1 OX=2315329; GN = FGD71_010630 PE=4 SV=1
MSTQNPENVVIVGGGIAGSMTAAYLKAAFRERISVTLVEDESGSAAAENDETTLGDIRSFFDFLGLEEEDWMPACDATYKLAVRFQDWNRPEQHFYLPFEDTREVGGFPLTEWWLHNGPSGRFDRDCFVAAWLCDAGRSPRQLGGSPAGLGDASAGPDDAPAGWGGAAGPYGYHFEAGALARYLTGYAVGRGVRYLADEVLEVRLDARGWIEHVVTKEHGEIHGDLFVDCTGDRGLLLHKALKVPYVSYQDTLPNDSVVTLRVPTRMKARGIPPYTTVAARGAGWIWTIPLFSRIGTGYVYAREYCTPEEAERTLRESVGPEAAGVEADHAPLLVGRSLRAWQHNCVAVGAPGGRVEPLEATGASFVHHALEQLVRHFPAADWHPKLRDSYNASVSRVMDGAREFLALHYHGAARDHTQYWRDAKTRPVPDALAERIARWRVRPPGAELVPPYHQGLPPHAYASLLLGTGAIPLRPSTAITLVDDTAARREFAAVRDEAQGLVGTLPTPYEYITQMSLMSG

SEQ ID NO: 83421 - protein, 492 aa, Pseudoalteromonas atlantica
  REGION 1..492: note = tr|Q15MV0|Q15MV0_PSEA6 Tryptophan halogenase; OS = Pseudoalteromonas atlantica (strain T6c / ATCC BAA-1087) OX=342610 GN=Patl_4289 PE=4 SV=1
MQQDAIKKIVIAGGGTAGWMSAAALGKLFGKNIDVTLVESDAIPTVGVGEATIPTLHLFHDLLKIKESEFMAATNATFKLGIKFDDWYQKPQSYIHSFGRFNHGCWAAGFQHFWLRGKRLNIASEIGDYCPEHVACRMGKFATAPKQERNHAFHLDAGLYAKFLRNIAQQCGVERIEGKIDNVNLDHDSGFIQSLTLDNGHQIQGDLFIDCTGFRGLLIEQALNTGYEDWSHWLPCDSAVAVQTELNDETVPYTRSIAHQAGWQWQIPLQTRMGNGMVFCSKYISDDEAKTQLLSNIQGETLNTPRVLKFKTGVRRKLWNKNCVAIGLAGGFIEPLESTSIHLIQQSIIRLMQSLPTKKMEAALSARFNASMREEIDNIRDFIVLHYHATARKDSAFWRYCKDMPIPDSLQARMEQFAQSGHVYQGNGELFGEASWLQVMLGQGITPKAYHPIADLMPEQELAKFLASIKQQTERRVSQLPNHLDFIRYYCQ

SEQ ID NO: 83422 - protein, 502 aa, Sphingomonas parapaucimobilis
  REGION 1..502: note = tr|A0A0A1WAK1|A0A0A1WAK1_9SPHN Uncharacterized protein OS=Sphingomonas parapaucimobilis NBRC 15100; OX = 1219049 GN=SP5_080_00170 PE=4 SV=1
MTNDVVRVVIVGGGTAGWMAGAALTRLLSGQCSVRLIESEAIGVVGVGEATLPHIRSFNERLGIPEAEFMARTRATFKLGIEFRDWSRIGDSYIHPFGTFGRGTGAIDFHHYWSRLVREGRDLPPLDQLSYACTLAREARFEHPDQGRGGLSSTFGYAYQFDALLFAPYLRSLAEEAGAIRTEGLVVDVERDSQNGLIRAVVLDSGERVEGDLFIDCSGFRSLLLGQTLDEPFEDWSKWLPTDRAVAMPCRTETAVTPYTSAIAMPAGWRWRIPLQHRTGNGYVYASDFVSDADAAHALEKAVEGEKLAEPRLLRFKAGRRRRSWVGNCVAIGLASGFLEPLESTSIYLVQQAITALIELFPGRRMEASDRDEFNRVIDLEYDRIRDFLILHYHATSRDDSPFWNYVRTMPIPDSLGEKLELWRRRGRVVKYREGVFLDASWIAVYLGQGIVPEGWDPRADVAGTGDLVQAVAALRSEIAAEVAIRPDHRAFLERYCPMVAA

SEQ ID NO: 83423 - protein, 486 aa, unidentified
  source 1..486: note = Unknown
  REGION 1..486: note = tr|A0A2E5AXC4|A0A2E5AXC4_9BACT Uncharacterized protein OS=bacterium OX=1869227 GN=CL660_09145 PE=4 SV=1
MKEVSKLVIVGGGSAGWITASWFSRRWGSKMDVTIIDKYQPERVGVGEATLLSFPGVMQQMGFKVEDWINRIDATFKAGILFPGWGREDNVIWHPFGFTSIGDKKVPMYDIWTNYQDKYDIKDISPLYRTAMENKIELDYIKDTYAYQIDCGKLVTFLHDNCNKICNYIQSDVKTVVKVEDNVEKIILEDGSEITADIFIDCTGWNQLLIGKDNNVDLSDRLFIDAALAGRVKYENPDKEMHPYTDCQAMEHGWRWRIPTRSRIGTGYCFNKNITSPDEVAQQFSEHWNGRIKPEDMRLLDWKPQMLDKFWKGNVVSIGLSAGFIEPLESTGLAMMIRGCQYLEESLYGCIYNPVFEPDIYNIRMKASFETAVDYVNMHYAYCERKGKFWDYVRLSHEKSGMQILMEDQIQDPNRDTLQTDKISSFFGGTNWHIWLLQLMPEINKKTYWYPDTVDILSRFDNYREILDTSVKEATPQKILLKEMYG

SEQ ID NO: 83424 - protein, 509 aa, Pseudoalteromonas sp.
  REGION 1..509: note = tr|A0A2D5SXT0|A0A2D5SXT0_PSEAS Tryptophan halogenase; OS = Pseudoalteromonas sp. OX=53249 GN=CMK64_00770 PE=4 SV=1
MNNKLEKIVIVGGGTAGWLAAAALSQFYKNTQTQITLVESAEIGTIGVGEATIPPILNMLEGCGINLSDFMAHTDASFKLGIEFDGWKSQNERYFHPFGKFGQSIDGAEFYQAWLKAEFEGNATDIEAYSLESVLAKKDHFFVPTSNPNDHINRTSFALHLDAGLAVDYLRAFATAQGVQHIEGTVVDVMQCQETQFIQGIKLSCGEEIVGDFFFDCSGFKSLLLGETLGSEYDDWSDYLPCDSAIAVQTRRDHSKPLRPYTISKAQEAGWSWHIPLQTRTGNGYVFSSKFMDDEKAKEILLSTVEGEAITEPRLIRFKTGTRKQPWKHNCIALGLAQGFIEPLESTAIHLVAESLAMFAKLNPSKRCESSLQAAFNEKMVDQYVQIRDFLVAHYCYTQRDDSAFWIWCQNEMPKPPTLKKREQLFKELGSVIVASEELFQPTSWYAVLTGMGVKPSRYNGTIDSIPSAKINEFLAGGSAYFEQLASKQPSHADVVQTHCRSVLLNNEQ

SEQ ID NO: 83425 - protein, 497 aa, Shewanella livingstonensis
  REGION 1..497: note = tr|A0A3G8LWC1|A0A3G8LWC1_9GAMM Tryptophan 7-halogenase OS=Shewanella livingstonensis OX=150120; GN = EGC82_14780 PE=4 SV=1
MNKSVKKVVIAGGGTAGWMAAAAFSKLLGKNLDIVLVESDEIGTVGVGEATIPTLHIFHRLLGLKEQDVMAATNATFKLGIQFENWQDVNKDYLHSFGFLGKDCWACGFQHFWLKGQQQNMVSEIGDYCTEHLAAREGRFAVLPNQDYNHAYHMDASLYAKFLRKFAEQHGITRIEGKIADVLQHEDTGNIKALQLENGELIEGDFFLDCTGFKALLIEQTLNTGFEDWSHWLPCDSAIAVQTEAVQKPIPYTRSIAHPSGWQWRIPLQTRTGNGLVFCSKYLSDADATELLLNNIEGQPINQPRVIKFKTGTRRLHWNKNCVAVGLSAGFLEPLESTSIHMIQRSIVRLLQLFPSHGVIQADVDEFNQQTKIEMDNIRDFIILHYKVTDREDSRFWRYCKNMPIPASLQHRIEMFSQSGKVYKYGNELFGESSWIQVMMGQGLLPKEYHPIVDMMEEAELQSFLNSIKATVKRKVDTLPAHHDFVQHYCQSTAMQG

SEQ ID NO: 83426 - protein, 513 aa, Brevundimonas sp.
  REGION 1..513: note = tr|A0A1S6ET57|A0A1S6ET57_9CAUL Tryptophan halogenase; OS = Brevundimonas sp. LM2 OX=1938605 GN=BZG35_05160 PE=4; SV = 1
MRPGSDPSPHTLKHVLIVGGGTAGWMAAAALSRLIGNGITRVSVVESEEIGTVGVGEATIPPILSFNGLLGIDEAEFMRATQASFKLGIEFVNWDRTGDRYMHPFGGFGVDMEGVQFHQHWLRRRAQGDATPLWDYSLSTVAARADRFVKPGRDAPSALQTLKYAYHFDAGLYAGFLRRYAETRGVVRHEGRIVDVALRASDGFVEAVTLADGRRMEADLFVDCSGFQGLIIEKALHAGYEDWSHWLPCDRALAVPTGRVEPLTPYTRATAGSAGWRWRIPLQHRTGNGHVYCSAHISDDDARAELMAGLDGPPLAEPRALRFVTGRRRSAWVRNCVSLGLASGFLEPLESTSIHLIQSGVSKLMTMFPDDRFDPLLSAEYNRLSQLQFEQVRDFIILHYKATRRDDTPFWRQVRDMPIPDSLARKIDLFRATGRLFRYEDELFSEASWVAVLLGQGIVPQAYEPLADAVDGPLTDRRMDAIARVIRDIAADMPEHQAFIARYCGAPSAALAS

SEQ ID NO: 83427 - protein, 504 aa, Brevundimonas sp.
  REGION 1..504: note = tr|A0A1S6ESU9|A0A1S6ESU9_9CAUL Tryptophan halogenase; OS = Brevundimonas sp. LM2 OX=1938605 GN=BZG35_05515 PE=4; SV = 1
MAEPIKSVLVVGGGTAGWMAAAALNRSLGPHCAVTLVESDDIGIVGVGEATVPPIRDFNNLIGLDEAEFMRETQATLKLGIEFVGWGRQDNRYLHPFGTFGPGPTLSEFQQSFLALRAKGRIADDLEAYSLCAQACKAGKAGLRDPDPRSPFNGLFSAYHFDAGLYARYLRKVCESRGVQRIEGEIVDVVQRAEDGFVDRVRLKDGRELAADLFIDCTGFRALLIEGALKTGFEDWSHWLPMNRAWAVPCERVGPTTPFTRSTARPAGWQWRIALQHRTGNGHVYCSDFIDDDEARQILLDTLDGPALADPRPLRFTTGRRKTFWSKNVVALGLSSGFIEPLESTSIHMVQSGIYRLLQHFPDSRFSPVNIESYNRRLGAEVALIRDFVILHYHATQRDDTAFWRHMATMPIPDTLSQRVEAFRDRGLLYQSGADEYFSQGSWLAVMYGQGIVPTGHNPLYDLQNLDQVEAGFAQIAARWRDAVARMPEHDAFLKAQTMWSGTA

SEQ ID NO: 83428 - protein, 533 aa, Streptomyces sp.
  REGION 1..533: note = tr|A0A3D9WAK1|A0A3D9WAK1_9ACTN Tryptophan halogenase; OS = Streptomyces sp. Ag82_O1-9 OX=1938856 GN=BX279_3459; PE = 4 SV=1
MTDTDSRIRKVVILGGGTAGWMTAAYLGKALQGTVDIQVLEAPAIPRIGVGEATVPNLHRVLFDYLGIPEEEWMRECNASFKMAVRFVNWRTPGQGEPEARTLEDGRPDHFYHPFGILPDHDNTPLSHYWFKNKHEGRTDLPFDYSCFREPPAMDAKLSPKWLDGTPSTRYAWHFDAALVADFLRRFATDKQGVEHVQDEMVSVEQDERGYVTALHCKSGRVLEADLFVDCSGFRGLLINKALGEPFLDMSDHLMCDSAVATAVPHDDEANGVEPYTSAIAMSSGWAWKIPMLGRFGSGYVYSSKFTSQEEATREFCELWNLDPAETKFNHVRFRVGRNRRAWVNNVVSIGLASCFLEPLESTGIYFITAAIYQLAKHFPDRTFNPALVDSFNHEIEVMFDDTRDFIQAHFYYAPRNDTPFWQAQKKLTLPENIQKKIAAYKAGLPINSPIADESTYYGNFEAEFRNFWTNGSYYCIFAGLGLEPDAPLPALAHKPESVAGAEPLFEQVRQQQEHLLQTLPSTYDYLRRLHGK

SEQ ID NO: 83429 - protein, 516 aa, Pseudoalteromonas sp.
  REGION 1..516: note = tr|A0A0W1KWZ6|A0A0W1KWZ6_9GAMM Tryptophan halogenase; OS = Pseudoalteromonas sp. H103 OX=1761893 GN=ATS74_06965; PE = 4 SV=1
MTKPIKKIVILGGGTAGWLSAGLLAAEHPHLSVTLIESANVPILGVGEGTWPSMRNTLQRIGIKEIDFITQCDASFKQGSKFINWRNLSEEENYYHPFMNPQGYEHTNLHASWQRIAPTQKFADVVNMQSFVCQAALAPKQLQTPEYAAVTNYGYHLDAGKFAEFLKNHSVKNLNVTHITDDVTEVINDEKDYIASLKTNNNGNITGDLFLDCSGSRARLIGEHFKSEFIAQDHILFNNSAVAAQISNSHPTQNIASATLSTAQSNGWIWDIALPTRRGTGYVFSSKYQSDESATNTLKSYIAKSTSEQQAEQLNYRVLKFSPGYRQKFWIKNCVAVGMSAGFLEPLEASALAMVELSISMLSEQLPQNRTHMSQLETRFNDRFSTRWQRVVEFLKLHYVLSERDDTPYWQNIRDLTTAPERLKNLLKLWQFQPPSRFDFIENEEVFSSSSYQYVLYGMGFNTQTPRAQNAFTSAQAGDYFYQQNREKIAQYLKGLPSNRELLNYLLSNNRQPHND

SEQ ID NO: 83430 - protein, 543 aa, Shewanella sp.
  REGION 1..543: note = tr|F7RR98|F7RR98_9GAMM Tryptophan halogenase, putative OS=Shewanella sp. HN-41 OX=327275 GN=SOHN41_02903; PE = 4 SV=1
MQQATHTAINNIVIVGGGTAGWITAALLAAEHNVDKGQLAHSPKLNITLIESPDVATIGVGEGTWPSMRNTLDKIGISETEFIRQCDASFKQGSRFIHWQHDNTEPTKPFGSNQYLHPFSLPHGHQELDLCPFWLPHSDKVSFAHAVSNQDALTQLGLAPKTIATPEYHFQNNYGYHLDAGKFSQLLMQHCTEKLGVKYIRDHVTQVRSLANGDIEGLATKEHGVILGDMFVDCSGTKSLLLGEHFNVPFLCQKAVLFNDSALAIQVPYAEENSPIASCTLSTAQPNGWIWDIGLPTRKGVGYVYSSAHCSDDEAEQTLRAYLTNDKSTNPHYASSNALDSRKQEYRKLNINPGYHAKCWQNNCIAIGMAAGFIEPLEASALALVEWTANALAAQLPAHRGVMDTIAQRVNERYERHWQQIIDFLKLHYVVSRREVDDYWRDHRDSASIPERLQQQLDLWRYQAPSGHDISYKEPLFPAASFQYVLYGMGFNTALPTHIKPSQQQVAQRLFSENQQKINALSQSLPSNRDLLNKVRQFGFPKI

SEQ ID NO: 83431 - protein, 499 aa, Pseudoalteromonas sp.
  REGION 1..499: note = tr|A0A269PI02|A0A269PI02_9GAMM Tryptophan halogenase; OS = Pseudoalteromonas sp. NBT06-2 OX=2025950 GN=CJF42_23295; PE = 4 SV=1
MNTSKIQKVVIAGGGTAGWMSAVALSKLLGKNLEITLVESDEINTVGVGEATIPPIRTFHKLLGINEQELMKATQATFKLGIDFENWGQKDDTYIHSFGMTGKECWAGEFHHFWLHGKQKGIASDFGDYCLELQAAKAGKFALSQQAPLNFAYHLDATLYAKYLRSLCEKSKSNPTGVNRIEGKILHVNKHSTSGNISALTLETGLIIEGDLFIDCTGFIGLLIEKALHTGYEDWSHWLPCDSAVAVQTKSVSPALPYTRSIAHDSGWQWRIPLQHRVGNGLVFCSRYISDNEAIDTLLSNIEGETINEPRVIKFKTGRRRKGWNKNCIALGLASGFIEPLESTSIHLIMTGIIRLMRLFPFNGITQTYIDEYNSKLTSELNSIRDFIVLHYKVTNREDSLFWQHCKNMEIPESLQHKINLFTETGRVFLDDGDIFRVDSWTQVMLGQGLMPEQFHQIAQVMSDNEFKQFLSSLKSSVDNAVEQLPNHQEFIDKYCPAN

SEQ ID NO: 83432 - protein, 503 aa, Shewanella sp.
  REGION 1..503: note = tr|F7RRA1|F7RRA1_9GAMM Tryptophan halogenase; OS = Shewanella sp. HN-41 OX=327275 GN=SOHN41_02906 PE=4 SV=1
MTTAIKRVVIAGGGTAGWMAAAALTKLMGKHLDIVLVESDEIGTVGVGEATIPTLHIFHRLLGLKEQEVMAATNATFKLGISFENWQDINKNYLHSFGFLGKDCWACGFQHFWLKGKQLGMVSDIGDYCAEHLAARQGRFAVLPNQDYNHAYHMDASLYAKYLRKMAEQHGIHRIEGKIKQVLQHHDSGNIKALVLENDETIEGDLFIDCTGFRALLIEQTLNTGFEDWSHYLPCDSAIAVQTQSVGAPIPYTRSIARESGWQWRIPLQNRTGNGLVYCSKFISDEDATELLLANLEGEPLNKPRVIKFKTGTRRLHWHKNCVAVGLSGGFLEPLESTSIHLIQRSIIRLMQLFPSAGIVQSDIDEFNQQTKLEMDNIRDFIILHYKATEREDSRFWRYCKNMDIPASLKHRIEMFADSGKVYKYGSELFGESSWIQVMMGQGIMPKHYHPIVDVMEEPELEAFLNNIKSTVKRKVESLPIHIDFIQHYCPAEVLANTEPMAM

SEQ ID NO: 83433 - protein, 499 aa, Sphingomonas sp.
  REGION 1..499: note = tr|A0A0Q4L8K3|A0A0Q4L8K3_9SPHN Tryptophan halogenase; OS = Sphingomonas sp. Leaf38 OX=1736217 GN=ASE88_10680 PE=4; SV = 1
MNDASEPPRTRIVVAGGGTAGWIAAAAIVRQLGSLVAVTLVESDEIGTVGVGESTIPTARSFHAFLGIDEAAFMRATQATFKLGIAFENWRQIGDRYFHPFGSVGRSVAIADFQHFWLEARARGFGGAYGDYSLEQQAAGAGLFGHDEQHSLAYAYHLDATAYARFLRSLAEPWGVRRVEGRIERVERDGEGGDIAALVLASGERIAGDLFIDCTGFRALLTEATLGTGYEDWSEWLATDRALAVQTETVAPPVPYTRAIAHAAGWRWQIPLQTRTGNGLVYSSRHMSDDEAHATLIGALDGRPLFEPRPLRFRSGMRRQAWNRNCIALGLAAGFIEPLESTSIHLIMNAVIRLIQLFPFRGDDHNALAARYNVQSRHEWEHVRDFIILHYHVTQRDDSDFWRDCARMTVPDSLAERISLFTATAGAWQGQDDLFRIDSWVSVMLGQGVVPRAHHRIASIIKAHDLQTSFDDLSRGIAGTVRTLPRHHDFLAHYCPASG

SEQ ID NO: 83434 - protein, 515 aa, Novosphingobium sp.
  REGION 1..515: note = tr|A0A0N1AP93|A0A0N1AP93_9SPHN Tryptophan halogenase; OS = Novosphingobium sp. AAP1 OX=1523413 GN=IP65_07565 PE=4; SV = 1
MPHDTAPSHIRSIVIAGGGTAGWMVAAALSRTIAPHRCRITLVESETIGTIGVGEATIPPIQTFNQVIGLDEAAFLQATKGTFKLGIEFAGWRARGHSYFHPFGRQGNDFGGTQFHQHWLRAQALGDDTPLGAFSLNEQAAYAGKMRQPDGDPRSVYSTFSYAYHFDATLYGQHLRTLAEERGVERREGLIEEVVLDGESGRIASLRLDDGGMLDGDLFIDCTGLRSLLLGEALGVPFKDWTHFLPCNRALAVPTDCVDLMRPYTRSTAHEGGWQWRIPLQHRMGNGMVYSAEHWSDDQAHAALMANLDGQPLADPRLIRFTTGRRVQSWAKNCVAIGLSAGFLEPLESTSIHLVQIAVAKLLNWFPDMGFDPMTMAEFNRQIANEYDRIRDFLVLHYHANERDGEPFWDQCRTGAIPDSLAEKIAMFRRSGRLLSRETDLFQDASWLAVLLGQGAMPQAHDPLTESLRPLELDQMLRGMRELIGRAAQAMPSQADHLARIGGRIANAQREAALG

SEQ ID NO: 83435 - protein, 506 aa, Novosphingobium sp.
  REGION 1..506: note = tr|A0A0N1API5|A0A0N1API5_9SPHN Tryptophan halogenase; OS = Novosphingobium sp. AAP1 OX=1523413 GN=IP65_01935 PE=4; SV = 1
MDSQVARSITIVGGGTAGWMCAAALGHFLGENTRITLVESDAIGTIGVGEATIPQIRMFNQALGIDETEFIRATGATFKLGIEFAGWLRPGHSYLHAFGDVGRDIGLGAFRHFWSRAHRLGLARPLGDYSVNDLAARAGKMHDGAPLTNRNVPQMPHAFHFDAGLYAAYLRRYAQAKGVIREEGLIVAVDRDGASGDVTAVRLDDGRVIDGELFIDCSGLRALLIGDTLGVGFDDWSHLLPANRAVAVPCASAAPLTPYTRSTAHAVGWQWRIPLQHRTGNGRVYCDAFLSDDEATAGLLANLDGMPLADPRVIRFTTGCRQQAWSHNVIAMGLASGFLEPLESTSIHLIQSMIARIMTFGPTCRPAAAVRDTFNRQFADEMARIRDFIVLHYWANEREELFWQACRNLPLPASLAEKIALFQSAGHLFRDQSDLFSEVGWLQVLVGQGIVPATSHALAEAVSEADLAGWLDTLHALFSREVAAYPTHADYIARHCAAPSPKGLVA

SEQ ID NO: 83436 - protein, 506 aa, Fulvimonas soli
  REGION 1..506: note = tr|A0A316HW68|A0A316HW68_9GAMM Tryptophan halogenase; OS = Fulvimonas soli OX=155197 GN=C7456_1102 PE=4 SV=1
MGNQTNELPVRRVVIVGGGTAGWMTAALLAKAFGPRLSIRLVESDEIGIVGVGEATIPQIRHVGRFLGIAEDELLRASRGTIKLAVQFNDWRRIGDSYVHAFSDVGLPLGLAAFQHYWLRSRREDPRAPDLWAYSICARACAANRFAPMENVGGSPLTGIRYAYHFDAARFGRLLRRNAEGNGVVRTEGKVVDVALRGDDGFIESIRLHSGEVIPGDLFVDCSGFRGLLIEGALKTGYESWQHWLPCDSAVVAPSEHGGTIRPYTQASAQQAGWQWRIPLQHLASNGHVYCSRFVSDDEAAATLVRNMEGPALAAPRQLRFHTGIRNKVWNRNCVALGLASGFIEPLESTSIHLMQSAAGRLLTMFPDRGFDPALVDEYNRQTRAEYEQTRDFIILHYKATERDDTPFWRRCATMDVPEGLARRIGLFRRTGHVFREGEELFTLMGWLQVFIGQGIVPERHHPLADALPKAQLDEFLANIRTLVDRAVAAMPTHAEYIDRHFKAAD

SEQ ID NO: 83437 - protein, 505 aa, unidentified
  source 1..505: note = Proteobacteria bacterium
  REGION 1..505: note = tr|A0A1W9H2C8|A0A1W9H2C8_9PROT Tryptophan halogenase; OS = Proteobacteria bacterium SG_bin5 OX=1827382; GN = A4S12_08520 PE=4 SV=1
MPEAPLREIVIIGGGTAGWMAAAALARFLGAQARVTLIESEAIGTVGVGEATIPQIKLFNQGLGIAEPDFVRQTQASFKLGIQFVGWGAPDARYIHAFGAVGWPLGLLPFHHYWLRDRAQGGTSDLWDYSAGARAAARNAFQPPADRPGQPPAGYDYAFHFDAGLYAAFLRRHAEAAGVNRIEGRIGAVRLRDDGFVAGVTLDDGRAVEGELFIDCSGFRGLVIEEALHAGYEDWTHWLPCDRALAVPCARVAPLTPFTRASAKAAGWQWRIPLQHRIGNGIVYSSAHLSDDQAADILLAGLDGAPLGEPRPLRFTTGKRRAMWVKNCVALGLAAGFMEPLESTSIHLIQAGIARLLSLFPRAGFDAADIAEFNRQSDFEWRAIRDFLILHYHANGRSEPFWADCRAMALPDSLAHKLALFRANGRITREHEELFTELGWLQVLIGQGVMPVGYSPLADALPTRDLARFLADARGHAERVAAALPPHADFIARHCAAPPLETVAA

SEQ ID NO: 83438 - protein, 499 aa, Novosphingobium sp.
  REGION 1..499: note = tr|A0A0N0JJR6|A0A0N0JJR6_9SPHN Tryptophan halogenase; OS = Novosphingobium sp. AAP1 OX=1523413 GN=IP65_03825 PE=4; SV = 1
MTDRPLRIVVAGGGTAGWMTAAALARTLGPVATVTLVESEAIGTVGVGESTIPPLVAYNRLLGIAEADFMRATSATFKLGIAFENWKAPGESYFHSFGGTGRDHWSAGFQHFWLHGRARGHAAPYGDYCLELMAAQAGRFAHLPDGRMNYAYQLDSGRYAAFLRRLAEGDGATRIEGRIARVELDGDSGEIAALHLDGDRRVDGDLFVDCTGFRALLIEGALHAGFDDWTHWLPCDRAIAVQTASVRPPVPYTRAIAHDAGWQWRIPLQHRQGNGIVWCSRYLDEDQALDRLLSSVEGQVLTEPNRIRFTTGARRRQWVKNCVAVGLSGGFMEPLESTSIHLIQRAVLRLLRLLPVSARPDPADIAEFNEQQWADMVQIRDFLILHYKATERRDSPFWRHCAGMEVPESLSHRMDLFARTGRVFRKNEELFAENSWVQVMMGQGITPAAYHPVAAKLRDDELERLLAGLRREVADTVQGLPGHAAYVDHYCGARTGAAA

SEQ ID NO: 83439 - protein, 483 aa, Sphingomonas sp.
  REGION 1..483: note = tr|A0A0Q4F815|A0A0Q4F815_9SPHN Tryptophan halogenase; OS = Sphingomonas sp. Leaf16 OX=1735681 GN=ASE65_12785 PE=4; SV = 1
MTAAALSSLLDPKDVAITLVESDAIGTVGVGEATIPDILAFNQMLGVDEADFMAATQATFKLGIEFVDWGAKGTRYIHPFGQHGVDMQGIDFHQYWLRARQDGATDGIEAYSLCAVAAQAGRFALPDPNPRSVLSQIRYAYHFDATLYARFLRRYAEARGVVRVEGMVGVVRQDARGNIAGLTLSDGRMVEGDFFFDCTGFRALLTGQTLGVGFVDWSRWLPCDTALAVPSGHAGPPTPYTRSTARDAGWQWRIPTQRRVGNGHIFASAFQSEEAARDVLLANLDAPPLADPRRIAFTAGCRERFWQGSCIAIGLAAGFLEPLESTSIYLIQEGISRFISLFPRGDIPDILRTEYNRHMRTEFEQVRDFIILHYAATTRDDTPFWNYCRTMTLPDTLLHKIELFRETGRVFRYNDELFARPSWVAVMLGQGIVPVASDPIVATLPGSEVAHSLASMRNAMAAAVQRMPSHGEFLSRYCPTVAA

SEQ ID NO: 83440 - protein, 495 aa, Pseudoalteromonas sp.
  REGION 1..495: note = tr|A0A0W1KX20|A0A0W1KX20_9GAMM Tryptophan halogenase; OS = Pseudoalteromonas sp. H103 OX=1761893 GN=ATS74_06960; PE = 4 SV=1
MTKTNAVKNVVIAGGGTAGWMAAAALAKLIGKNIHVTLVESDDIGTVGVGEATIPPIRTFHKLLGINEQSFMKATQASFKLGISFENWGDENTRYIHSFGVTGKECWAGEFHHFWLQGKALGINDPFGNYCYELQAAKAGKFAFNQQNPINYAYHMDATRYAQFLREFSEPLGVKRVEGKIQKVVKNAKTGHIESLLLNSGEQINGDFFIDCTGFRGLLIEQALHTGYEDWSHLLPCNSAIAVQTKSTSDTVLPLTRSIAHKSGWQWRIPLQNRVGNGLVYCSQYMDDEQAKALLLNNIEGEALTEPRIIKFKTGRRLKGWNKNCLALGLASGFVEPLESTSIHLIMSGIIRFMRLFPFNGITNHAIDEYNKQLKSEIENIRDFIVLHYKVTNRDDSEFWLHCSAMEVPKTLKHKIDLFKQTGRVFLDDGDIFRVDSWVQVMLGQGIGPEQHHLIASMMNNEELTRFLHGIKQQIEQRVSQLPPHHEFLKQYCPA

SEQ ID NO: 83441 - protein, 502 aa, unidentified
  source 1..502: note = Alphaproteobacteria bacterium
  REGION 1..502: note = tr|A0A2A5CKH6|A0A2A5CKH6_9PROT Tryptophan halogenase; OS = Alphaproteobacteria bacterium OX=1913988 GN=COA81_01940; PE = 4 SV=1
  VARIANT 190: note = Xaa can be any naturally occurring amino acid
  VARIANT 469: note = Xaa can be any naturally occurring amino acid
  VARIANT 501: note = Xaa can be any naturally occurring amino acid
MQENQVENIIIVGGGTAGWMAAAMLAKTAGRHINITLVESDEIATIGVGEATIPPIQLFNNHLGLDENDFLRKTQGTFKLGIQFDNWGRQGDSYMHTFGRIGRDLGAIPFHHYWLRSMQEGQASSLWDYSFNHKAAYANKFSRIEKIDNSPLDGLTYAFHFDAILYAQYLRDYSEKLGVKRIEGKVVDTXLRGEDGFISHLMLENGTEIRGDFFIDCSGFRGVLIEEALETGYEDWSNWLPCDRAIAVPCASTEPLVPYTKSTALTAGWQWRIPLQHRTGNGHVYCSDYISDDEAADMLLKNLDGEILADPKFLKFNTGRRKKFWNKNCVVLGLASGFMEPLESTSIHLFQAGITRLIKIFPDKKCSQADVDEYNRQAIYEFEGIRDFIILHYHLTQRTDTAFWRDCGAMDIPETLKQKMALFKSNGRIFWDTVELFAENSWLQVMVGQGLMPDSYHALAHQVESDKAXEYMNNIRQIQDQALTPIPSQADFIARHCAAAXQ

SEQ ID NO: 83442 - protein, 217 aa, unidentified
  source 1..217: note = Xanthomonadaceae bacterium
  REGION 1..217: note = tr|A0A4Q2XRW1|A0A4Q2XRW1_9GAMM Tryptophan 7-halogenase (Fragment) OS=Xanthomonadaceae bacterium; OX = 1926873 GN=EOP89_05980 PE=4 SV=1
MRKRILIVGGGTAGWLTAGYLAKRLGADLAGGVSITLVESRDIGVLGVGEGTFPTIRRTLETIGIDEAELVRRCGATFKQGAKFAHWRHTPGQGATNHYSHPFQVADASDGLDLLPYWLLGLGGPENWDEVSNPQKKAADKHRAPKLPTNPDYVGPLNYAFHFDAIALAGLLREQGIRNGVRHLTDTVGEVLLAEDGSIAGVRTEQNGVLDADIYVD

SEQ ID NO: 83443 - protein, 176 aa, Shewanella sp.
  REGION 1..176: note = tr|F7RP78|F7RP78_9GAMM Tryptophan halogenase; OS = Shewanella sp. HN-41 OX=327275 GN=SOHN41_02076 PE=4 SV=1
MSYIKNIVIVGGGTSGWMTAAMLARLFKSTLNITLIESKEIGTIGVGEATIPPLQIFNSVLGINESDFIKATQATFKLGIQFENWGKQGDCYMHAFGNVGKDLGFTPFHHYWLSTSPTETNSFWHYSLNFQAAKKQKFQVIGQLPNAPLAGLTHAYHFDAALYAQLLRSYSERQKC

SEQ ID NO: 83444 - protein, 491 aa, Alteromonas sp.
  REGION 1..491: note = tr|A0A359JZ64|A0A359JZ64_ALTSX Tryptophan halogenase; OS = Alteromonas sp. OX=232 GN=DEH24_00900 PE=4 SV=1
MNASPLNIVIVGGGTAGWMAANLLAKRWQHKAVSVTLVESPDIGIIGVGEGSTPTLKRFFEDMNIAESDWMAACNATYKVSIQFDGWSPESGVGSYAHPFISQLDTFSERPFYVNCLTRRMGLDVNVTPGDFLFNGWLAKHKRSPQTPANFPFRIEYGYHFDSGLLGAFLQRHAHTLGVTHKSRNIESVQCHPNGDIASLHTREGEIIEGDLFIDCSGFRSLLLQQTLKVPFRSFKDNLFNDAAVVCATDALEDRPVETRSTALSTGWAWQIPLTNRTGNGYVYSSAFISPEDAEKELRAHLGVNDDDAQTRHLTMKVGQVSEHWSHNCLALGLSQGFIEPLEATALHLVQTSVEIFMDHYEKGGFSDQYRAAYNQVIGERFERVRDYIVAHYKLNTRNDSEYWRANRNNDVLSESLLQLLDVWFRRGDLQQEIQRQKLDSHFGATSWHCLLAGYGAFPRLAAQQPNQGDLYKDNNLAQFFSGCLLNFSAQ

SEQ ID NO: 83445 - protein, 478 aa, Sphingomonas sp.
  REGION 1..478: note = tr|A0A0Q4FQ08|A0A0Q4FQ08_9SPHN Tryptophan halogenase (Fragment) OS=Sphingomonas sp. Leaf16 OX=1735681; GN = ASE65_17285 PE=4 SV=1
MAYQGTIGSKGKPTMPHEPVRSIVIVGGGTAGWMAATYLARRLTHLNLSITVVDSAAIGTVGVGEATVPAIRDFLSAIELGEPDVLRETGGTIKYGIRFDGWGGDDHRFFHPFGLYGVGAGGVAFHQYWLKLNAAGRAGPIGDYCLATQLARGGLFLPPADHPANDLGVFNFALHFDAAKFAALLRRLALANRVAHVDGRIEQVTTDPARGHVTHVTLDDGRQIAGDLWIDASGFRSLLLGEALGVPYVDWRHWLPCDRAVAIPCRAAPGDPVPYTVATARTAGWQWRIPLRHRIGNGSVYCSDFQSDGDAEDALLASIEGEPLAGPNRLRFVTGHRERFWSGNVVGLGLASGFLEPLESTSISLIQSGLERFVALFPDRDCDPRLAATYNRQSVLEFERLRDFLFLHYLANGRTEPFWQAIRAVEPPEPLQIKLDAWRSGGEFVRNEWDTFQDPSWLSLYAGFGDLPHLRLYLERLG

SEQ ID NO: 83446 - protein, 498 aa, Streptomyces sp.
  REGION 1..498: note = tr|A0A0M8VYT6|A0A0M8VYT6_9ACTN Tryptophan halogenase; OS = Streptomyces sp. NRRL WC-3723 OX=1519491 GN=ADL02_43235; PE = 4 SV=1
MSATYLKAAFGDRIDVTLVESDRVSSIGVGEATFSTVRHFFDYLGLDEREWMPHCAASYKLAIRFENWREVGDHFYHPFERLRMSDGFTLADWWLHEGDRSLRFDQACFVTPALCEAQRSPRMLDGSLFAQGLDESLGRSTLDEQRAQFPYAYHFDAGLLARFLAKYGTDRGVRHVVDDVVEVRTDERGWLTEVMTKQNGALAGDLFIDCTGFRGLLINQTLEEKFVSFQDVLPNNRAVALRVPQPDQAERGMRPYTTATAMEAGWIWTIPLYGRNGNGYVYSDEFCTPEEAERTLRAFAAPGQDDLEANHIRMRIGRNERSWVKNCVAIGLSSAFVEPLESTGIFFIQHGIEQLVKHFPDERWDPSLADDYNRRVARVLDGVKEFLVLHYVAAGRDDTPYWKEAKLRGLPDGLAEKLDMARSHLLDERAIYPYYHGFEQYSWITMLLGLGHEPRAARPALAHVDPTAARAELARLRSDADRLVRTLPSCHEYLTSIH

SEQ ID NO: 83447 - protein, 496 aa, Pseudoalteromonas sp.
  REGION 1..496: note = tr|A0A269PT98|A0A269PT98_9GAMM Tryptophan halogenase; OS = Pseudoalteromonas sp. NBT06-2 OX=2025950 GN=CJF42_03835; PE = 4 SV=1
MHNNKIQKVVIVGGGTAGWITAALMAKTLGKTVDITLVESDEIGTIGVGEATIPPLIHLNNAIGLDEKIFIQETKATIKLGIEFDNWGKLGDSYMHAFGGIGKNFPFCDFHHFWLKAKQGGNTSNYWDYSVNYQAAKKNKFKKLSGIEGTNLPGVEYAYHFDAGLYAKLLSTFSQSMGVNRIEGIVNQVNLNDNSGFVKNIVLEAGRIIEGDLFVDCTGLKALLIEQTLSTGFEDYSHWLPCDRAIVVPCESVESLTPYTRSTAHESGWQWRIPLQHRIGNGLVYSSKYMTDEQAKDKLLSHLDGKPLAEPKVIPFKTGVRRKQWNKNVVAIGLSNGFFEPLESTNIHLIQTAAIRLVKLFPHSGIKSMEVTEFNRQSKIESKQMRDFIILHYKLNQRDDSDFWRACQRMEVPDTLTKKMALFAQSGKVFREQDELFTEIAWQQVMIGQNLIPQDYHPIANSLSDEQIFDLMKNLKILIDRTVDNLASHKIFLEAL

SEQ ID NO: 83448 - protein, 508 aa, Sphingomonas sp.
  REGION 1..508: note = tr|A0A0Q4FV96|A0A0Q4FV96_9SPHN Tryptophan halogenase; OS = Sphingomonas sp. Leaf16 OX=1735681 GN=ASE65_14665 PE=4; SV = 1
MSGRGDGPLRRIAIVGGGTAGWMAAAALSRLLGPHGPAITLIESEEIGTIGVGEATIPPLQAFNAMLGIDEDDFVRATQGTFKLGIDFHDWGQVGHRYFHPFGVYGIDAGAVPFEAMWRRLRAAGQAGPLADYSICTAAARAGRFQRPQPGNTPLAQIGYAFHFDAGLYARFLRTRAEAAGVVRREGRIVDVVRDGNSGFINAVVLADGGRIEADFFIDCSGFRGLLIEGALGAGFEDWSHWLPNDRAVAVPSANVGAPTPFTRSTARAAGWQWRIPLQHRTGNGYVYSSAHVSDDEAAATLLANLDGPALADPRPLRFRTGRRDRFWIGNCVALGLSGGFLEPLESTSIHLVQAGIARLLEMLPTRVCDPADTARYNRLMAAEFDQVRDFVILHFHASDRRDTAYWRDQAERPIPETLAERLAIYARTGRVYREGDELFTKTSWLAVMDGQGLLASTHDPLADAIPLDAAAQRLQRIGQVVAAAAAQMPAHDAFIARHCAAAGGPRG

SEQ ID NO: 83449 - protein, 175 aa, Alteromonas sp.
  REGION 1..175: note = tr|A0A3D0SB31|A0A3D0SB31_ALTSX Tryptophan halogenase (Fragment) OS=Alteromonas sp. OX=232 GN=DEO96_03400 PE=4; SV = 1
MAQKKTRVVVAGGGTAGWLTAFSLVTRLGNVLDITLVESDQIGTVGVGEATIPTMCNFHQLMGINEQEFMAATNATFKLGIQFDNWANEGDSYIHSFGEIGQRSWMAEFHEFWMEAVANGQQDSLEDYCLELKAAKANKFATKIGNRPLNFAYHLDATAYAAYLRKKSEAAGVTR

SEQ ID NO: 83450 - protein, 501 aa, Alteromonas sp.
  REGION 1..501: note = tr|A0A2E9PJ34|A0A2E9PJ34_ALTSX Tryptophan halogenase; OS = Alteromonas sp. OX=232 GN=CL602_10045 PE=4 SV=1
MSTFDSATLPPVKNVVIAGGGTAGWMAAIALVKLLGKSLNITLVESKDIGIIGVGEATIPPIRTFHKLLNIDEKAFMKATQATFKLGIEFEGWREENHSYIHSFGVTGRECWAGEFHHFWLRAQKLGLGGEFGDYCPELQAAKANKFFTNESMPLNFAYHFDAVAYGRYLRTLATEAGVHHIVGNITNVSKCSQTGNITSLEVDESQEVNGDFFIDCTGFKGLLIEQALHTGYDNWSHYLPCDSAVAMQTETVAAPVPYTKSSAHKAGWRWQIPLQHRVGNGLVYCSKYMSDDEAKSTLVQQVEGEPVNDARFIKFTPGKRRLGWNKNCVALGLASGFIEPLESTSIHLIMTGIVRLMRLFPFDGVTQSAIDEYNTKYDSEMAAILDFIVMHYKVTNREDSPFWQHCKNMPIPPSLTHKLNLFKDTGRVFLDDGDIFRVDSWTQVMLGQGLTPNQYHKVADEMSEAELERFMMGLKQQVDNQVSRLPSHEAFLDKYLAVNS

SEQ ID NO: 83451 - protein, 496 aa, unidentified
  source 1..496: note = Planctomycetes bacterium
  REGION 1..496: note = tr|A0A517M5G1|A0A517M5G1_9BACT Tryptophan halogenase; OS = Planctomycetes bacterium EC9 OX=1930277 GN=EC9_43150; PE = 4 SV=1
MEAAALNKEVDLLILGSGFGGSLLSLLLARQGLRVAVIDRAVHPRFTIGESSTPLADATLKELAQRYDLPELMPLTAFGPWRRRHPELMCGLKRGFSYFGHSPNAEFSPADQLLVAASSDDEHSDTHWLRSDVDAWLFERAADRGAMQFEGASYRLSREDSQWLVAGEASGVKFSLRAPMIVDATGAAGEVLRYLKIASQTHRLKTNSWAVYGHFENVTSVAEMLDRRQIDRRRHPFGCDDAAVHHVLDDGWMWQLRFCDDSVSAGFAIGQPADTPKPNADGIWRQRLDRFPFLRQQFAAARIVAPAGGLQMTSRMQRLTSLAAGPGWAALPNTAGFIDPLHSTGLAHTMFGVRRLAEILLQTGTSNQLLAELGNYSSTLIDELRLVDQLVEGCYAGLPSFRLWSAWCMLYFAAVTSMEQSPGGGVAAFLHADELRFLTVVGEARGELQRASDAGRGPAACDRFEDRLRQVIAPWNRGGLLDRECNGMYARTAKPV

SEQ ID NO: 83452 - protein, 489 aa, Sphingomonas sp.
  REGION 1..489: note = tr|A0A0Q4U1U0|A0A0Q4U1U0_9SPHN Tryptophan halogenase; OS = Sphingomonas sp. Leaf257 OX=1736309 GN=ASF14_13240 PE=4; SV = 1
MSAPIRHVLVAGSGLTAWSAAAALKRRAPFLDVTLLATPAAHDALADRIACTLPSLPGFHADLGISEDDGVTRTGAGYRLGTRFFGWAEGLPDYVHAYGSYGHAIGPAAFHLHWVRATRDGRAAPFDAYCPAAQLARAGGFVPPSPGTPFAGHDYGLTLDLPRQVAMMRAFALHVGVREVTDSITQVQVDATGHVTAIAVQHGAPLTAHLYIDATGPAALLRGSIDDAWQDWRDWLPCDRVLLGTQVSGEGAPVLTPATAHAAGWRWSSGEQVGMAYGSAHLSDAEAAAMLARDGAVADAPIVIRSGTRARAWRGNCIAIGDAATQVEPLEWCNLHLALSAIDRLVTMLPDTAMAEVEAADFNRQTLAEAERVRDFLAVHYRTARRPEPMWQAVAQAELPASLAHTLGQFGERGRLPFYEEETFTRDSWAAILLGQGYLPRRIDPLVHGVPAPQVDAAMARMTDAIAAALPHVPAHAQWRAAQMRRLAR

SEQ ID NO: 83453 - protein, 512 aa, Pseudoalteromonas sp.
  REGION 1..512: note = tr|A0A269PTK3|A0A269PTK3_9GAMM Tryptophan halogenase; OS = Pseudoalteromonas sp. NBT06-2 OX=2025950 GN=CJF42_03940; PE = 4 SV=1
MNIKKIAIVGGGTAGWLVANHLGKALLERLNTSLTLIESPDIPSIGVGEGTVPMMRETLKSFGISETDFVQQCDVTFKQSIKFVNWLDKNNHGENNYYHHLFDYPFPLGDDLAPFWLSTDKKIPFADIASFQGAICDAGLGPKTISTPEYQGTTTYGYHLNAKKFAQLLAKNACEKFNVTHRLANVTDVNLKEDGSIKSLKLDSDNCKDDTEFDFYIDCSGFSSFLMRKNLDVKFIDKSNELLIDTAIVVQVPTNSEDDIPSYTIATAHQAGWIWDIALPKRRGVGFVFSSKYMNESLAKEKLAKYLDKDLSELPHRSIPMNIGYLEKFWHKNCVAIGLSQGFVEPLEATAILLADFCAKQLAQNFPDEQIQYEHLSKMYNKRITYCWDRVIDFIKLHYCISDRTDSQFWLDNKKEEGISEHLKQLLLHWQSFSPKASDFFSKFEIFDVENFLYVLYGMKYQTSINNLSKNYYTKAKSDAEQVKKHANALVNELPKHRELINKINQFGMQKI

SEQ ID NO: 83454 - protein, 509 aa, Alteromonas sp.
  REGION 1..509: note = tr|A0A2D5LKB6|A0A2D5LKB6_ALTSX Tryptophan halogenase; OS = Alteromonas sp. OX=232 GN=CL592_07875 PE=4 SV=1
MNQAHSQNYQKTQNTQHIQKVVIVGGGSAGWMTAASLSNVMKGRCEICLIESDEIGIVGVGEATIPPIRVFNQTLGISEAEFLRKTNGTFKLGIEFVNWGKNGSRYFHPFGTYGRQFDTVSMHQYWTAAYQSGSAKELDDYAMAWHLAKNGKFIHPSGDPKNVLSTFEYAYHFDAGLYVKFLREFAEQRGVKRIEGKINQVNKDPQNGFVTSVDLDAGERVEGELFIDCSGFRGLLIEQALHTGYETWSEWLPCDRAWAVPTKGSNPIPYTRSTAHTAGWQWRIPLQNRVGNGHVFSSKFISEDEARQQLVDNLDSEMIAEPRLIKFVTGRRKRFWNKNVVAIGLSSGFIEPLESTSIHLIQAGIAKLLALFPDKSFNQNSIDEYNRIAISEVERIRDFVILHYKLMERRDTDMWRYCAEMDVPESLASRIEHFRDYGRIIKGEMDLFGNTSWLAVHIGQGNMPQRVDPLVNYSDVDYVSWLNKLNGVMSHYAAQATNHIDYINKMIGR

SEQ ID NO: 83455 - protein, 504 aa, Sphingomonas sp.
  REGION 1..504: note = tr|A0A0Q4KV48|A0A0Q4KV48_9SPHN Tryptophan halogenase; OS = Sphingomonas sp. Leaf38 OX=1736217 GN=ASE88_11690 PE=4; SV = 1
MANHPLRIVIAGGGTAGWMAAATFARFLETGYEIDLIESDAIGTVGVGEATIPQIHLFNDALGLDEDAFLRATGGTFKLGIEFVDWFKPGHRYMHAFGDVGRDVGLLPFHQYWLRARSLGLAGDLGAYSLNTHAAMAGRMQRGPARTSRALASMPYAYHFDAALYARYLRRYSETRGVNRIEGKIVRVTRDGDSGDVSGLVLENGTTVAADLYIDCTGFRGLLIKEALGTGYEDWTHWLPCDRAIAVPSARSEKFTPYTRSTAHGAGWQWRIPLQHRTGNGVVYSSAHLSEDEATATLLRGLDTSAMADPRTITFRTGRRKRMWNHNVVALGLAAGFMEPLESTSIHLIQSAVARLLKLLPGRVIAEVDRAEFNRQSDFEYERIRDFIVLHYKATTRDDTPFWRACRDMAVPDTLATKIELWRGNGHIVREHEELFTEVGWLQVLAGQGIVPDGHHPLADAISTADLGEFMDTIDKLNAREANQMQDHAAFVAQHCAAAASLAA

SEQ ID NO: 83456 - protein, 512 aa, Pseudoalteromonas sp.
  REGION 1..512: note = tr|A0A269PU05|A0A269PU05_9GAMM Uncharacterized protein OS=Pseudoalteromonas sp. NBT06-2 OX=2025950; GN = CJF42_03935 PE=4 SV=1
MKKVKSVNVIGGGTSGWLSAAMLASSFKKTGLDITVHLIESENIPTIGVGEGTFPTIVNTLHDIGLSEKDFFSQCDASFKQGAQFCNWLHEPDKQKHSYYHPFDPTAMPKGIDLSAYWVRNKINNKTSNDFAHSVCLQAHLCDQNLAPKDLNTPEYAWMAKYAYHLDAAKLGKLVKKHAMTNLGVIHSFADITEVKLDDDGFIESVIADENTVFSADFFVDCTGFSSLLLSKALKVPFIEKSKYLSVNRAVTLQVPYENLETPIPTHTISTAQEAGWIWDISLQSRRGTGYVYSSEHTTPERAEELLLKYLNIPASDDIKLRHLSFDVGHREKSWEKNCVAIGFSSGFIEPLEATAIAMVEAGVRSLAARFPQSREAMKTRQKQYNAIFTQRWNNIIDFVKLHYCLTNRKDSQFWVDQTNPKTIPETLQDKLEAWKHYGATEGDFPNKYDIFNISSWQYIIYGMEYFPKYIECGTLPDEILDKAFESIQLMRKSAEIKLDTNRKLIELYSGK

SEQ ID NO: 83457 - protein, 530 aa, Pseudoalteromonas sp.
  REGION 1..530: note = tr|A0A269PI62|A0A269PI62_9GAMM Tryptophan halogenase; OS = Pseudoalteromonas sp. NBT06-2 OX=2025950 GN=CJF42_22855; PE = 4 SV=1
MHSTQTNINDNLSKNGAIETVVVVGGGIAGWLTAGRVAARHKSHTTEGINVVLVESPTIPAVGVGEGTWPTMRSTLIALGISETDFIRECDASFKQGAKFAKWVDGTDNDFYYHPLVLPQGFAKGDIAAYWLAKDQKSCGNSFSNDVCFQEAICEKGLAPKTIRTPEFDAIVNYAYHLDSVKFAIFLQKHCTEKLGITHILDNVEKINTAGNGDIASVSTKNNGDICGELFIDCTGFSSLLLGKHYQVPFKSCKDILFIDTALAIQVPYEDEESPIASHTISTGQEAGWIWDIGLQHRRGVGYVYSSKYSSEQQAREILAQYVGTKFDNAKVRKIPINSGHREKFWQKNCVAVGLSAGFLEPLEASALVLVELSAQMIAEQLPTTRRSMDIVAKRFNDTFLYRWDKIIDFLKLHYILSKRVDNRFWSDNRDPKSIPQSLKDLMELWQYRSPADHDFTSNNEVFPAASYQYILYGMGFKTDYSHAFHLLDDWQYAEQQFAQNEKMTQTMTSTLPSNRELLNKIKQYGFSRL

SEQ ID NO: 83458 - protein, 578 aa, unidentified
  source 1..578: note = Lentzea jiangxiensis
  REGION 1..578: note = tr|A0A1H0TT13|A0A1H0TT13_9PSEU Tryptophan halogenase; OS = Lentzea jiangxiensis OX=641025 GN=SAMN05421507_110202; PE = 4 SV=1
MKMNAGRPSALDELVQTFSDDESAAVREWLGGAADAPQLPGISLRSNHEPLVEMLPRPAVDDQKAIRRVAVVGGGTAGYLTAIALRTKRPWLEVSLIESPSIPIIGVGEATVPGIVIFLHHYLGIDVEDFYRQVRPTWKQGIRFEWGPRPDGFMAPFDWDSNSIGTAGAVDAGGGIDGYTLQSLLMSAERAPVFDVGDRHLSLMKYLPFAYHLDNARFVSYLADIAKQRGVQHVEAKIEDVALSGDDWVDHLHTTDGRKLSYDFYVDCSGFRSMLLGKAFRTPFHSYASSLFTDSAVTGNVGHGGNLKPYTSAITMNSGWCWDIPTPQDDHLGYVYSSNAISDDQAAAELAARFPGVSEPRFVRFRVGRHEKAWRGNVMAIGNSYAFVEPLESTGILMITSSVQALVASLPGSWADPQCRDMVNVGLANRWDALRWFLSIHYRFNTRRDTPFWREVRANTDISGAQPMLDMYATGAPLRYRNPLLRTFVQGNAPTFYGLAGVETILLGQQVPTRLLHRAEPPARWQARRNAADAFVRRALPQLEALSRFHDDPALNQQLLFDADSWASPLRAEPIGML

SEQ ID NO: 83459 - protein, 507 aa, Sphingomonas sp.
  REGION 1..507: note = tr|A0A4R2TWK3|A0A4R2TWK3_9SPHN Tryptophan halogenase; OS = Sphingomonas sp. PP-CC-3A-396 OX=2135655; GN = C8J40_104322 PE=4 SV=1
MSSNPSPERPEPARGMTVVIVGGGTAGWMAAVAFGRLLVPAGGRVTLVESDAIATVGVGEATIPPIRTFHAMLGIDEDAFLAATGGSYKLGIRFEGWSHPTESYVHPFGQIGTDIAGQSFATQWLRARQAGEAEALGQYSLEARAAETGRFSKPIANGDSPLSRIGYAYHFDAARYAHFLRAQAEAHGVVRCEGMVVRVEQGPAGIAAVHLAGGTRIAGDLFIDCSGFRALLIEGALAAGWEDWSSWLPCDRAVAVPSSADAAPLPLTRAIAQPAGWRWRIPLRHRTGNGHVFSSRYMSEDEATACLLDGIEGEALADPRVIRFATGHRRRFWSGNCVALGLAAGFMEPLESTSIHLVQSGLQHLLRMLPGTGVASSVVIERYNRVMTAEFVRIRDFLVAHYHLNSRPEHFWRDRAAAPIPEGLAEKLAMFRDGGRIFREPDELFNETSWLALLTGQNAVVDGHDPLCAALPIARAAHRIAQIEQVVTASLAHMPPHADALARLERG

SEQ ID NO: 83460 - protein, 497 aa, Sphingomonas sp.
  REGION 1..497: note = tr|A0A0Q4FP08|A0A0Q4FP08_9SPHN Tryptophan halogenase; OS = Sphingomonas sp. Leaf16 OX=1735681 GN=ASE65_16495 PE=4; SV = 1
MTDRRIAQVVIVGGGTAGWMTAAAAGRFLDDGQRRITLVESDAIGTVGVGEATIPSILNFNKLLGIDEAEFLRETKGSFKLGIEFAGWHRPDSGYFHPFGSFGRDIEGINFHQLWLKLRGEAGIGPIADYSPSIVAARAAAFGPPVGDPRSPLSGMAYAYHIDATLYAAFLRRRAEANGVARVEGRIVAVERADNGHVAAVVLDDGRRVEGDLFIDCSGFRSLLLGDTMGVGFEDWSHWLPCDRAIAVPTQRTEPVLPYTRATAHQAGWQWRIPLQHRTGNGVVYCSRFLDDDAAEKLLLSRLDSVATAAPRRLSFKAGQRERMWEGNVVAIGLSGGFLEPLESTSIHLIQQGISKLFALFPDRDFSRVERDEYNRQMADNYRSIRDFIILHYHATARDDSPFWDHVRTMEVPDSLTRKLDLFRHKGRIFRYEDELFATPSWVAVLLGQGVDPVGYDPVADALDEARLAGALRQMRGATQAAVAELPPHGAVLARLG

SEQ ID NO: 83461 - protein, 492 aa, Streptomyces sp.
  REGION 1..492: note = tr|A0A1Q5GFL2|A0A1Q5GFL2_9ACTN Tryptophan halogenase; OS = Streptomyces sp. CB02366 OX=1703935 GN=AMK24_28925 PE=4; SV = 1
MSAQYDVIVVGGGPAGSTVSTLVRKRGHRVLQLEKETFPRYQIGESLLPATVHGIAHLLDVSDELKKASFTIKHGGTFKWGANPEPWTFDFAVSRRMPGATGYAYQVERMKFDKILLDNARKHGVEVRENSDVLDVLKAEDGRVRGVRYRDAEGREHEVSARFVVDASGNTGGLYKKSGSKREYSPFFRNLALFGYFNGGKRLPKPNSGNIFTCAFEHGWFWYIPLTPDLTSVGAVVNRDSASLVQGDPEKAMESFIAACPLIAEKLSEATRVTEGPYGELRVRKDWSYSNTKFWAPGMALIGDAACFVDPVFSSGVHLATYSGLLAARSLNSCLDGTVDETTAFEEFEARYRLEYSRFYEFLVGFYDMHHSEDSYFWQARKISNTADSDLESFVELIGGVSSDEFADAARARQRFAEASDEMAGMTHTAADDTGGPHGAVPGKVVGRLMEQGAALQARALLGDEAGAERPVRQGGLAASTDGLGWVPHARS

SEQ ID NO: 83462 - protein, 497 aa, Pseudoalteromonas sp.
  REGION 1..497: note = tr|A0A0W1KXE5|A0A0W1KXE5_9GAMM Tryptophan halogenase; OS = Pseudoalteromonas sp. H103 OX=1761893 GN=ATS74_07470; PE = 4 SV=1
MKPIKHVVIAGGGTAGWIAAALLNKVLGKVIDITLIESSTIGTIGVGEATIPPIIQLNNALGINEQDFINATNASIKLGIEFENWKTPSHSYMHAFGSFGKDFPFCDFYNFWVKGKITGSEDSLWDFSLNYQAAQQLKFAPLNTIPNTQLPGLSYAYHFNATRYAEYLKTLATSRGVKHIDAKIEQVNQCPHSGNIKSITLDNDTQINGDLFIDCTGQRALLIEQTLNTGFVDWSHYLPCDSAVAVQSQGTDSLKPYTRSIAHSAGWQWQIPLQNRVGNGLVYCSRYLSDESATQLLLNNLPAEPITEPRVIKFKTGRRLKQWHKNVVSVGLASGFLEPLESTSIHLIQSAVTRLIKLFPHYGISDALVAEFNKQSVTEIEHIRDFIILHYKLTEREDSTFWRQCKQMEIPDSLAHKLNLFKHTGKVVRENDELFAEVAWQQVFIGQGLIPDDYNSIVDSLSSEQLNDLFSTLKTLITSTVEQLPTHKDFLAKIKKA

SEQ ID NO: 83463 - protein, 504 aa, Brevundimonas sp.
  REGION 1..504: note = tr|A0A1S6ESQ9|A0A1S6ESQ9_9CAUL Tryptophan halogenase; OS = Brevundimonas sp. LM2 OX=1938605 GN=BZG35_05185 PE=4; SV = 1
MSGTVIRRIVIVGGGTAGWMAAAALAALVKRPDLSIRLVESEEIGTVGVGEATIPHIRSFNQRLGLDEDVFMARTQATFKLGIEFRDWGRLGDSYIHPFGAYGRSIDRVGFHHHWLRLRRSGAAADIHDYSLPVVAARMGRFTRPETDPRSLLSTFSYAFQFDAGLYAAYLREYAEARGVVRTEGRVTEVEQHPDSGHIRAVTLDRGDRIEGDLFIDCSGFRGLLIEGALKAGYEDWTQWLPCDRAVAVPCDTVEASIPYTRATALEAGWSWRIPLQHRVGNGYVYSSAFLSDDQAVERLMGRLEGPARAEPRMLRFTTGRRRRQWLGNCVAIGLSSGFLEPLESTSIHLIQAAITNLVELFPDTGFDPADADEFNRVMDLEYDRIRDFLVLHYNATQRDDTPFWDHCRTMAVPDSLAEKMALFRERGVVARYRDGLFLEPSWLAVYFGQRMEPDAWDPLSDRAPDAALADTLETLRTSIQRAAAAMPSHEAFVRACCAAGGHA

SEQ ID NO: 83464 - protein, 493 aa, Sphingomonas sp.
  REGION 1..493: note = tr|A0A0Q4G078|A0A0Q4G078_9SPHN Tryptophan halogenase; OS = Sphingomonas sp. Leaf16 OX=1735681 GN=ASE65_00705 PE=4; SV = 1
MSVTRVVIAGGGTAGWMAAAAIARTMGRMVEVTLVESEAIGTVGVGESTIPPLVTYNRLLGINEAEFMAATAATFKLGILFDGWRTADSRYFHSFGTTGRDHWAAGFQHYWLNGRTRGHDQPYDDYCTELVAALQGRFAHLPGDATNYAYQLDSGRYAQFLRTMAERDGTRRIEGRIARVELDGETGDIAALLLDGDRRVEGDLFLDCTGFRALLIEGALHAGYDDWTHWLPCDAAIAVQTESVGPPLPYTRAMAHDAGWQWRIPLQHRVGNGIVYCSRYLERDAALDRLLGNVEGAIRTEPNFLRFTTGARRRQWHRNCVAIGLSGGFMEPLESTSIHLIQRAVLRLLRLFPQGGVRPADIAEFNDQQLQDMEQIRDFLILHYKVTDRRDSPFWWQCAAMDVPVSLQQKIDLFRQSGRVFRRNEELFGENSWVQVMMGQGIVPDGHHPIADKLGDGELDRLLSMIRRQVADTVATMPPHGDYVARYCPADRP

SEQ ID NO: 83465 - protein, 519 aa, unidentified
  source 1..519: note = Thalassotalea sp.
  REGION 1..519: note = tr|A0A1Y5GF48|A0A1Y5GF48_9GAMM Tryptophan halogenase; OS = Thalassotalea sp. 42_200_T64 OX=1856287 GN=A9Q98_15360; PE = 4 SV=1
MNQQNKTTKTVVVVGGGTAGWLTAGRLAAHHKSNTDTGLNVILVESPNVPIIGVGEGTWPTMRSTLIALGISETDFIRECNASFKQGARFAKWVDGSEDDFYYHPLVLPQGFTQGDIAAYWLNKADDNKNSFSQDVCFQEAICEQGLAPKTIRTAEFGAVANYAYHLDSGKFAVLLQKHCTENLGVTHILDDVVAVNTLPNEDIASVATKENGDIAGDLFVDCSGFSSLLLGKHYQVPFKSCDDVLFIDTALAVQVPYDNENSPIASHTISTGQEAGWIWDIGLQHRRGVGYVYSSKHSSEEQARAVLAQYVGEQFDSLTVRKIPFVSGHREKFWQHNCVAVGLSAGFLEPLEASALVLVELSAQMISEQLPATRDVMDIVAKRFNETFLYRWDRIIDFLKLHYILSKRSDNAFWTDNRDPKSIPESLQDLMQLWKYRSPADLDFTSNNEVFPAASYQYVLYGMGFESDYSHSAHVLNDWHYAEQQFAKNKKMVQQASALLPTNRELLDKIRQYGFNTI

SEQ ID NO: 83466 - protein, 315 aa, unidentified
  source 1..315: note = Xanthomonadaceae bacterium
  REGION 1..315: note = tr|A0A4Q2XFJ7|A0A4Q2XFJ7_9GAMM Tryptophan 7-halogenase (Fragment) OS=Xanthomonadaceae bacterium; OX = 1926873 GN=EOP89_12240 PE=4 SV=1
VLANGRSVGGDLFVDCSGMRGLLIGQTLGVGYEDWSRWLLCDSALAVPCESVSPLTPYTRSTARHSGWQWRIPLQHRIGNGHVYSSAHIGDQAAADTLLANLDGKPLADPRPVRFRPGKRERAWEKNVVAIGLASGFLEPLESTSIHLIHTGLLRLISLFPRQDFDARDIAEYNRQTDFEYRDIRDFIIAHYKVTDREDTDFWRYCKAMDVPDSLKERLDLFASSARFFVRNKAELFREESWVQVLLGQGMAMRYDPMVDMIPDDQVLGFLSDIEAVVADCAASMPDHASYIQRNCSATATPVTRPTSAGLTVRV

SEQ ID NO: 83467 - protein, 499 aa, Alteromonas sp.
  REGION 1..499: note = tr|A0A2D5LK03|A0A2D5LK03_ALTSX Tryptophan halogenase; OS = Alteromonas sp. OX=232 GN=CL592_07355 PE=4 SV=1
  VARIANT 384: note = Xaa can be any naturally occurring amino acid
  VARIANT 401: note = Xaa can be any naturally occurring amino acid
  VARIANT 406: note = Xaa can be any naturally occurring amino acid
  VARIANT 432: note = Xaa can be any naturally occurring amino acid
  VARIANT 447..449: note = Xaa can be any naturally occurring amino acid
  VARIANT 461: note = Xaa can be any naturally occurring amino acid
  VARIANT 473: note = Xaa can be any naturally occurring amino acid
  VARIANT 497: note = Xaa can be any naturally occurring amino acid
  VARIANT 499: note = Xaa can be any naturally occurring amino acid
MTTPPKQIVIAGGGTAGWIAAAALARKMGPLVNIRLVESSTIGTIGVGEATIPPLRTFHKLLQIDEQAFMRATAATFKLGIRFENWGRIGEQYIHSFGMTGQQSWLAEFVHFYLSAKARGLEGDYGDYCFELEAARQHKFATSAQSNIQYAYHLDAGNYVAFLKRFCSNLGVTHCDGVISQVLQHDNGDIKALRLASGELIEGDFFIDCTGFKGLLIEETLHTGYEDWSHWLLCDSACAVQTTSTEPAAPFTRSAAHHAGWQWEIPLQHRTGNGNVYSSAFMDDNAASEQLMQNVKGEAITTPRTLRFKTGRRNKTWHRNCLALGLASGFVEPLESTSIHLVIMGITRFMQLFPHGGNDQALADEYNQQTQLELERIRDFIILXYHVTQRDDSPFWEHCKXMTVPXSLQTRIALFKEQAHAFQKQNELFRVXSWAQVMLGQGVTPDXXXPAAAMLSDAQLXQSMQQQRQRVLXAVAQLPAHEDFIRRYCATPQKAEXLX

SEQ ID NO: 83468 - protein, 516 aa, Pseudoxanthomonas sp.
  REGION 1..516: note = tr|A0A4Q9TFX5|A0A4Q9TFX5_9GAMM Tryptophan 7-halogenase OS=Pseudoxanthomonas sp. NML171590 OX=2527958; GN = EYC45_08360 PE=4 SV=1
MDEAIRHVVIVGGGSAGWLTAGLIAAEHRDRHGPTLRVSVLESPDVPAIGVGEGTWPTMRDTLRRIGVGEADFVRACDATFKQGSQFVGWVDGGAHDRYTHPFTLPKGYGETQLAVAWAAQGEVPYAHLACFQPHLCDAGRGPKQFATPEFAAVANYAYHLDATRLGAFLRQHCVERLGVQHVVGHMDAVLSHENGDIAALAVRDQPALQGDLFVDCTGLRALLLGAHYGIAPVGVEDILFNDRALALQVPYADPNAPIACQTLSTAQRAGWIWDIGLSARRGVGHVYSSAFTSDEEAEADLRAYIEASGGPAAATLPPARRIELQPGYRPTAWHRNCVAVGLASGFVEPLEASSLVLVELAAARLADEMPATRAQMDLLAARFNETFAYRWQRVIEFLKLHYVLSRRPTPYWQAHREDASLPPRLRELLQLWRHQSPSRSDFPRSEEIFPSASWQYILYGMGARPHSRPARRSEDLQAAQACFAESAALVQRMLPALPSHRALVEHIKAHGLPRL

SEQ ID NO: 83469 - protein, 497 aa, Sphingomonas sp.
  REGION 1..497: note = tr|A0A0Q4FR99|A0A0Q4FR99_9SPHN Tryptophan halogenase; OS = Sphingomonas sp. Leaf16 OX=1735681 GN=ASE65_16485 PE=4; SV = 1
MTEQAQGVRVVVVGGGTAGWMTAAGLVGLLPAACSVTLVESESIGIVGVGEATLPHLRLYLERLGIDEAAFMAATEATYKLGIEFRDFGAIGDRYIHPFGTYGRPLGGVAFHHYWLRRAAAGAMPPIGAFSAGVTAAEQRRFERPGSDPHDPTTSFGYAYQFDATRFAPFLRDWSEARGATRIEGRIVAVERAGDTVRSVTLDDGQRIEGDLFVDCSGFRSLLLGDSLGEPWEDWSHWLPCDRAVAVPCASPEGVIEPYTRATAMPAGWRWRIPLRHRVGNGYVYASGHVSDDEAAAALLAGLDGEALADPRFLRFRAGRRRRSWAGNVVAVGLASGFLEPLESTSIYLVQAAITALIEHFPDGRVADVDRDGFNAAIDAEYDRIRDFLILHYHATTRDDSPFWNHVRTMAIPETLADKLALWRGSAQVSKYSHGLFLEPSWVAVYLGQRVVPDGWDPRADLPDAAGLDRALGSLAWAIADRVAAMPTHDAALERLA

SEQ ID NO: 83470 - protein, 508 aa, Shewanella pealeana
  REGION 1..508: note = tr|A8H1I8|A8H1I8_SHEPA Tryptophan halogenase; OS = Shewanella pealeana (strain ATCC 700345 / ANG-SQ1); OX = 398579 GN=Spea_1098 PE=4 SV=1
MDIKRIAIVGGGTAGWLAANHLGKALQENDQLSITLIESPDIPTIGVGEGTVPAIRQSLQSFGISETEFIRRCDVTFKQSIKFVNWLDKSQHGQDNFYHHLFDMPGSVLQDLTARWLANKNSCYAGSVSPQHEVCEAFRAPKNISDPEYVGKLGYAYHLNAAKFAKLLGENAKQRFRVEHLWANVQEVILGKDGEIVSLVTDSAGKLDFDFYIDCSGFASILIDKALKVPFLNKAEQLFVDKAVVVQVPTANDDVIPPFTISTAHQAGWIWDIALSNRRGIGLVYSSKYMDDETAISKLDTYLGGTLAEHQHRIIPMTVGYRERSWEKNCVALGLAQGFLEPLEATSILLTDFAAGFLAQRFPDTTSQLAAIQQRFNHVMGYAWERVVDFIKLHYCLSDREDSQFWIDNRDPETMSVELKNRLAQWQDFVPCREDFFSRFEVFDLENYLYVLYGMQHTPERRQRNLELGAESCALQHRLHTVAKQLTAELPQHRDLLEKIKRYGLQKV

SEQ ID NO: 83471 - protein, 167 aa, Alteromonas sp.
  REGION 1..167: note = tr|A0A3D0Q295|A0A3D0Q295_ALTSX Tryptophan halogenase (Fragment) OS=Alteromonas sp. OX=232 GN=DEP33_06210 PE=4; SV = 1
MTIPPKQIVIAGGGTAGWIAAAALARKMGPLVNIRLVESSTIGTIGVGEATIPPLRTFHKLLQIDEQAFMRATAATFKLGIRFENWGRIGEQYIHSFGMTGQQSWLAEFVHFYLSAKARGLEGDYGDYCFELEAARQHKFATSAQSNIQYAYHLNAGNYVAFLKRFC

SEQ ID NO: 83472 - protein, 519 aa, Shewanella sp.
  REGION 1..519: note = tr|F7RRK4|F7RRK4_9GAMM Tryptophan halogenase; OS = Shewanella sp. HN-41 OX=327275 GN=SOHN41_02947 PE=4 SV=1
MGTHSIDQVVIIGGGTAGWLSAAILAKKLNSRDSASVQITLIESPTIPILGVGEGTWPTIRNTLQMIGVDESEFMRECDATFKQGAEFVNWRETPAPGTSHSYFHPLSAVFHSAYNFSLAPYWLLGQSNLPYDLATTTQSRISMLGLAPKKITTPSYGAIQNYSYHLNANKFAEFLKRHCIEKLGVKFISANVVDVHLGEQGHITAVSTDTAGEIVGDFFVDCSGFRALLLGQALGVGWHKIDDIIFNDTALAMQVPYADADAPIASHTIATAHEAGWTWDIGLHNRRGVGYVYSSRHTTDERAEQVLRDYVGEQAKGLEVRKIPLNLGYREQFWKGNCVAIGMSAAFIEPLEASAIFLVEAAANMLADAFPRARASLEYTERKFNATFKLRWDKSIDFIKLHYCISGRRDTQYWRDNVDPASIPATLKEKLAQWQYQAPTKYDFDYAFEPFVLDSYLFVLYGLGFNTSLKGNESAYAEGDVAQAKFDEINQLTERLKLELPTHRQLIDKVYQYGFQAI

SEQ ID NO: 83473 - protein, 517 aa, Alteromonas sp.
  REGION 1..517: note = tr|A0A3D5F7S4|A0A3D5F7S4_ALTSX Tryptophan halogenase; OS = Alteromonas sp. OX=232 GN=DGF36_08130 PE=4 SV=1
MSHSANPVNTPEVKRVVIVGGGTSGWMCAAAIARIAPPDTRITLVESEDIGVIGVGEATIPTLMEFNDFLGIKEHDLLRECQGTYKLGIDFVDWYQKGQSYFHPFGFYGRDTPEFSFHQLWLRLNAMAAKGEIPADAPGIISDYNLCTVAAMQGRFAPPQGGADTILSTMRYAYHFDSARYGQMLRRYAEQRHVERIEGIVNSVEQDHSTGLLKSVTLNSGQVLQGDLFVDCSGFKALLIDGAMQSEFVDWHHYLPCDRAIAVQSKLAGAPDPFTRSTADDAGWRWRIPLQTRLGNGHVYSSDFMEHDEALQKLLAGVEGEPVTQPLPLKFRTGHRKAFWDKNCVAIGLAGGFIEPLESTSIHLTQMGIQRLVNLWPGRGCNRSEIAQYNALMTADYERLRDFIVLHYNATEREDTEFWRYVKHMAIPDSLAAKLEIFRSNGRLIPSPEDLFTPHSWLAVMLGQGLYPQNYDVLVDRVPAQALLKNMQMLRMSVAKTAGSMPTHEEFIRRYCQASAA

SEQ ID NO: 83474 - protein, 503 aa, unidentified
  source 1..503: note = Xanthomonadaceae bacterium
  REGION 1..503: note = tr|A0A4Q2XWH9|A0A4Q2XWH9_9GAMM Tryptophan 7-halogenase OS=Xanthomonadaceae bacterium OX=1926873; GN = EOP89_00075 PE=4 SV=1
MAEPRTRVVVVGGGTAGWMTAAALSRLLPTQCSVRLVESEAIGVVGVGEATLPHIRSFNERLGIDEADFMARTRATFKLGIEFRDWNRIGDSYIHPFGTFGRGSGRVDFQHYWARLAREGVSMPPLDSMSYACALARSNKFERPETDRRRLSGTYGYAYQFDATLFAPYLRELAEGMGVRRTEGVILSVERDHDSGDIAAIVLDGGERIEGDLFVDCSGFRALLLGEAMAEPFVDWSHWLPTDRAVAMPCRTRTPVTPYTSAIAMPSGWRWRIPLQHRTGNGYVYASDFVSDDDARRALEAAVEGEALAAPRVLRFKAGRRRRSWVGNCVAIGLASGFLEPLESTSIYLVQQAITTLIEVFPERRIGATDRDEFNRLIDLEYDRIRDFLILHYHATTRSDSPFWDYVRTMAIPDSLSEKLELWRRRGRVVKYREGVFLDPSWVAVYLGQGIVPEGWDGRADPVESNALIGSLDALRNDIADDVAGRPDHRSFIEHYCAMAHAA

SEQ ID NO: 83475 - protein, 499 aa, unidentified
  source 1..499: note = Thalassotalea sp.
  REGION 1..499: note = tr|A0A1Y5H4G0|A0A1Y5H4G0_9GAMM Tryptophan halogenase; OS = Thalassotalea sp. 42_200_T64 OX=1856287 GN=A9Q98_02050; PE = 4 SV=1
MNQDKIQNVVIVGGGTAGWVTAALLSRVLGKTLNITLVESEQIGTIGVGEATIPPIITINNALGISEQEFLQATNATIKLGIEFENWKQKGDSYMHAFGGIGKNFPFCDFYHYWLKAKQLGDKSDFWDFSLNYQAAKHHKFSKAAKIDGTNMPGLKYAYHFDAGMYAQFLRKFSEAKGVTRIEGMVCKVNLNDDNGFVDSIELKDGNVISGDLFIDCTGLAGLLIEKALNTGYVDCSHWLPCDRAMAVPCESVTPISPYTKSIAHDSGWQWRIPLQHRIGNGLVYSSKYLSDEQAKELLLNNLDGKPLAEPKIIPFRTGRRRKQWHKNVVSIGLSSGFLEPLESTSIPLIQTAAIRLIKLFPYQGIKTFEVAEFNRQAKIEIEQIRDFIILHYKVNERDDSQFWRACQRMDIPESLQRKIELFRTTGKLFREQDDLFTEIAWQQVLMGQGIMPEDHHALADALTDQQITELMQNLKILIDRSVNNMPSHDDFINRAKII

SEQ ID NO: 83476 - protein, 489 aa, Alteromonas sp.
  REGION 1..489: note = tr|A0A359K819|A0A359K819_ALTSX Tryptophan halogenase; OS = Alteromonas sp. OX=232 GN=DEH24_16340 PE=4 SV=1
MTAAALANRLPHSHYRITLVESAQIGTVGVGESTIPHIRQFNSALGITEDEFIAATSATCKLGIEFTDWGKVGESYIHPFGELGKPLAGIEFHHLWQAASLQGLDVPIESFSVAAVAARQRKFSPPHASREHLLSTYTYAYHLDASAYARFLRDYAEQRQVIRVEAQIREVKRDHEGGPITALSLDNGEQISADWFIDCTGFRSLLIGDYSQAEFIDWSEWLKTNRAVVLPCEKDGPSRPYTKAMARDAGWQWQIPLQHRIGNGYVYCSDYISDEEAEHTLRSTLPGEALADVRFLDFKAGCRKQLWVQNCVAIGLSAGFLEPLESTSIFLIQMGIAKFLEHLPGTHNDAARNQYNRELTEQYQVIRDFIILHYYLTQRHDTPFWRDCQAMTLPDSLTELILAFRDSGLVDKKQYGLWPAVCIGQHLHPKQVDSRVAAIPPQQLIGILNQLKSDIAAQVATLPNMDDYLSSLVAQTPLQKSGMRAGGQV

SEQ ID NO: 83477 - protein, 532 aa, Alteromonas sp.
  REGION 1..532: note = tr|A0A2D7GVN7|A0A2D7GVN7_ALTSX Tryptophan halogenase; OS = Alteromonas sp. OX=232 GN=CL600_10350 PE=4 SV=1
  VARIANT 328..329: note = Xaa can be any naturally occurring amino acid
MHDNFEDNETAIQSIVVAGGGAAGWLTAAVIAAEHNVKSNHNISVTLVESPDVKILGVGEGTWPTMRDTLRKIGVDENEFLVACDASFKQGTRFTDWRYAPSNQRTDVYDHPFSLPAGFFEGNIGAWWLLNQHNDSGAPSFSHVVSAQSFLCDSHKAPKQAQTPPFAAVANYGYHLDAHKFAEFLRNHCVNVLGVAHVRDHIKAVTVDGIGNISALECTNGNITGDLFVDCTGFAATLIGGYYHSEFTDVSCGLKNDSAVAIQATYKNENEDIASATLSTAHKNGWIWDIGLPHRKGVGCVYSSEFCSEEKAVETLLSYVSSCDKLSXXSGDAIRKISFNPGYRKKAWVNNCVAVGTSAGFVEPLEASALVMVELSAKFIAQNLPAHRDLLKAVAKQFNANFSQRWERIVDFLKLHYVLSERRDSEYWRYMSSLETASDQLQEWLMQWRYRPVSTSDFIYADELFPAASYMYVLYGMKPPSAFHLERLRYSTSLMSSTYNAVRQTQKYGQQQLSALPSNRTLINSIRSVNRA

SEQ ID NO: 83478 - protein, 505 aa, Sphingomonas sp.
  REGION 1..505: note = tr|A0A0Q4FVE5|A0A0Q4FVE5_9SPHN Tryptophan halogenase; OS = Sphingomonas sp. Leaf16 OX=1735681 GN=ASE65_14775 PE=4; SV = 1
MSDQGSAIRSVAIVGGGTAGWMTAAALSHALGSRCAITLVESEEIGTVGVGEATIPPIKLFNDTLGIREADFLRETKGTFKLGIEFVDWARRGHRYFHPFGTFGKPFDLVAVHQHWLAARAAGSTVPLDDLSMAWGAAKRGRFAGPMGDPRSVASTFDYAYHFDAGLYAAFLRRYAEARGVVRIEGKVADVPLDGETGNVAAVTLHDGRRIDADLFVDCTGFRGLLIEGALATGYEDWTHWLPCDRAVAVPCATGGDGMTPYTRSTAREAGWQWRIPLQHRTGNGYVYCSHHLSDDEAAATLMANLDGAALAEPRFLRFTTGRRRQFWNRNVVAIGLSSGFMEPLESTSIHLIQTGIAKLLAYFPTRAFDPLPIAEYNRVAITEYERIRDFLILHYKLTQRDDAPLWRDCAAMQIPETLALKIAHFRHGGRLVTRDMDLFGPPSWAAVHLGQLNDPLSLDPLLDTSDDAAASRSFVDRLAGAIGAMAQSMPAHAAYLQQIGAAAE

SEQ ID NO: 83479 - protein, 506 aa, Sphingomonas sp.
  REGION 1..506: note = tr|A0A0Q4G059|A0A0Q4G059_9SPHN Tryptophan halogenase; OS = Sphingomonas sp. Leaf16 OX=1735681 GN=ASE65_01915 PE=4; SV = 1
MAIDQEPVRQVAIIGGGSAGWMAAAAIARFLPAGTDVVLVESDAIGTVGVGEATIPQLRLFNQHLGIDEDDFVARTGGSFKLGIEFAGWNGADSRYLHAFGTIGRAVGLVPFQHYWLAAGGGERPQSLWSHSACAQAAAQDRFDRDPGNPQAPAGTAWAYHFDAARYAAYLRERAEAGGVVRVEGRVVDVAQHGDSGLIAAVMLDDGRRIEADFFVDCSGFAALLIGRMAGDRWDDWSALLPCDRALAVPCAAVAPVTPYTRATARAAGWQWRIPLQERTGNGLVYSSAHLSDDEAAATLLGNLDGAALGDPRPLRFTTGRRAAPWIGNCVALGLAAGFMEPLESTSIHLVQSGIARLLSLWPSATPRAADIAEFNRQSAREWLCIRDFLIAHYALNGRDEPFWQERRMAPLPDTLRERIALFQQSGRIVRDEHELFAEVAWLQLFVGQGVVAGGYHPLADALPAARRDQFLDISARHVAATVARMPTHDQYLRAHCPAPATKVAA

SEQ ID NO: 83480 - protein, 497 aa, Altererythrobacter sp.
  REGION 1..497: note = tr|A0A0T2QGY5|A0A0T2QGY5_9SPHN Tryptophan halogenase; OS = Altererythrobacter sp. Root672 OX=1736584; GN = ASD76_08120 PE=4 SV=1
MTDRPAPRRVVVAGGGTAGWVTATALARQLGSLVEVTLVESEEIGTIGVGESTIPTARAFHEFLKIDQQAFMKASRATFKLAISFENWARDGDRYLHSFGTMPMRTWMADFQHFWLEARARGEAGEIGEYYLEHEAARLHRMDLKGDPKLNYAYHLDASLYAKFLRRIAENDGVTRIEGKIANVERDGESGDIAVLVLEDGTRLTGDLFIDCTGFRSLLLGQTLETPFEDWGKWLPTNSAWATQSEGVGDAYPYTRAIAHGGGWQWRIPLQHRMGAGFVYASEHMEAQPALDQFLATLEGRPLRDPFPIRFRTGRHRQAWVGNCVGIGLAGGFVEPLESTTIHLIMIGITRLIQLFPFGPDSSAQRERFNELSQNEIERVRDFIILHYHLTERDDTSFWQYMRNLDVPDTLRERMESFAQGAQAWQSTNEIFRVDSWIQVLLGQRMTPQGWNRVGALMKDGRLKQTLEDAGQMVAARVAAMPSHQQFIDSYCGPAQS

SEQ ID NO: 83481 - protein, 500 aa, Streptomonospora alba
  REGION 1..500: note = tr|A0A0C2FMB0|A0A0C2FMB0_9ACTN Tryptophan halogenase; OS = Streptomonospora alba OX=183763 GN=LP52_00645 PE=4 SV=1
MNAPEEFDVIVVGGGPAGSTAATLIADQGHRVVLLEKERFPRYQIGESLLPATVHGVCRLLGADEEIRRAGFTTKRGGSFRWGTSPDPWNFLFALSPELSGPTSYAYQVDRMTFDDILLRNAARHGVEVREESAALEAVTTNGRVTGLVYSDPSGVRRELAAAHVVDASGSTGRLHGAAGGTRHYSDFFQNLAVFGYFAGGGRMPEPDAGNILCAAFDEGWLWYIPLREDLTSVGAVLNHDQAPRIQADREGTLRESIQRCGIVRDLLGDTERITEGTYGSVRVRRDYSYANTRFWAPGITLIGDAACFIDPVFSTGVHLATYSGLLAARSVNSVLAGELSEERAFGEFEGRYRREYAVFYEFLAAFYDMRQREETYFWTARKVTNMQAEDMQAFATLVAGASSAEAALVGADTLAQRFGSSSAELTGAVERTGAARTTSGERMTELFRAPVVADVMAEMNRIQRRGATGPAAGEAPLLDGGLVPSADGRHWVEPDAAPA

SEQ ID NO: 83482 - protein, 504 aa, unidentified
  source 1..504: note = Azambacteria bacterium
  REGION 1..504: note = tr|A0A350QDI4|A0A350QDI4_9BACT Tryptophan halogenase; OS = Candidatus Azambacteria bacterium OX=2053511; GN = DCX24_01670 PE=4 SV=1
MINAVNDVVKSAVKKVVVLGGGTAGWMAAALLKKVLATAVDIELVESEDIGTVGVGEATIPPIRLFNNVMGINEAEFLRETKATIKLAIKFDNWRVPGEGYFHTFGAPGKSLAFCHFHHLWLRARQQGDKTDLWQYDLNYLCAMAGKFAPINAKDSILELPYAYHFDAGLYARYLRKLSEQMGVVRHEGKVQQVFQHPSGDIKCLVLDDGRELSGDLFIDCSGFRGLLIQDKLNAGYDDWSHFLPCDRAVAVPSERFEKTIPYTRAIAHSAGWQWRIPLQHRNGNGLVYSSAHYSDEQASDLLLANLERKALAEPKFLRFKTGRRRQQWQRNVIAVGLSSGFLEPLESTSIHLIQSAVVRLIQLFPHNGICQSAINEYNRQSELEYTQIRDFLILHYHVNQRNDSQFWRDMQQLAIPDSLHQKMAIFADNGQLFRDQNDLFLESSWLQVMLGQGIEPKDYHPIANNFSAEKLRDMLANIQAIKQEPLGKLPDHDTFIQTMISRS

SEQ ID NO: 83483 - protein, 501 aa, unidentified
  source 1..501: note = Alphaproteobacteria bacterium
  REGION 1..501: note = tr|A0A2A5CKT6|A0A2A5CKT6_9PROT Tryptophan halogenase; OS = Alphaproteobacteria bacterium OX=1913988 GN=COA81_01935; PE = 4 SV=1
  VARIANT 11: note = Xaa can be any naturally occurring amino acid
  VARIANT 26: note = Xaa can be any naturally occurring amino acid
  VARIANT 134: note = Xaa can be any naturally occurring amino acid
  VARIANT 148: note = Xaa can be any naturally occurring amino acid
  VARIANT 237: note = Xaa can be any naturally occurring amino acid
  VARIANT 266: note = Xaa can be any naturally occurring amino acid
  VARIANT 306..307: note = Xaa can be any naturally occurring amino acid
  VARIANT 311: note = Xaa can be any naturally occurring amino acid
  VARIANT 469: note = Xaa can be any naturally occurring amino acid
  VARIANT 472: note = Xaa can be any naturally occurring amino acid
  VARIANT 479..480: note = Xaa can be any naturally occurring amino acid
  VARIANT 486..487: note = Xaa can be any naturally occurring amino acid
  VARIANT 497: note = Xaa can be any naturally occurring amino acid
MNDRKIRHIAXVGGGTAGWMTAAALXNALRGNCRVSLIESEDIGVVGVGEATIPPIKLFNQSLGLDENDFLRHTQGTFKLGIQFVDWAKKGQHYFHPFGQYGADFDSVPLYHYWLQARAQGDETSLDEYSMAWXAARNGKFNKPTQDXKLVQSTFDYAYHFDAILYGKYLRGYAEQKGVERIEGKVVDTHLRPEDGFIDHILMEDGTKVKADLFIDCTGFRGLLIEGALKTGYENWXHWLPCDRAIAVPCVNDDTLAPYTRSTALXAGWQWRIPLQHRMGNGYVYCSDYISEDEATTVLLDNLSGXXLAGXRVLGFTTGHRKKFWNKNCIAIGLSSGFLEPLESTSIHLIQSAVTRLLALFPNRDFDPLAQQEYNRITLAEYEATRDFIILHYKATERRDAELWRYVANMDIPANLKYKMDHFRSGARIVASDYELFQNPSWLAVMVGQHVWPEHYAPLADLRGIDGAXMLXGLRRVMXXAVSVMXXHQDYIDHYCXAAAQ

SEQ ID NO: 83484 - protein, 507 aa, Altererythrobacter sp.
  REGION 1..507: note = tr|A0A0T2Q8M1|A0A0T2Q8M1_9SPHN Tryptophan halogenase; OS = Altererythrobacter sp. Root672 OX=1736584; GN = ASD76_15645 PE=4 SV=1
MSPAEKTPVRVVVLGGGTAGWMSAAALARLLGDLVEVELVESEDIGIVGVGEATLPHIRGFVERLGIDEAAFMKATHATYKLGIDFRDFGKIGESYIHPFGSFGEEVAGVGFHHYWLELQRQGMADPLGSYSLAVEAALANKFAPPAQDTSLASSYGYAYQFDATLFGPFMREFGLGIGVKRTEGKVIEVRQDAESGDVTTLVLEDGREISGDLFIDCSGFRSLMLGQTLGEEWEDWTPWLPCDRAAAMPCDHVTEEIEPYTRAIARPAGWQWRIPLQHRIGNGYVFSSAFISEDEACEFLLANVEGTPRAEPRLLRFKAGRRRHSWNRNVIAVGLASGFLEPLESTSIYLAQMAITYLIELFPLGGKADARDRAEFNRLVDMEYDRVRDFLILHYHATTRDDSEFWNHVRTMKVPDTLASKMELWRETARVEKYSDGLFYDASWIAVYLGQGVVPDRYDPRVGIPDPARVARAMGSLQGAIRSEVAAMPGHREYLTAARERLAEPL

SEQ ID NO: 83485 - protein, 489 aa, Brevundimonas sp.
  REGION 1..489: note = tr|A0A1S6ESP1|A0A1S6ESP1_9CAUL Uncharacterized protein OS=Brevundimonas sp. LM2 OX=1938605 GN=BZG35_05190; PE = 4 SV=1
MRPPASLLIVGGGSAGWMTAAAVSRAFGPRLSVRLIEDPQAIGDSGTLAPFDATLPSLSGFNASLGLDETALIAGTGATFRLGTVFRDWSRRDRDYIHPLSEIGGTLEGVPFHHYWLRLKAAGKAPPLEDFALAAVAARAGRFSRPSDDPRSVTSTMAYGLHLPVAPYVAALRAVALRQGVEVVAGAFAEVERGAEPDTLAAVTTRDGRRFEADLFIDATGPAADLIGRLGATHVDWSRWLPCDRIVASTVPGPLGPPLTEARAVRNGWLWRVPLATGMGSARISASAFAGGTTEGTGFTNGRRSQTWIGNCVAIGLSAATLEPLEASGLHRVQSGVSRLLGLFPTGGPMTAGAAEYNRLMAAEADRLRDMLILHYHANARTGEPLWDAVSQTPPPEELAHKIRMFSSRGRISLYDEETFEDAAWVSVFLGQNVIPRRYHPLADHRPLDEVRGQLERMRAVIARAAEAMPTHAAALSGSPIAPALSRVS

SEQ ID NO: 83486 - protein, 505 aa, Sphingomonas sp.
  REGION 1..505: note = tr|A0A0Q4F7Z2|A0A0Q4F7Z2_9SPHN Tryptophan halogenase; OS = Sphingomonas sp. Leaf16 OX=1735681 GN=ASE65_12795 PE=4; SV = 1
MTDRRIASVCIVGGGTAGWMTAAALANRLAGLDVAVRLIESEEIGTVGVGEATLPHIRAFNTTLGIAEPELMRATEATYKLGIEFCDWGRIGDRYIHPFGNYGPVDDGIPFYHQWLRLRAMGDTSRLDEYSYPVIAAEQNRFRHPASEPGRVESSFGYAYQFDASLYAAFLRRYAEARGVERSEGKVVDVALDGGNGFVRNVTLADGRVIGADLFIDCSGFRGLLIEGALQSGYDDWSRWLPCNRAVAVPTESRGPLGPYTRATARTAGWQWRIPLQHRVGNGHVYCSDFISDDDAQQQLIDHLDAPMQAEPRRLRFTTGRRRDFWKRNVVAIGLAGGFLEPLESTSIHLIQDGITELLGLFPDRGFAAEDIDEYNQRMALHFERVRDFLLLHYVATQRDDSPMWRHFRALTLPDSLRHKIDTWRTRGYVVPYQFGLFLPPSWIAVMLGQGLVPGACDPRVAGMAAGALVKRAAALRAEVADAVRATPDHADYIRRSPAAAGLAA

SEQ ID NO: 83487 - protein, 524 aa, Sphingomonas sp.
  REGION 1..524: note = tr|A0A0Q4KT26|A0A0Q4KT26_9SPHN Tryptophan halogenase; OS = Sphingomonas sp. Leaf38 OX=1736217 GN=ASE88_14170 PE=4; SV = 1
MPDADNSPSAVQTVVVVGGGSAGWLAACRLAARSVQTGSRLTVRLVESTNVPSVGVGEGTWPTMRNTLRKIGIDETTFIRSCDAALKQGARFVGWTDGSADDAYYHPLNPPAGAGDIDLAPYWLGRPIAGASADAASFADWVDYQAALCDAGLAPKTITAPEYGGHANYAYHLDAGKFATLLRDHAVNSLGVEHVLGDVVRANQADNGDISDVELADGRRLAGDLFVDCSGFAALLIGGVYDVPFRSCRDILFADRALAMQIPYQTEHDPIACHTISTAQDAGWIWDIGLWTRRGVGHVYSSAHTSDDEAEAALRRYAGPAAEQLPVRRITFEGGHRERFWQNNCVAIGLSAGFIEPLEASALMLIETSLDALVDRLPQTRSTMDAVARQFNATFQHHWQRIIEFLKLHYVITQRRDTAFWRDNVAAASIPDGLQERLDLWTHHSPAPQDFAHAREVFSWPSYQYVLHGMRFGGSYRGQPATAEGSSAAALVARNARVRAELVSKMPRHRDLLRAVREHGLQRV

SEQ ID NO: 83488 - protein, 424 aa, Streptomyces sp.
  REGION 1..424: note = tr|A0A3N6GLD8|A0A3N6GLD8_9ACTN Flavin-dependent tryptophan halogenase RebH OS=Streptomyces sp. ADI97-07; OX = 1522762 GN=rebH PE=4 SV=1
MSSSIFGISAEYDVIVIGGGPAGATTAGLLAKRGHRVLVLDRERFPRYHVGESLIPAFMRPMEEMGLTERMDERGFERKYGGSLVWGNNQVPWKFGFLKGKYPYAFHTRRADLDAMILDRARELGAHIIEDATVKEPIEENGRVVGVRYALRGVDGVREVRAGLVVDASGQARVLSRRFTDVKWHEELRNVAVWTYYDNCERLEGDEYTNILIEGLDEGWFWAIPIDKGTISVGYVTRSATAGEGGQSLEDLFHSEVGRTTKLKHMLRNGRQSAGFRTARDWSYHSDRFYGDGWVLVGDSAAFVDPLFSTGVALASLAGSTLAQIVDQIIKHPEIETKALDRYATAYSGFFDEIREFVERFYDRTKYKEFYHSLAQEMIDPEHERKPADDFVTLISGLSGNHPMFHIGLDDLIADVSQPEITKS

SEQ ID NO: 83489 - protein, 499 aa, Brevundimonas sp.
  REGION 1..499: note = tr|A0A1S6ETY0|A0A1S6ETY0_9CAUL Tryptophan halogenase; OS = Brevundimonas sp. LM2 OX=1938605 GN=BZG35_07310 PE=4; SV = 1
MTEPRKTRVVIAGGGTAGWLAAAVLTRQLGSLLDITLVESEEIGTVGVGESTIPTVRSFHALMGVDEAEFMRTTGATFKLGISFEGWTRPGDRYIHSFGDVGKSTWMGDFQHFWLEAKDRGIAGDLGDYCFEHQAAAQGRFATGPESRINYAYHLDAGRYARYLRGRSEAAGLVRREGRIERVERDPETGLIAALILADQQRIDGDLFLDCTGFRSLLIGEAMGVGFEDWGHWLPTNRALAVQTTSTGPAVPYTRAITHDAGWRWRIPLQHRVGNGLVYASDFLSDDEARARLLASIEGDRLIEPGLIRFRTGRRLKAWEGNCVALSLASGFVEPLESTSIHLIMTALTRLMQAFPFDGISPAVVARYNDQSRAELEGIRDFIILHYHLNEREEPFWQRQREMEVPETLKARLALFAEGAQAYQAQDDLFRVASWLQVLVGQGMQPRQYHHMARLMPDAALAGALGDLKRNIDKAVAALPTHEAFLDRYCRERQPAQAA

SEQ ID NO: 83490 - protein, 504 aa, unidentified
  source 1..504: note = Alphaproteobacteria bacterium
  REGION 1..504: note = tr|A0A4Q3YPU1|A0A4Q3YPU1_9PROT Tryptophan 7-halogenase OS=Alphaproteobacteria bacterium OX=1913988; GN = EON58_05145 PE=4 SV=1
MHNPDSAITPRQVKRVVIAGGGTAGWMAAAALSKTLGKALDIVLVESEEIGTVGVGEATIPTLVTFHRLLEIKEQEFMAATQATIKLGISFENWLEREHRYIHPFGVSGKDHWMAGFVHFWLRGREQGIAGDFGDYCVEHRAAREDKFAHLPRGAMNYAYHMDASLYAKFLRKFSEAHGAQRIEGKIVEVVTDEDSGYITSLKLDGGAEVEGDLFIDCTGFRALLIGKTLNVGFADWSHWLLNDSALAAQTTAVRDAVPYTRAIAGKSGWQWRIPLQHRVGNGIVYSSRHISDDEAKQEFLSSLEGEVIKEPWPVRFRPGQRLQCWSKNCIALGLAGSFIEPLESTTIHLIQRGITRLLQTFPDVITQAGIDEYNARLDSEIQHVRDFVVMHYHLTNRRDTPYWRTVGSMDIPPSLRHRIELFRETGSVFHVPLELFAENSWIEVMLGQGVMPRRHHPVADVMSDAELVRFLGDIRANVDNTVRQMPAHMDYLRGYCPGQPPTR

SEQ ID NO: 83491 - protein, 521 aa, Alteromonas sp.
  REGION 1..521: note = tr|A0A359K845|A0A359K845_ALTSX Tryptophan halogenase; OS = Alteromonas sp. OX=232 GN=DEH24_16000 PE=4 SV=1
MQQSNAITQVIVVGGGAAGWLTAGILAATAAQPCAVTLVESPDVGILGVGEGTWPTMRGTLQTLGIDEAAFLAQCDGAFKQGTLFKQWQHNQASDQYYHPFSLPVGYGDGDLHAWLRSLGEGPSFAHEVSTQPWLCDNHLAPKQIQTPAFAGVTNYGYHLDAYKFAALLKQHATTRLGVKHIVDHVESVDGAPGEAIRAIVGKQYGAIHGDLFVDCSGFSARLIGQHYNQPLISCGEQLVNNRAVAIQARYKSPDTPIASVTRSTAQKNGWIWDIALPERKGTGYVFCSDYCDDDTALDTLLKYLNDDPIVADVDKASARFFSFKPGYRESPWQANCVAIGTSMGFLEPLEASALVMVELAASHLARHMPFTTEQLGPAARQFNRIFSQRWSRVVDFLKLHYVLSKRDDSAYWRYMRNPDSGSEQLQDWLSMWRNRSPDPLDFNLREEVFPTASYLYVLQGMGFTPALSARKKNAAGDSSKVRQRLQQHQQNVHMQLNGLPTNRALLNHLTGAHNINKEYS

SEQ ID NO: 83492 - protein, 507 aa, Sphingomonas sp.
  REGION 1..507: note = tr|A0A0Q4TYJ6|A0A0Q4TYJ6_9SPHN Tryptophan halogenase; OS = Sphingomonas sp. Leaf257 OX=1736309 GN=ASF14_14155 PE=4; SV = 1
MSVVEGQARSILIVGGGTAGWLTAAYLARFLGPATRITVLEDPAIGAIGVGEGAFPTMRSTLRFLGIDEAHFIRTAGATFKQGIRFDDWRHAPDGGRRHRYVHPFEPPFQADGVDLVAHWLAQDPAARAPFAEAVTIQHRVAAAGRGPKQAGEGAFDGPLSYAYHFDAHRLVALLADHAMSLGVRHLEGRLTSAEVGADGLIAHVVTDRQGMLTADLYIDCTGQRAELISGALGEPLLPVRDQLFTNRALACRLPYDAERSHALPTMTIATAHRAGWTWDIGLAEGRGIGTVYSDAHMDDEAAIATLAAYLGQDPHRLEPRLLTFEPGYRQRPWIGNCVAIGLAGGFLEPLESTGIVLIEAAVAMLAELFPHRGPIAAPAARFNTLMTARYRTIVDFLKLHYCLSSRDEPFWCDNGAAGTISDRLRDLLEQWRYRPPGRFDFTLDVESFAHFNYQYILYGMGFADGEGRPTGASGEAERLFRKLQMFGDRAVADLPSHGELVAAMRG

SEQ ID NO: 83493 - protein, 537 aa, Sphingomonas sp.
  REGION 1..537: note = tr|A0A0Q4U166|A0A0Q4U166_9SPHN Tryptophan halogenase; OS = Sphingomonas sp. Leaf257 OX=1736309 GN=ASF14_13235 PE=4; SV = 1
MTPHSDHLIRRVVIVGGGTAGWMAAAAFARLLNNGYTHVTLIESEEIGTVGVGEATIPPIITFNQMLGLDENDFLAKTAGTFKLGIEFVDWGEKGERYIHPFGRHAQDLQGVHFHQLYLRERSRRALPDIAEWSMSAVAAKAGKFGRAKPDARSPIRELFYAFHFDASLYARYLRGYAERGGVTRIEGRIDAVNLRPEDGYVEAVTLADGRRIEGDLFIDCSGFRGLLIEEALGTGYESYAQWLPCDRAVAAPCALPNPAEPDPFTRATARDAGWQWRIPLQHRMGNGLVYCSDYLDSEAAEAQLLGSLEGELLGDHRHLRFTAGRRRQSWNRNVVALGLSSGFLEPLESTSIHLVQAAIQRLVALFPDTRFDPAERDEFNRQMHDLYEDVRDFIILHYKATRRDDTPFWNRVRTMEVPESLARKMALWSGKGRLFREGYDLFSNPSWVAVCLGQGLVPQSWEPAADALDEDLVAQALEQMRAGYADTAARMPSHGDFLRMTAPSPLAPAMTAVRGGQDGFDFARTSSTVQAKGPLL

SEQ ID NO: 83494 - protein, 506 aa, Sphingomonas sp.
  REGION 1..506: note = tr|A0A0Q4KPF2|A0A0Q4KPF2_9SPHN Tryptophan halogenase; OS = Sphingomonas sp. Leaf38 OX=1736217 GN=ASE88_07385 PE=4; SV = 1
MNEHSIREVVIVGGGTAGWMAAAALSKFLGSRQGGAGQPRIRLIESEEIGTVGVGEATIPTIATFNQMLGIDEDDFVAKTQGTFKLGIEFVDWRRIGERYFHPFGQFGHDIEGLSFHQFFLKLAKQGQCADIWHYAPCAVAAAAGRFARQSPDPRSPFGTLPYAFHFDAGLYARYLRAYAEARGVERIEGRIVDVGLRSEDGFVESLTLDGGRRVEGELFVDCSGFRGLLIEGALKTGYEDWRHWLPCDRAVAVPTANIGDPAPFTRSTARNAGWQWRIPLQHRTGNGYVYSSAHISDEDAEATLLSTVEGPPIADPRRLAFVTGRRKRFWNRNVVALGLSGGFLEPLESTSIHLIQTGIAKLLALFPDRRFLQVEAGEYDRLMGSAYDGVRDFIILHYHATTRDDSPFWNHVRTMTVPDSLRRKTELFRAKGRFFRYDDELFSLASWVAVMLGQGITPEGYDPIVDGLDESKLVEAVERMRLGIRQTIAQMPSQSDYIRANCAAI

SEQ ID NO: 83495 - protein, 528 aa, Fulvimonas soli
  REGION 1..528: note = tr|A0A316IGU8|A0A316IGU8_9GAMM Tryptophan halogenase; OS = Fulvimonas soli OX=155197 GN=C7456_10189 PE=4 SV=1
MARLRKILIVGGGAAGWLVACYLAKAVNAAAPDAIRVELVESPGIGLLGVGEATFPSIRGTLSAIGLDERRFLAGATATYKQGIHYRHWVRPPGAPGADHFFHPFNAPSQRPGGPELLPYWLLGEAPAGLSFAEAVSMQTLLVGHNRAPKRLRDPDYQGPLNHAYHFDAALFARVLAEHGERTLGVRRHLATIGRVELDEGGAIAGVVTAELGTFSADLYVDCTGLRSLLSGGAMRSPFRSRRDVLFADRAVAMQVPYPSPDAPIPSCTIATAQEAGWIWDIGLQRRRGTGYVYSSRHTSQERAEEVFRRYLGPAAEGVEPLHIRFETGYRPQHWRRNCVAVGLAGGFVEPLESTGIALVELGAYLLTHLLPGDTGDMERAARHYNEMMVARYERIIDFIKMHYCLSQRRDAPFWADNADPAGIPDALRDKLAQWRHRPPHRLDFVGDLEMFLVSSWQYVLYGMEFRTDLEPMRSAYPRAEEARREFAMIQLAARQALGDLPGHRELVEGLCREHAQRGRDAAAAAAG

SEQ ID NO: 83496 - protein, 547 aa, Sphingomonas sp.
  REGION 1..547: note = tr|A0A3M0FRC0|A0A3M0FRC0_9SPHN Tryptophan halogenase; OS = Sphingomonas sp. PP-CE-3A-406 OX=2135659 GN=C8J44_3322; PE = 4 SV=1
MNEHSIRRVVIVGGGTAGWMAAAAFARFLNNGYTEITLVESEEIGTVGVGEATIPPLINFNQMLGLDENAFLAATSGTFKLGIEFVDWGALGERYFHPFGNYGHDLQGVHFHQLWLREKARRPIDDISAWSMSAMAAANGKFGRATGDARSPVRELFYAFHFDASLYARYLRDYAERAGIVRIEGKIAEVNQRPEDGYVAAVTLEDGRRIEGDLFIDCSGFRGLLIEETLHTGYESYAQWLPCDRAVAVPCALPNPGEPDAFTRSTAHKAGWRWRIPLQHRMGNGLVYCSKYLGDDEAEAQLVASLEGEQLAEPRRLQFTAGRRRDCWNRNVVALGLSSGFIEPLESTSIHLVQAGIQRLIALFPDKRFDPVERDEFNRQMHDLYEDIRDFIVLHYKATRRDDSPFWNQVRTMDVPESLQHKIDLFAGKGRLFREGYDLFSNPSWVAVCLGQGITPQGWEPAADALDEQKVASALEQMRRGYLDTAQRLPTHGEFLRRTALSPLAAQAAPSSSAPASAPAPTSSDDVPFFAFTAESPFDVGGGGSPL

SEQ ID NO: 83497 - protein, 479 aa, Sphingomonas sp.
  REGION 1..479: note = tr|A0A0Q4L2S9|A0A0Q4L2S9_9SPHN Tryptophan halogenase; OS = Sphingomonas sp. Leaf38 OX=1736217 GN=ASE88_07375 PE=4; SV = 1
MTAAALAAVAGPTVADVHLVESEEIGIVGVGEATLPHIRAFNTRLGIDEAEFMRATGATFKLGIEFCDWARIGDSYIHPFGAFGHDVDGVGFHHYLSRAGQIATLPDYSLPVVAARHAKFAPPLDDPRSLLSTFGYAYQFDATRYAPFLRARAERQGVTRTEGRVVDVERSSTGDVVAVVLGDGRRMTGDLFVDCSGFRSLLLGQAMGEPFEDWSHWLPCDRAVAVPCADAGTLKPYTTATAMPAGWRWRIPLQHRVGNGYVYSSAHIDDGAAQDALLRSIESTSLADPRMLRFKAGRRARSWVGNVVGVGLAGGFLEPLESTSIYLIQLAITQLLELFPATPISPVDRDTFNRVVDLEYDRIRDFLILHYHATARDDSPFWDHVRTMAVPDTLAEKLALFRKRGRVMTYREGVFLEPSWIAVYLGQGVVPAGYDQRADRPSDAALAQALARLRTETRDAVMTMPDHAAYIAQSGAAAA

SEQ ID NO: 83498 - protein, 513 aa, Sphingomonas sp.
  REGION 1..513: note = tr|A0A3M0G383|A0A3M0G383_9SPHN Tryptophan halogenase; OS = Sphingomonas sp. PP-CE-3A-406 OX=2135659 GN=C8J44_0831; PE = 4 SV=1
MHQIRNIVIVGGGTAGWLTAGVIAARHKGQREHGFTVTLVESPNIPTIGVGEGTWPTLRATLRKMGVSETELFRHCNAAFKQGARFNRWTTGAVDDGYYHPLMLPQQFGSLNLAPHWLAEDGADSFCDAVTPQGRICDEGLAPKTMATPEFDGVANYAYHLDAGKFSHFLQRHCCDTLGVRHVLADVTDVILDETGDIARVETAQGVSIEGDLFVDCTGFAAKLIGEAMGVPFRSCADTLFCDTALAVQLPYERPDDPIASHTISTAQSAGWIWDIGLPHRRGVGHVFSSSHIDVDAAEQELRAYIGPAGKDLPVRKLSIRAGHRETFWKGNCVAVGLAAGFLEPLEASAIVLIELSAKMIAEQMPVCREVMDVVANRFNATTQYRWGRIIDFLKLHYTLTKRTDTDFWRDNVRPESIPDRLRGLMELWQYQSPWIHDEFDRAEEVFPSASYQYVLYGMGARTAVMPGTIEADAELARRARRENNVQTQRMMSSLPGHRDLIDRIVKHGLQPI

SEQ ID NO: 83499 - protein, 445 aa, unidentified
  source 1..445: note = Alphaproteobacteria bacterium
  REGION 1..445: note = tr|A0A3M1G7E2|A0A3M1G7E2_9PROT Tryptophan 7-halogenase OS=Alphaproteobacteria bacterium OX=1913988; GN = D6782_05805 PE=4 SV=1
MKAFFRALGVAETAWMAQCNATYKNGISFHGWSQKPGCASYFHPFPSPIDAHTTPAFNYNAHARRRGIDLVARPDRFFLSAKLAEKRLAPIANRNFPFELAHGYHFDALLVGRFLRDLAISRGVRHIEQTVVGVDCGETGDVKQIVFDDGRTLGADFFIDSTGFRGLLLQETLKTPFVSYDDNLFNDSAVVLPTAPDAAGLRSETRSIAMRHGWRWEIPLTNRTGNGYVYASAFCSADEAETELRAALGLLDSAIAARHLKMKVGRLERHWVRNCLGVGLSQGFIEPLEATALHLVQATVESFMENFESGGFTNAQERAFNDEINARFEGVRDYIVCHYRMSQRSDTDYWRANAANQALSLSLRAVLDCWFSGGDMREEIRRQDIGRYYTDMSWQAMLGGYGHFPKTLRAPAAHERRFDMAVIDDFIERCALNFRPHRDVLEGAA

SEQ ID NO: 83500 - protein, 513 aa, unidentified
  source 1..513: note = Proteobacteria bacterium
  REGION 1..513: note = tr|A0A1W9H8I4|A0A1W9H8I4_9PROT Tryptophan halogenase; OS = Proteobacteria bacterium SG_bin5 OX=1827382; GN = A4S12_04190 PE=4 SV=1
MHDGKRGRRIERVVILGGGTAGWMTATALAKSFGPRLAITLLESAEIGTVGVGEATIPTIHWFNELIGLDEAEFLRATKASFKLGIEFVDWTRPGHRYFHPFGSYGVALPGVAFHHRWLKAAREGLELPLDAFSLATRLAADNRFAKPQGDARSILSTLGYAYHFDAALYAQHLRGLAEAAGVTRIEGKLQQVERDGESGHVTALTTERGERLAGELFIDCSGFRALLIEGAMGAGYEDWSHWLPCDRAVAVPCARVAETTPYTRSTARAAGWQWRIPLQHRTGNGYVYASAFLPDDEAAATLLANLDGEALAEPRFLRFTAGRRRRCWLGNVVAIGLSSGFLEPLESTSIHLIQSGIAKLLTLFPDADIDPRLAARFDRLFADDMDDIKDFLVLHYHATHDKPEPLWTHCRHMALPESLIEKEAQYRRSGRVMLGPDALFREASWLAVLNGQEVLAEDYSPLADALDPAVNRAQLEQIAAVVARAAPSLPKHDAALAAQIGETRAAPAAALV

SEQ ID NO: 83501 - protein, 503 aa, unidentified
  source 1..503: note = Alphaproteobacteria bacterium
  REGION 1..503: note = tr|A0A539DKV9|A0A539DKV9_9PROT FADH2 O2-dependent halogenase I OS=Alphaproteobacteria bacterium OX=1913988; GN = FD124_459 PE=4 SV=1
MQKQLKTILIVGGGSAGWMTAALFAHLFQGLYQIQLIESEEIGAIGVGEATIPAIKKYNELLKLDEAEFMRTTQGTFKLGIQFNDWLRQGSGYIHGFGVIGQDWEWLRCHHYWLKLRQLGEASDFANYSINTAAALKNRFLPSQPNMPDSPLSHIAHAFHFDAGLYAKYLRRYSESRGVTRIEGKIVDVTLRSGDGFIESVTMENGNVVAADFFIDCSGFRGLLIEQALKTGYEDWSHWLPCDRALAVPCVRSQDFTPYTRSTARSAGWQWRIPLQHRTGNGHVYSSAFMEEAEAEKILLANLDGAQMAEPNRIRFTAGKRKKLWNKNCVAIGLSSGFLEPLESTSLHLIQSTAIRLVRLFPDGDIDPANVAEFNRQSDFEYERIRDFIILHYKATERDDSPFWRYCRTMDIPDTLQRKMDLFRANGRIFREDDELFSEESWIQVMLGQGVIPRSFDPLVELKSGPQIVQFMGNIENVIEKCVERMPTHEAYVEKFCDAKAPS

SEQ ID NO: 83502 - protein, 501 aa, Sphingomonas sp.
  REGION 1..501: note = tr|A0A3M0FQD3|A0A3M0FQD3_9SPHN Tryptophan halogenase; OS = Sphingomonas sp. PP-CE-3A-406 OX=2135659 GN=C8J44_0137; PE = 4 SV=1
MVEQRIRKVVIAGGGTAGWLAAAALTRQLGQLLDITLVESEEIGTIGVGEATIPTMRAFHTILGLDEREFMRATQATFKLGISFENWARDGDRYIHSFGDIGKSTWMGDFHHFWLAAKAAGDPSEIGDYCLELQAAKAERFALPSEGQINYAYHLDAGLYARFLRARSEANGLKRIEGRIASVDRDGETGFIRALVLDSGARVEGDLFLDCTGFRGLLIEGTYGAGYEDWSHWLPTNSALAVQSAATGPAHPYTRAIAHDAGWRWRIPLQHRVGNGLVYASDHLSDDEAHARLLSTIGGAPLTEPRLIRFRTGRRRQVWMGNCVALSLASGFVEPLESTSIHLVMTGLMRLMQTFPFGGIAPSLVTRFNDQAQAELERVRDFIILHYHLNQRPEPFWAARRDMPIPDTLVERIALFTEGAQAYQGGEDLFRVASWVQVMLGQRLTPRDHHRLGNIMGGPQLASVLTNIRSTIADAVAGMPTHQQFLDRYLVTPTAAASGIR

SEQ ID NO: 83503 - protein, 521 aa, Xanthomonas sp.
  REGION 1..521: note = tr|A0A0Q5J9A9|A0A0Q5J9A9_9XANT Tryptophan halogenase; OS = Xanthomonas sp. Leaf148 OX=1736275 GN=ASF90_05150 PE=4; SV = 1
MSYTAPLDPQQRPVRRVVIAGGGTAGWMAAAALSKLLGRQLQITLVESDEIGTVGVGEATIPSLVTFHRLLEIDEAAFMAATQATFKLGIGFEHWRDVDKHYIHSFGHTGTDHWSAGFHHFWLKGRQRGVARDFGDYCLELRAAQEGRFAHLPNGGMNYAYHLDAGLYARFLRRFSEGFGVQRIEGRIGEVQTDPDSGYLTALTLQDGTRVEGDLFIDCTGFAGLLIGKTLGVGSDDWSRWLFADSALAVQTESVGPPVTYTRSRADQSGWMWRIPLQHRVGNGIVYSSRYTDQDSARAVLERNLQGRALTEPRALRFTPNQRHRVWEKNCVALGLASGFLEPIESTNIHLIQRGIVRLLQTFPQTINAVDIAEYNRQAADEIAHIRDFVILHYHATDRRDTPFWRDCAAMDIPDSLRHRMELFRQSGRVFHQGNELFAENSWVQVMLGQGITPQQHHPVADLMGDAELRHFLESIRQRVDATVATLPPHADFLRHHCPAPPLPDPAARAPSDAALAAPAG

SEQ ID NO: 83504 - protein, 504 aa, Xanthomonas sp.
  REGION 1..504: note = tr|A0A0Q5J0R9|A0A0Q5J0R9_9XANT Tryptophan halogenase; OS = Xanthomonas sp. Leaf148 OX=1736275 GN=ASF90_19990 PE=4; SV = 1
MIPAPLRNIVIVGGGTAGWMAAAAFARVLGPTFNVQLIESEQLGTVGVGEATVPHIKAFNNLLGIDEAEFVRQTQGSFKLGIEFVDWQRPGSAYIHGFGTQIGHPLGLLPFHQYWIRQQLRGKAQPLGAYTLNTVAAARGKFMTSAGDVPATSPLANIAYAYHFDASLYARFLRGFAEARGVRRIEGMVEQVQLHPESGHVVSLQLASGQVIAGDLFIDCSGFRGLLIEDALHTGYHDFTHWLPCDRALAVPCEKIGPPTPYTRCTARAAGWQWRIPLQHRTGNGYVYSSAHISDDEAAASLLANLDGTPLGDPRPLRFTTGRRKQCWNRNVVALGLASGFLEPLESTSIHLIQSGISKLLELFPRQGISPVLVQRYNDRLAFEFDRIRDFLLLHYHATERDDSAFWRHCRTMPITPELQATLDLFRDSGRFYRNAEEMFAEISWVQVMVGQGILPTGYHPLVDQVPDTDAEGFLASVAQTISHCVDVMPTHQQFIDRYCKAVS

SEQ ID NO: 83505 - protein, 429 aa, Shewanella pealeana
  REGION 1..429: note = tr|A8H9H1|A8H9H1_SHEPA Tryptophan halogenase; OS = Shewanella pealeana (strain ATCC 700345 / ANG-SQ1); OX = 398579 GN=Spea_3898 PE=4 SV=1
MPTDKAVQNEFETDACESIDVAIIGAGPSGSIAASLLQAQGKKVVVLEKQYFPRFSIGESLLPCCMTVIEEANMLEAVNQAGFQFKNGAAFKYQDSYTSFDFTDKFTAGPGTTFQVERAQFDKLLADEAVKQGVDIRYGHSVESIDLAAEPMLNIIDDKGGSQSLKAKFVLDASGFGRVLPRLLDLEKPSSLPTRSAVFNHVRDNISDPNFDRNKILISVHPDNQDIWYWLIPFSDGRCSVGVVGEPHQLEGLHDGVDCDIDGDLNSILKTMLNQEPGLKKLLANAELINESGLLKGYSANVTTLATDKFALLGNAGEFLDPVFSSGVTIAMQSASMAAKTLIKQLDGESVDWQQDYAAPLMRGVDTFRTYVEAWYDCRFQDAIFFKDPDPKIKQMICSILAGYAWDEKNPFVSESKRRLNMVVELCRS

SEQ ID NO: 83506 - protein, 507 aa, unidentified
  source 1..507: note = Alphaproteobacteria bacterium
  REGION 1..507: note = tr|A0A2W4T9K3|A0A2W4T9K3_9PROT Tryptophan halogenase; OS = Alphaproteobacteria bacterium OX=1913988 GN=DCF28_03700; PE = 4 SV=1
MAEPIKSILIVGGGTAGWMAAAAIQRSVGPNATVTLVESADIGIVGVGEATVPTIKDFNALIDLDEAEFMRETQATIKLGIEFNGWGKADSAYFHPFGTYGPGATIGDFPQSYFTLREQGRAGSLEAYSICAHAARRGKAGARSGDARSPYNGLHTAYHFDAVLYGKYLRRVCEGRGVTRVEGEIVDVVLKPETGFVDHVVLKDGRTLIADLFIDCTGFRGLLIEGALKAGYEDWSEWLPMNRALAVPCAKVGPVTPYTTSTARDAGWQWRIALQHRTGNGYVYCSDYIDDNAARETLLANLDGEALAEPRPLKFVTGRRKKLWDKNVVSLGLSSGFIEPLESTSIHLVQVGLIRLLQHWPDTEFSPINIAGYNRRLGREIELIRDFVILHYHATDRDDTPFWRHVRDMAIPDSLSERVEMFRDRGLLFQVGADEYFSQGSWLAVMYGQGIEPAAHNPLYDYQDLDRVADGFEQVKRTWAAAAEALPSHEDFLKRGGMWAGDAPAAA

SEQ ID NO: 83507 - protein, 501 aa, Brevundimonas sp.
  REGION 1..501: note = tr|A0A1S6ESP8|A0A1S6ESP8_9CAUL Tryptophan halogenase; OS = Brevundimonas sp. LM2 OX=1938605 GN=BZG35_05195 PE=4; SV = 1
MTTDTRIRKIAIVGGGTAGWMTAAALAKILGPGYADITLIESEEIGTVGVGEATIPQIRTFNTMLGLDEDEFVRRTQGTFKLGIEFRDWGRIGDSYFHPFGPFGVDMEGVSFHAFWLRLNQLNDPARITDYSLQAMAAERGKFMRPIAAGRSPLSKIAYAFHFDAGLYAKYLREYSEAKGVVRMEGRIVDVALRGTDGFVEAVTLDDGRRVEADLFVDCSGFRGLLIEGALKTGYEDWSHWLPCDRAVAVPCERVADPVPYTRSTARAGGWQWRIPLQHRTGNGYVFSSRFIDEAAATEDLLGQLDGKPLADPRTLRFVTGRRKQSWNRNVVALGLASGFIEPLESTSIHMVQSGIANLLAMFPTTEFDPAETRRYNRVVSHEAERIRDFIVLHYNATQRTDSALWDYVRTMPLPDSLMEKYEIFRSRGRVFRENEELFNDTSWFAVMIGQNLKPAAYDPVADVLSVEETRRRLLQTAEAIRNSADYMPSHMAFVAEHCAA

SEQ ID NO: 83508 - protein, 516 aa, unidentified
  source 1..516: note = Alphaproteobacteria bacterium
  REGION 1..516: note = tr|A0A3M1FYW5|A0A3M1FYW5_9PROT Tryptophan 7-halogenase OS=Alphaproteobacteria bacterium OX=1913988; GN = D6782_12015 PE=4 SV=1
MAKTINSVVIVGGGTAGWITAGTLAAKLQADSDAGVSVTLVESPNVPIIGVGEGTWPTMRKTLRHMGIRETALIRQCNASFKQGAKFAKWATGADGDFYYHPLVLPQGYHEINLAPHWLENGDGKSFSEAVCPQQYLCERGLAPKQITTPEYASIANYAYHLDAGTFSRFLTSHCVDKLGVRHVLDDVICVNAAENGDIASLSTKAHGDIMGDLFIDCTGFKSLLLGEHFGVPFRSCKAILFPDTALAIQVPYASEDSPIVSHTVSTAQDAGWIWDIGLSTRRGVGHVYSSAYMTDEQAAARLRDYLRPTMPDVESAVFRKISINPGHRTKFWERNCVAVGLSAGFLEPLEASALLLIEISAAMIAERFPVTRESMDIIAKRFNDTFLYRWDRVIDFLKLHYVLSSRTDTRFWVDNRDPRTVPESLQELLTLWQYQHPWHDDFDRAVEVFPAASYQYVLYGMGFKTGRYRHMSETSKKIAQKHFRQNEEQAKNLAATLPTTRALIDKIRQYGLQRV

SEQ ID NO: 83509 - protein, 509 aa, unidentified
  source 1..509: note = Alphaproteobacteria bacterium
  REGION 1..509: note = tr|A0A2A4UFB1|A0A2A4UFB1_9PROT Tryptophan halogenase; OS = Alphaproteobacteria bacterium OX=1913988 GN=COB49_11485; PE = 4 SV=1
MTLKHVTIVGGGSAGWITAAYMNAVLNNDTQKTVEFTVIESPTRPRISVGEATVPTISHLLQTLKIDENDFMGGTGATFKQGIKFVNWLKQDDHTYYHPFDRRETGATGYRATRDWLKSDRSIPFAETVSVQPRLCDMNYSPKLAESGRYESPLTYAYHLDAERFADYLCTYAKSNGVRHIEEDVVEVTMAEDDRISAVITSSGKAIKADLFIDCTGFSSLLIGKKLGVGFKDYSQWLLCDRAVTMQIPYEHHYPGQIRPYTLSTALSAGWVWDIGLQDRRGVGYVYASAFLDDTSAEQALREYEGKHSADISCRTLKFSVGRREQFWVSNCVAIGLSAAFVEPLESTGINMIEFAAITLAEHFPYNNDFKPLAARYNKIMSNRFNDALSFINLHYCLSQRSDSAFWKEVQCQEHIMETVQERLDLWQLKRPSEADFDNHFILFNHINYEYILNGMNFMMSETGDHNIRPATVVPEVVLKNIELGATHLIPHDTWLQQNLGMKQYPTGK

SEQ ID NO: 83510 - protein, 544 aa, unidentified
  source 1..544: note = Azambacteria bacterium
  REGION 1..544: note = tr|A0A350QF16|A0A350QF16_9BACT Tryptophan 7-halogenase OS=Candidatus Azambacteria bacterium; OX = 2053511 GN=DCX24_04810 PE=4 SV=1
MQQRKVVIVGGGSAGWMTAAYLNGALNKQGTEQNVLIELLESPDIPRISVGEATIPSMRHLLAVVGVDEREFMQATDATFKQSIKYCNWVHNDSSFYHHPFSSMRVQPIDRAGRDWLKSDRSIPFMETCSAQPIICEMGLAPLMLGKWDMGSRLNYAYHMNAQKFADYLRDFSTARGVVHTLANLTGVDMQGPDKIVAVTTDQQQRLTADLFVDCTGFKAKLIEEKMNVGFEDCSQWLLCDRAITMHLPYDKFYPGMIRPYTTATALSAGWIWDIPMQNQRSVGYVHASQFISIEQAEQELRAYQGPGTEQLKARVVDFKVGRRQGNWRGNCVAIGLSGGFIEPLESTGLYLSDLGAVLLAEHFPYDDQDMDILAGRYNRLMANRFYEILDFINMHYCMTKRTDTAFWREVQKPERITERLKAKLAFWRIKPPSAHDFQDQWYPGMVTTGADTPSSLSADSRAAIDTGGLWNHESYECILYGMGFLDDECRQRYGPDLPPTSVHPAIIQRLQMARQKLPPHAIWLNRVLGMPEYPTAYQPKGWL

SEQ ID NO: 83511 - protein, 326 aa, Shewanella sp.
  REGION 1..326: note = tr|F7RP79|F7RP79_9GAMM Tryptophan halogenase; OS = Shewanella sp. HN-41 OX=327275 GN=SOHN41_02077 PE=4 SV=1
MNGKNVKRIEGKITSVDLAPCGKIDAVKLQTGQVIAADFFIDCSGFAALLIEKALNVGFESYQHWLPCDSAYAVPCEKVPESTPYTRAIAHSMGWQWRIPLQHRTGNGLVYCSRFISDDEAQQFLLNNLDGKPLAEPIKISFTPGRRLKQWHKNCVAIGLSSGFLEPLESTSLHLVQSAIIRLSKLFPHHGITSNAIDEFNHQSQNEFEQIRDFIILHYHLNQREHAEEMRLWQQCQTMDIPESLQQKIDLFRETGAVFRHQEELFTETAWVQVMLGQGIMPQDFNPLANTIPAPDLTVFLQNMRTIIDNAVDNMPTHNQYLASLG

SEQ ID NO: 83512 - protein, 506 aa, Shewanella sp.
  REGION 1..506: note = tr|F7RLS9|F7RLS9_9GAMM Tryptophan halogenase; OS = Shewanella sp. HN-41 OX=327275 GN=SOHN41_01318 PE=4 SV=1
MKKHKKNIQQILILGGGTAGWMAAAALVNNPLFAAIKICLVESANIGTIGVGEGSTPHLKRFMDKLGICEADWMEKCHASYKTGIDFINWNGDGQQYFHPFYFQLDVKPAEVFFVNANARRRGQGDAVQPDDFFSSGVLAKHNLSPRPQRELPFTNEYGYHFDATQLANYLKEYACKRGVLHIIGDVISVSQHNNHDINSLTLASGQRLDADFFIDASGFNAQLMHKNLNVPFQSFAEALLNDSAVTVPVDLNSTPDALFAKYHTRATALGAGWLWQIPLAHRIGNGYVYSSRHICAQTATKTLLHHLNLSESTPVRHLKMRVGVSEKAWHNNVLAIGLAQSFIEPLEATSIMVTQFTLERFMALFERYQLNKQAETLSRQTLNQSVMQLVLGVKDYIQAHYVTSKRSDSNYWQDARNVVISLRLKQLLQAWHRGEDFDFQLYKYDQQLAYFRPSWYSLLAGMDFRDPQLKLPFKPISAEITAQAKSYCAAIVNHYFGPYNTTQNT

SEQ ID NO: 83513 - protein, 503 aa, unidentified
  source 1..503: note = Alphaproteobacteria bacterium
  REGION 1..503: note = tr|A0A3M1GBK3|A0A3M1GBK3_9PROT Tryptophan 7-halogenase OS=Alphaproteobacteria bacterium OX=1913988; GN = D6782_05795 PE=4 SV=1
MLESAIRKVVVVGGGTAGWMTAAVLSKIFAPKVSITVIESDEIGIVGVGEATIPQIRHINNFLGLDENDFLRNVQGTFKLGIQFNGWRRPGDSYIHAFGDIGMLIGLTPFHHYWLRARAAGARDSIWDYSLNAQAAAGDRFERLERVGTSRLAGIKYAFHFDAALYARYLRRAAESRGTVRVEGKIVAADRDEATGFVRSVRLENGQAHDADFFVDCSGFRGLLIEQTLHAGYEDWTRWLPCDRAVAVACRHGEKLRPYTQATARRAGWQWRIPLQHRVGNGHVYSSAHVGDDEAVRVLLDNLEGAPLAEPRLLRFTTGMRKRHWVKNCVAIGLASGFMEPLESTSIHLIQSSIARLVSMFPDRNFNAALIDEFNRQARFEFESIRDFLILHYHANERDDSDFWRACREMEVPPSVQAKIELFRASGRIYREHEELFTETGWLQVLLGQGIVPARYHPMADMLDESTCRRFLADIRILIGRAVSAMPSHRAFIDTHCRGSETD

SEQ ID NO: 83514 - protein, 490 aa, Sphingomonas sp.
  REGION 1..490: note = tr|A0A3M0FHW0|A0A3M0FHW0_9SPHN Tryptophan halogenase; OS = Sphingomonas sp. PP-CE-3A-406 OX=2135659 GN=C8J44_3323; PE = 4 SV=1
MPGERLRSVLVAGGGITAWCAAAALKRRAPFLEVTILRCTPSREALADRIACTLPSLLGFHDDLGIGAADGIARTASGYRLGTLFRGWATRLPDYVHAYGRYGRSLGPTAFHLHWVRSVLEGARAAPFDSHSPAAALARAGRFAPPMPDTPFADHEYGLTLDLSRYRTMMRAFALHVGVREIAGEIADVVRDTGDRIAAVELAGGSRIVADLFVDATGPDATLRGALDDVRDDWSAWLPCDRVLIADGSAEPLVLTTAVAHPAGWRWSSGAQSGFAYASGAISDAKAARVLRNPAGTAPGEPIRVRPGTRPHPWRGNCIAIGDAATEVEPLEWCNLHLALSAIDRLIAMLPGRVSTPGEAAEFNRQTLAEAERVRDFLALHYRVARRDDPLWQAVASAVPPSSLAHTLAQFAERGRLPFYEEETFARDSWAAVLIGQGVLPRRIDPLVAAVPAAAAQTAMARLTTEIAAALPHIPTHAAYCAAQTRHLLP

SEQ ID NO: 83515 - protein, 504 aa, unidentified
  source 1..504: note = Alphaproteobacteria bacterium
  REGION 1..504: note = tr|A0A3M1KJB4|A0A3M1KJB4_9PROT Tryptophan 7-halogenase OS=Alphaproteobacteria bacterium OX=1913988; GN = D6757_00605 PE=4 SV=1
MKAGADSGRMRDIVILGGGTAGWMAAAVLARGLGNAVRITLVESAAIGTVGVGEATIPQIQHLNRFLGLDEGEFLKASEGTIKLGIRFEGWWRADAGYIHAFSDIGVAAGLIGFHHYWLRARKELGPETAGDLWDHSLNAVAAARARFAPMDRVGETPVPGTRHAYHFDASLYARLLRSHAESMEVRRIEGRVVAVERVAESGEIAALLLDDERRVAGDFFIDCSGFRALLIESEMQAGFEDWSHWLPCDRAVAVGCAPVRPYPPFTQAFARPAGWQWRIPLRHRTGNGHVYASALIDDDEATRTLLDHLDGAPVGEPRVIRFRAGRRRAAWVGNCLALGLAGGFLEPLESTSIHLVQSGLQRFLEMWPARPASPALVAEYNHRTAKEWEAIRDFLILHYHRNARTDGELWRACREMTIPDRLAQRLALFAESARIYPEPDELFTEMAWLQVMIGQGLYPNDHHPIADLMPADELADFLARIREIIARAVSAMPSHDEFLARIS

SEQ ID NO: 83516 - protein, 508 aa, unidentified
  source 1..508: note = Massilia armeniaca
  REGION 1..508: note = tr|A0A2R4C4L3|A0A2R4C4L3_9BURK Tryptophan halogenase; OS = Massilia armeniaca OX=2072590 GN=C9I28_01565 PE=4 SV=1
MSHPIRHIVIVGGGSAGWLTAGVIAADHRAHAPDGLRVTLIESPDVAPIGVGEGTWPTMRDTLARIGVSETAFFRECDAAFKQGSRFDGWRGSDGADYYFHPFVLPQGYGETDLVGPWQREFAHVPFADLVSFQPHLCAQGRAPKQATTPEFAAVANYGYHLDAGKFGIFLRKHCLERLGVHYVPDHVTGIASHENGDIAALQTRAHGALAGDLFIDCTGMQSLLLGQHYGIGLVDQRHVLFNDSALAVQIPYPGEDSPIASQTTSTAQRAGWIWDIGLPTRRGIGHVYSSAHTSDDEAAADLCAYLGADASPRKLTFQPGYRREFWHRNCVAIGLSAGFIEPLEASALALVELSAALVSDDLPATRASIDIVARRFNDAFTYRWERVIEFLKLHYVLSRRPGAYWDDHRDERSVPPRLRELLALWRHRPPSRLDFHRIEEVFPSASWQYVLYGMGFTPEPGGTRRADPTVAAQYYREAADLTRRMLGALPSNRALIDHIRRHGLQKI

SEQ ID NO: 83517 - protein, 507 aa, Sphingomonas sp.
  REGION 1..507: note = tr|A0A3M0FRI2|A0A3M0FRI2_9SPHN Tryptophan halogenase; OS = Sphingomonas sp. PP-CE-3A-406 OX=2135659 GN=C8J44_0258; PE = 4 SV=1
MSDRALRSIAIIGGGTAGWMAAAALARVLGTHNVAITLVESEEIGTVGVGEATIPPIQAFNALLGIDEDAFVKATMGSFKLGIEFVDWLRPGTRYFHPFGVYGTDIGAVPFEGLWHRLRTQGLADPLEAYSICAQAAKDGRFMRPLTDGGNTPLHRIGYAFHFDASLYARFLRTHAEAAGVVRREGRVVDVALRAADGFIEAVTLASGERIEADLFVDCSGFRSLLLGVTLGTGFEDWSHWLPNDRAIAVPTVSNGPPTPFTRSTARAAGWQWRIPLQHRTGNGYVFSSAHLSEDEATATLLANLDGEPLADPRTLRFRTGRRDAFWVKNCVGLGLSSGFLEPLESTSIHLIQAGIARLLEMLPTRDFEAADIRRYNRLMTAEYDSIRDFIILHFHATERADTPYWDHVRTMTVPETLAERIRIYQATGRVFRESDDLFSKTSWLAVMDGQGLRAKEFDPLAASLSVDDAQARLARIAAVTAAAAARMPPHAEFIARHCAGAIASRT

SEQ ID NO: 83518 - protein, 139 aa, unidentified
  source 1..139: note = Alphaproteobacteria bacterium
  REGION 1..139: note = tr|A0A4Q3XD30|A0A4Q3XD30_9PROT Tryptophan halogenase (Fragment) OS=Alphaproteobacteria bacterium OX=1913988; GN = EON59_18495 PE=4 SV=1
MKTSEQMASNDKAIRRILIVGGGTAGWMAAAALSRFSATAHATVTVIESDEIGTVGVGEATIPPIASFNALLGIDEADFMRRTQGTFKLGIQFVNWGRLGDRYIHPFGDFGVDMEALKFHQFWLARHQAGDTAPLGDYS

SEQ ID NO: 83519 - protein, 492 aa, unidentified
  source 1..492: note = Proteobacteria bacterium
  REGION 1..492: note = tr|A0A1W9H2B0|A0A1W9H2B0_9PROT Tryptophan halogenase; OS = Proteobacteria bacterium SG_bin5 OX=1827382; GN = A4S12_08545 PE=4 SV=1
MMRIVVLGGGTAGWMAANLFAAAWPHARVSVIESPEIGIIGVGEGSTPQLKDFFDRLGLAERDWMPRANATYKTGIAFHGWSERAGCESYFHPFPSDLDVHTNDAFFTHCAARRGGVDFAAHPDLFYLPARLAAEARGPHPAEDFPFETSYGYHFDAFLVGAVLRDHAVAKGVAHLPLKVTEVRVSPEGQVTALVTEDGQAIAADLFVDSSGFRSVIAQEALGVKFLPFADNLFNDSAVVMPTPRAGQAIAPQTRATALSAGWCWAIPLQNRTGNGYVYSSRYLSAEAAEAELRAHLGLGPDDPPARHLKMKVGRVENSWTANCLTVGLSQGFIEPLEATALHIVQATVEGFIAAYEAGGFTPQHRDDFNRRINARYEGIRDYIVCHYRVNRRTDSDYWRDNARNQALSDTLRRLLHIWYSGGDLVAEVDRLGISGYYSAISWHCLLAGYGIFPERIEPRGRGHDMARIATLLAKSARHFAPHHEQLAALQG

SEQ ID NO: 83520 - protein, 558 aa, unidentified
  source 1..558: note = Massilia armeniaca
  REGION 1..558: note = tr|A0A2R4CFE2|A0A2R4CFE2_9BURK Tryptophan halogenase; OS = Massilia armeniaca OX=2072590 GN=C9I28_23500 PE=4 SV=1
MSVGWRQQPSPCPTAGSGTKTGHEPDNRTWRRQTLQPVRNILIVGGGTAGWLAAGFLAKTLGTQGGGIAITLVESKDIGIIGVGEGTFPSIRGTLSVLGIDEGRFIRECSATFKQGVRFNHWVRAPGTQGADHYFHPFSQPSQRPGGPELLPYWLLGAAGADVPFAAAVTMQKHVADMSHGPKRIGDADFMGPLNYAYHFDAGAFATLLASHAQTLGVRRVEGTVDQVKLDDAGAIASVVTREAGELTAALFIDCTGFRARLIGEALGSPFRNINDTLFVDRALAMQVPYQRPDAPIPSYTISTAHEAGWTWDIGLHERRGIGYVYSSRHTSDDRADQLLRQYIGPASDGREPRLLKLNVGYRETQWVKNCVAIGLAGGFLEPLESSGIGLIEAATYLVSYLFPYDGNLAPAAKLFNAQMKARYERIVDFVKMHYCLTQRTDNAFWIENAHASTIPESLREQLAMWRARAPHRLDFVTDIEMYPPSSWQYVLYGMEFPTRQMAHRAALPEVAAARREFQTIAQLSQHALADLPTHRALVEYYRQGGAKAAAPVRRLYV

SEQ ID NO: 83521 - protein, 244 aa, unidentified
  source 1..244: note = Alphaproteobacteria bacterium
  REGION 1..244: note = tr|A0A4Q5QXW9|A0A4Q5QXW9_9PROT Tryptophan halogenase (Fragment) OS=Alphaproteobacteria bacterium OX=1913988; GN = EON55_11015 PE=4 SV=1
PYTRAIAHDAGWRWKIPLQHRVGNGLVYCADYLDDDAARERLLASVEGEHLIEPRLIRFRTGRRKAAWHRNCIALSLASGFVEPLESTSIHLIMIALTRFLQLLPAGRPSAAAIARFNDQAAREIEGVRDFVILHYHMNDRQEPFWRDRREMKVPDSLAERIALFRDSGNAFQADHELFRVASWLQVMLGQRLTPDSHHPVVKLMPPDQLKAVMKSMSDTIATTVRQLPPHQAFIDRYCAGSAG

SEQ ID NO: 83522 - protein, 503 aa, unidentified
  source 1..503: note = Alphaproteobacteria bacterium
  REGION 1..503: note = tr|A0A2W4T7I8|A0A2W4T7I8_9PROT Tryptophan halogenase; OS = Alphaproteobacteria bacterium OX=1913988 GN=DCF29_08800; PE = 4 SV=1
MAEPISSVLIVGGGTAGWMAAAALQRTLCPHARVTLLESEDIGIVGVGEATVPPIRDFNAMIGLDEAEFMRETKATLKVAIVFQDWGHLGNRYVHPFGTFGRGPTLADFQQTYFSLKAKGLADDLGDCSVCWRAANAGKVGDRNPDPNSPLNSLFTAYHFDAVLYAKYLRKVCEGRGVERVEGKVVDVVQRGEDGFVKGVTLEDGRTLEADLFIDCTGFRGLLIEGALKAGYEDWSHWLPVNRAMAVPCASVKPLTPYTLSTAREAGWQWRIALQHRTGNGYVYCSDHITDDAARETLLANLDGEALAEPRPLRFVTGRRKKYWEKNVVSLGLSSGFIEPLESTSIHLVQAGIYRLLQHFPDKDFSPVNIDGYNRRLGREVELIRDFVILHYHASQRDDTPFWRQVRDMPIPDSLAERVEAFRDRALLYQVGADEYFSQASWLAVMYGQGIAPRSANPLYSLNDAERPAAGLRQLSDVLARTVAALPDHETYLKAKGMWSGAD

SEQ ID NO: 83523 - protein, 507 aa, unidentified
  source 1..507: note = Alphaproteobacteria bacterium
  REGION 1..507: note = tr|A0A2W4VDV4|A0A2W4VDV4_9PROT Tryptophan halogenase; OS = Alphaproteobacteria bacterium OX=1913988 GN=DCF29_08480; PE = 4 SV=1
MKKICIVGGGTAGWVAAALMAEHFKGRMAEIELVESDDIGTIGVGESTVPPFLEMLKRLGIDERDFIQKTQASFKLGIQFEDWTQKGESYFHPFGAIGAPVDVSDFYPVWLKARMNGYDRPLMDFAAAARMADQGRFMLPFKAQRTPIGGASYAVHVDAKRVARYLRDFAEARGVKRTEGIVEDVATRPDGFVSSLKLKSGQTVEADFFIDCTGFRALLIGKTLGVGYTDWSEWLMCDRAIAVQTENVGPPKPYTLAQAQDCGWRWRIPLQHRTGNGHVFCSRYMSDDEATARLLEQVEGRPVVNPMVVPFKTGVREKIWDKNVLSLGLASGFIEPLESTAIHLIYRGMDFLFRLMPDLDCDPNLIAEYNRRMTVDYEEIRDFIILHYALTRRDDTAFWRACRDMVLPEGLQHKLEVFRANGSLVEALDPLFRNVSWYAVMDGMGVRPRSYPPLVDRIDFNGLTDEMDRAANILNAFVADLPTHQAFIDTHCQAPPVEAPAPLVMPA

SEQ ID NO: 83524 - protein, 521 aa, Altererythrobacter sp.
  REGION 1..521: note = tr|A0A0T2Q8P5|A0A0T2Q8P5_9SPHN Tryptophan halogenase; OS = Altererythrobacter sp. Root672 OX=1736584; GN = ASD76_15675 PE=4 SV=1
MTVSDSTTSEGREVERVVIVGGGTAGWMAAAALSRFLDNGRRQFHLVESEAIGTVGVGEATIPPILNFNRMLDINENEFLRETQGTIKLGIEFVNWGRIGDRYTHPFGFFGQELHGIAFHQLWLREQGRGNPGYISDYCMSAVAAANGRFGRPSQNTKPPVSEMLYAFHFDASLYARYLRGRAEKQGVRRHEGRIVQVHRDSELGDVRSVELESGERIEGDLFIDCSGFRALLIGETLGVGYEDWSQWLPVDRAIPVPTTNIATPDPFTRATAHSAGWQWRIPLQHRTGNGHVYCSAFMDDDEAERILMANLEGEPFADRRVIRFTTGRRKQSWSHNVIALGLSSGFLEPLESTSIHLIQNGIQRLLALFPDRQISSIERDEYNRGMQDLYEDIRDFIILHYKATQRDDTPFWRHVRDMAVPETLTRKLELWRLHGRVFREGAELFGLTSWVAVLLGQNIWPDTYEPIVDTLDEAKVAVAFKEMRERYYAAAMALPSQEEFLRMAGAWAAQDVRPQVAAAQ

SEQ ID NO: 83525 - protein, 509 aa, unidentified
  source 1..509: note = Alphaproteobacteria bacterium
  REGION 1..509: note = tr|A0A2A4UWS4|A0A2A4UWS4_9PROT Tryptophan halogenase; OS = Alphaproteobacteria bacterium OX=1913988 GN=COB49_04730; PE = 4 SV=1
MYKKKIVIVGGGTAGWLTAAYLSRQLAGADHAELKITVIESSDIPPIGVGEATVPTIRDTLAGIGIGEYDFIRECDATFKNGIKFVQWNNPPETHPGEYYFHPFEKPLIIGTEPMAGHWLKGEDPLQRIFGDAVGIQHQVAVRNLAPKRFEDHAFSGPLPYAYHLDAGKLAVMLGKNAIAKGVEHIIATVKSVTSKPDGDIAALELEDGTMVSGDIFIDCTGFLGLLIEKHYKTDYTNMGHILLCDKALAFQIPCDEDDYKINPYTTATAQTAGWVWDIGLKNRRGTGYVYSSAHQSADEAEALYRKYIGPKVDNMSIRSLDMNIGYRKKQWVKNCIAVGLSSGFLEPLESTGIHMIEIALPMLVQMLPRYFKGGQPQDRYNEIMKNQYELVIDFIKLHYFLSSRKDSQFWLDNTSDHTATKDLIEKVRSWEEGYPNIYDLKYIHSIFDHLSYQYVFFGMGRKPKTNIALGDCNVDMAIKTFNNVHQALLKAETILPEHKTLINRIHMS

SEQ ID NO: 83526 - protein, 503 aa, Sphingomonas sp.
  REGION 1..503: note = tr|A0A3M0FI07|A0A3M0FI07_9SPHN Tryptophan halogenase; OS = Sphingomonas sp. PP-CE-3A-406 OX=2135659 GN=C8J44_3324; PE = 4 SV=1
MAKPKTRVVVVGGGTAGWMTAAALSRLLPGQCSVHLIESEAIGVVGVGEATLPHIRAFNERLGIDEADFMARTRATFKLGIEFRDWNRLGDSYIHPFGTFGRGTGGVDFQHYWARLLREGAPLPSLDTVSYACALARAGKFDRPETDPNRLAGTFGYAYQFDALLFAPYLREIAEGMGARRTEGIVVRVERDGDNGDIAAIVLDTGERIEGDLFVDCSGFRALLLGEAMAEPFVDWSHWLPTDRAVAMPCRTRTAVTPYTSAIAMPAGWRWRIPLQHRTGNGYVYASGFVSDDDACRALEDAVEGEALAAPRVLRFKAGRRRRSWVGNCVAIGLASGFLEPLESTSIYLVQQAITTLIELFPEPRIAATDRDEFNRVIDLEYDRIRDFLILHYHATTRSDSPFWDYVRTMPIPDTLSEKLDLWRTRARIVKYREGVFLDPSWVAVYLGQGIVPEGWDPRADPVASDALARSLDALRGEIASDVARRPDHRSFIERYCAMAQAA

SEQ ID NO: 83527 - protein, 519 aa, unidentified
  source 1..519: note = Xanthomonadaceae bacterium
  REGION 1..519: note = tr|A0A1E4KV78|A0A1E4KV78_9GAMM Tryptophan halogenase; OS = Xanthomonadaceae bacterium SCN 69-123 OX=1660170; GN = ABS96_09825 PE=4 SV=1
MADEARRVRRVVIAGGGTAGWVAACALSHQFRDLLDITLVESEQIGTIGVGESTIPTIRTFHRLLQIDEREFMRATAACFKLSIKFSDWGREGETYIHPFGRTGLGTWACEFHHFWLDSLRRGQRSDLADYCLEAVASRADRFALTGAAQGNAASWSTRWESAQSGPGQGELSYAYHLDAAQYAAFLRRRAERQGLVRVEGKIREVRQHASSGDVAALVLDSGQVIEGDLFIDCTGFRGLLIEQTLKTGYEDWTHWLPCDRAVAMQTESVGPAVPYTQASAHGAGWRWQIPLQHRVGNGWVFCSRYMSDDEAGARLRAATQGAALRPPMVVPFVTGRRRQVWNRNVVALGLSSGFIEPLESTSIHLALSGVARLIHMFPFAGIEDSLVRRYNEASRAEAEHVRDFIILHYHANQRDEPMWHECRAMGLPDSLAHRIALFRDRAHAWQGEDELFRVDSWTHVMLGQGIVPRAHHPLARALPDADLAQLLAAIRQPIQRRVDSMPSHQAFLERYCPAERLR

SEQ ID NO: 83528 - protein, 505 aa, unidentified
  source 1..505: note = Burkholderiales bacterium
  REGION 1..505: note = tr|A0A257CVZ5|A0A257CVZ5_9BURK Tryptophan halogenase; OS = Burkholderiales bacterium PBB3 OX=2015565; GN = CFE43_05260 PE=4 SV=1
MEQDKKFDVVIVGGGTSGWMTAAALSKVLKGQYNIKLVESDEISTIGVGEATIPMINLFNRLLDLDEDQFMRETQASFKLGIEFVNWGRLGDRYVHGFGVIGQDNWTCDFHQYWLKQYLAGKAKDLDHYSINTAACHDNKFMRALPDMPNSPLSQIAHAYHFDAGLYAKFLRKFSEARGVTRIEGKINNVIVRDADGHIEAVVLENGQKIEGSLFIDCSGFRALLIEGALKTGFEDWSHWLPCDRAIAIPCASAKVLTPYTRSTARSAGWQWRIPLQHRIGNGHVFSSKFMSEDEATAILLSNLDGAPLADPRTVKFVTGKRKKAWNKNCIAIGLASGFVEPLESTSIHLVQMGIAHLLTFFPSAGFEAADTTAYNRIMNQEYDWVRDFIILHYKATERSDSPFWNYCREMEVPASLTERMDLYRSNGRVYREGNELFTKVSWLQVMHGQRIKPQSYHPLADLLSETEIQTYLNEVEGVIGACVNVMPTHADFIAQHCAAPPVMA

SEQ ID NO: 83529 - protein, 496 aa, unidentified
  source 1..496: note = Erythrobacter zhengii
  REGION 1..496: note = tr|A0A418NNU3|A0A418NNU3_9SPHN Tryptophan 7-halogenase OS=Erythrobacter zhengii OX=2307003; GN = D2V07_16075 PE=4 SV=1
MTDTPLPRIVIAGGGTAGWMAAAALSKLTPCHVTLVESEAIGTVGVGEATIPQIRLFNQALGLDENELLRETRATFKLGIAFDGWLREGHDYMHAFGQVGRAHGVLPFQHFWLRAKQAGFAKPLSHYSLNEIAARDLRMQREAMPHAYHLDAGLYAAYLRRFAEGQGAARIEGMIEGAERHGETGDIAALVLTGGQRIGGDFFIDCTGFRALLIEGALESGFDDWTRYLPCDRAVAVPCATKGEFTPYTRAIARKAGWQWRIPLQHRIGNGLVYSSAHMSDDEATQTLLANLDGVPHADPRLLRFTTGKRRRQWIGNCLAVGLSAGFMEPLESTSIHLIQSAISRFIQILPKGRAPAATIDWFNDQADFEWQRMRDFLVLHYWANGREGEPFWDAMRHMDLPDTLTAKLEQWRASGFIHREHEELFTEVGWFQVLAGQGVEAEGYNPVADAIAEPELRAMLDNVEASLNRQAAAMPRHLDYLQSCARGNARVEITA

SEQ ID NO: 83530 - protein, 507 aa, Duganella sp.
  REGION 1..507: note = tr|A0A4Y9SI85|A0A4Y9SI85_9BURK Tryptophan 7-halogenase OS=Duganella sp. DN04 OX=2561932; GN = E4L98_10320 PE=4 SV=1
MVRRIVIVGGGSAGWLTAGLMAAEQRAGVQVTLIESPDVPPIGVGEGTWPSMRDTLRRIGVSESDFFRECDAAFKQGSRFNRWVDGGAQDYYFHPFSMPQGYSEVDLPAQWQAQHPHIPFADLVSYQPHLCVQGRAPKQPATPEYASVANYGYHLDAGKFGVFLRKHCLEKLGVQYVPDHVLAIRSHDNGDIAALQTREHGALEGDLFIDCTGMQALLLGQHYGVPLISQKHVLYNDSALAVQVPYPAADYPIASQTSSTAQSAGWIWDIGLPTRRGVGHVYASGYISDDQAEAELRAYIAQTSGQTDIPQPRKLSFSPGYRARFWHRNCVAIGLSAGFIEPLEASALALVEMSASMVCDELPADRAAMDIVARRFNEAFTYRWERVIDFLKLHYTLSRRRDSAYWRDNTAETPERLAELLTLWRHRAPSRNDFNRIEEVFPWASYQYILYGMGFRSEFSRASRPRDAAIADGYFREAASLTRKMLGALPDNRTLIHHIKQHGLQKI

SEQ ID NO: 83531 - protein, 493 aa, unidentified
  source 1..493: note = Erythrobacter zhengii
  REGION 1..493: note = tr|A0A418NP24|A0A418NP24_9SPHN Tryptophan 7-halogenase OS=Erythrobacter zhengii OX=2307003; GN = D2V07_16095 PE=4 SV=1
MSETRPPHVVVLGGGSAGWITACLLHHRWGERGGKVTVVESPEIGIIGVGEGSTPQLKAMFDHLGIAEGEWMAACDATYKLGIRFTGWSERKGFGSYFHPFPGPVDLHTEPGFVQNCALARRGFEVPVLPDGWFLAARLAEDGKGPHPRESFPFPPSYGYHFDAYKLGAFLRDWATARGVDHRPLKVAEVELSAEGDVVALLCEGAERIEGDLFVDCSGFRSLIAQGALGGTFLPFAENLFADRAVVMPTPRAEQFRPQTEAIAMTAGWRWRIPLTTRTGNGYVYSSKYIADEDAEAELRRAIGTQDSEEPARVLHMKVGRVENSWSRNCLAAGLAQGFIEPLEATALHIVIATALEFAEAFEQGGFTAQHRDTFNRNIAARYESIRDYIVAHYRLNERNDSAFWRDNAANHNLSDQLKAMMTAWFTHQDMAAANRQNYPVPAYAPMSWHCLFAGYGTFPPPEKMQPLPDGVKAADARAVSAMLEACAQNFPP

SEQ ID NO: 83532 - protein, 493 aa, unidentified
  source 1..493: note = Sphingomonas taxi
  REGION 1..493: note = tr|A0A2W5PFQ9|A0A2W5PFQ9_9SPHN Tryptophan halogenase; OS = Sphingomonas taxi OX=1549858 GN=DI544_01575 PE=4 SV=1
MRIAILGGGSAGWITANLLVRAWPDAAITLVESPDIAPIGVGEGSTPTLRRFFELIGVAERAWMPRCQATYKVGIRFAGWSPTAPWPDYRHPFTTQVDVHTEGAFVLNCRNRRLGHGVPVRPDDFLLNGVLAAQERAPIAPAHFPFRIEYGYHFDAGLLGAFLRDLAVARGVAHRQERVVSATRADDGDLAALVTDRGEAIAADLFVDCSGFAGLLMERTLGVPWRSFAANLFNDAAVVMPTAATGAPPVETVSTALSNGWCWTIPLRHRVGNGYVYARDFLSPDAAEAELRAVLNVGDTGEARHLTFRVGQLARHWERNCVAVGLAQGFIEPLEATALHLVLGTVEQFIGHYTRGGLTARHRDAFNDMMAARIEGVRDYIVAHYKLNTRTDSDYWRANAANMALSDPLRHVLDTWFRCGDLGEELQRQGQLSHFGTASWHCLLAGYGAFPPVSEPPRADVDFHAERGVAAFLEGCSRNFPPQAEWLAAQEDG

SEQ ID NO: 83533 - protein, 496 aa, Duganella sp.
  REGION 1..496: note = tr|A0A4Y9SBN8|A0A4Y9SBN8_9BURK Tryptophan 7-halogenase OS=Duganella sp. DN04 OX=2561932; GN = E4L98_20110 PE=4 SV=1
MGDKTIRKIVIVGGGTAGWMTAAPLAQRLDRRCEIVLIESPEIGTVGVGEATLPTIRYYNAALGVDEADFLRKTQASFKLGIEFRDWGQLGSRFFHGFGDFGPRIDNRSPHLHWLHLARADPTIPSYENWSMATLMARNNRFAAPGDNAPYSYAYHFDAGLYAAYLRDYAVQRGVRRVEATIDQVELRPEDGHIRALKLKDGRRIEGELFIDCSGFRGLLIDGALQAGYEDWSAQLPCNSALAVPCEKVASITPYTTSTARAAGWQWRIPLRHRTGNGHVYSNAFTSDAEAQRVLLAGLDGAPLDQPRQLRFVTGRRRQSWRKNCVAIGLSAGFVEPLESTSINLIENAVGQLITYFPDLDFKPELAYEFNRYMGRRYESVRDFIILHYKLTRRSDSEFWRYCANMAIPDSLRHQIELFRESGRVVVYDTEGFSEPSFVSMLLGLGVVPHSDDPFVRALERAPLQAQMARVRALMIEKVGAMPDHTDYLNAACASR

SEQ ID NO: 83534 - protein, 504 aa, unidentified
  source 1..504: note = Pseudoalteromonas amylolytica
  REGION 1..504: note = tr|A0A1S1MR68|A0A1S1MR68_9GAMM Tryptophan halogenase; OS = Pseudoalteromonas amylolytica OX=1859457 GN=BET10_09560; PE = 4 SV=1
MQKTQTPIKKFVIVGGGTAGWLAGATLGNIFKHCDVEVELIESEDVNIIGVGEATIPPLIDTLESLGIDLKDFISETQASFKWGIKFEDWYKKGHSYFHPFGELGQRIDGHEFYQCWLTLKANGDNTPLMAYSPEAVLSQHNRFFVPHQAMNTPLAGARFALHLDAVLAGRYLRNFAQKIGVKRTVGHIELVDKTVDGCISSVTLTSGQTIAGDFFIDCSGFNSLLIGKALNTNYLDWSEYLPCNRAVAVQTTLTEDIAPYTVSKAQGAGWSWHIPLQHRMGHGYVYSDKYISDEQATATLMNNVSGKVLTPPRIIPFKTGLREQVWNKNCLALGLAQGFLEPLESTAIHLVSKSLALFVRMFPTKQHNAVLQAEFNRQIHQDYAEIRDFLVLHYCTSQRSDSPFWRDWQHRAIPQTLEQRLTFFAQQGGLLQEVEALFQATSWYAVLDGMGVRPKGYNPTLDALDIDALRKSLMMGRTALEQCVLKQPSHAQFLHKYCPAKNL

SEQ ID NO: 83535 - protein, 430 aa, Pseudomonas putida
  REGION 1..430: note = tr|A0A2J7YG12|A0A2J7YG12_PSEPU Tryptophan halogenase; OS = Pseudomonas putida OX=303 GN=CBL13_00814 PE=4 SV=1
MAELRIVVLGAGPAGAATAIGLRRLGYTVTVVSEWRRFAAVEGVSQRVLEGLRHAGLGGALSQAAMPATRQVLWNGQHLHMNQEFLLDRQRFDQALREDLQRAGVSVVEGRVREVVQGVGHHVRLDDGQVLTADFLVEARGRQAPLAADRLRGPETVSLLNVWQGSPGAPASAVESLEDGWAWMARLEDGRCYWQVTQDAAGLPGKAGLAAYCVALRGRSALVAELFNDQALIPAQVHARSSSAILAGECVGQDWIRVGDAAMAVDPLSGNGIFQSLSSALQAPVVINTLLRRPERAELARQFHQQRVEQLFLRFARIGRDFYAQEQSRVGQPFWARRQGWPDAQPLHQAADWQAVRVERRPVLRDGLVDEAEVVVTADQPLGVWHLQGVELAPIVRGLQAGLALSAVLEGQQVEHQKMVRRWLTEQGYT

SEQ ID NO: 83536 - protein, 515 aa, Gordonia sp.
  REGION 1..515: note = tr|A0A0M9CCN8|A0A0M9CCN8_9ACTN Tryptophan halogenase; OS = Gordonia sp. NB4-1Y OX=1241906 GN=ISGA_07845 PE=4 SV=1
MSGVDGGTAATGTGPATAEEADVVVIGGGPGGSTTATLLAKSGRRVIQLEKESFPRYQIGESLLPSTIHGVCKLLGCYEKVRDAGFMHKRGGSFRWGTNPVPWNFLFAISPEFAGEGSYAYQVERMKFDKILLDNAAENGVDVRQECRVNGVDTDDSGRVVGVRYVDADRTEHDIRASYVVDASGNSTRLTRHAGAERVYSDFFQNVAVFGYFEGGRRLPAPDSGNILCAAFDEGWIWYIPLSDTLTSVGVVIAKDKAKDVINAQEETLLQYIDRCTIVRDMLVDATRVTEGTCGEIRLRKDYSYANTRFWGNGMVLVGDAACFIDPVFSTGVHLATYSGVLAARSINSVLDGTMTEERAFTEFEGRYRREYAVFYEFLSAFYDMEQSEDSSFWKARKVTNFDRTDMAAFVSLVAGGYSGEDVLTDAAQVIERFRSSSDALTAAAAKTGGMDTDSGQRMGHMFSAPVVREVMEEMNALQARGAVTEGATEPPLLDGGLVPSADGLAWAEPADVHV

SEQ ID NO: 83537 - protein, 526 aa, unidentified
  source 1..526: note = Sphingomonas taxi
  REGION 1..526: note = tr|A0A2W4Z1J1|A0A2W4Z1J1_9SPHN Tryptophan halogenase; OS = Sphingomonas taxi OX=1549858 GN=DI640_03925 PE=4 SV=1
MSKADGAQGAVRTVVVVGGGSAGWLTACRLAAQSVRSGSNLDVVLVESATVPSVGVGEGTWPTMRNTLRKIGIDETTFIRSCDASLKQGARFVGWTDGSAGDAYYHPLNPPAGVGEIDLAPYWLGLPGSDAQGGAEGISFADWVDYQSTLCDAGLAPKTITAPEYGGHANYAYHLDAGKFATLLREHAVGSLGVEHVVGDVVRANLADNGDIRDVELVDGRILAGDLFVDCSGFSALLIGGVYDVPFRSCRDILFADRALAMQVPYQGEDDPIACHTISTAQDAGWIWDIGLWTRRGVGHVYSSAYTSDDEAEAALRRYVGPAADALPVRRIAFEPGHRERFWQNNCVAIGLSAGFLEPLEASALMLIETSLDALVDRLPQTRSAMDAIARQFNETFRHHWQRIIEFLKLHYVITQRRDTDFWRDNAAAASIPEGLQERLDLWTHHSPAAQDFAHAREVFSWPSYQYVLHGMRFGSRYRGEPETAEGATVAALVARNDRVRAELIRKLPRHRDLLRAVREHGLQRV

SEQ ID NO: 83538 - protein, 513 aa, Devosia riboflavina
  REGION 1..513: note = tr|A0A087M525|A0A087M525_9RHIZ Uncharacterized protein OS=Devosia riboflavina OX=46914 GN=JP75_06170 PE=4; SV = 1
MTKPAHFVIVGGGTAGWIAAFIIQDEARRRGFDFKISVVESSRIPTVGVGEATTAAFRVLLKHFGIDEFEFFRKTDASFKLGIRHEDWRRKGYTYYGPIDDPHQVIQAPPGAPSDYLNVYAVAAGRAVQEMHLFQPLLEQKKAPYALKPDGSLIPLGPFHHAFHFDQALVGKFFASKSKGVDKVDAMAAGVERNGETGDISALVLDDNSRLEGDFFIDATGFRKQIIVKALEAPWKSYAHELPVNRALPFWIDLKEGEELATYTRAWAQSSGWMWQIPTRQRYGCGYVYSDEFLTPEQAKEEVERVLGHEIEVRSDIRFQIGRLEKAWIGNCVAVGLSSSFLEPLESTSIHGTIVQMMLFAQRYMDEPGKITEKARDDYNARVGRQVDDFRTFVNTHYMTERDDTPFWREVRANRIHSETKERLARWKREMPRNEHFPNYLGGLPHIETQLHYPVLNGLGLLDQNLARKEMEADPKLRRFAQQAFDGLVQEYRAAANQALGHREFLEIVQGMT

SEQ ID NO: 83539 - protein, 456 aa, Novosphingobium sp.
  REGION 1..456: note = tr|A0A0S6WXC9|A0A0S6WXC9_9SPHN Tryptophan halogenase; OS = Novosphingobium sp. MBES04 OX=1206458 GN=MBENS4_0718; PE = 4 SV=1
MGEATVPLIGELNRFLGIHEPEFVAATNGTFKLGIEFADWGEIGNRHFHGFGDYGADIAGLPVHQHWLRLAREGQVPALGDFAMAEVLASQDRFVPHEALSGEAAQFRHAFHFDAALYAAYLRRLAEGMGVTRIEGRIKNVALDAQSGHVRALQLDGDRRVEGDVFLDCTGFASLLLGQAQGVGFEDWSQWLPCDRAAAVPCARAGRFTPFTSSSAKEAGWQWRIPLQNRTGNGHVYSSAHISDDEAVAQLLAGLDGEALAEPRLLRFTPGRRSRFWEGNVIAIGLAAGFLEPLESTAIQLIQTGVTRLVEFLPGKVPDPALAAEYNRQTALEYERIRDFIIAHYCRTRRTEPLWRQVAAMDLPGTLRAKLDAWEACGRVPMYDLESHQEPSWVAILLGQGVLPRAVNPRTHLLPEGDLRALLDQRRTTLARAAERLPDHATFIARTCAAKPAPAA

SEQ ID NO: 83540 - protein, 511 aa, unidentified
  source 1..511: note = Erythrobacter zhengii
  REGION 1..511: note = tr|A0A418NTH6|A0A418NTH6_9SPHN Tryptophan 7-halogenase OS=Erythrobacter zhengii OX=2307003; GN = D2V07_08485 PE=4 SV=1
MNGEPIRKIVIVGGGTAGWMAAAAIAKILGEFPGLSIQLVESDAIGTVGVGEATIPQILSFHKLLEIDENEFVRETHATYKLGIEFVDWLRPGHSYVHPFGTYGLDMLGIEFHHFWLRGQEAGETVPLDPYSIGAAAGRAGKFFWPQLNNPRSPLSKLAYAFQFDARLYAAFLRRRAEAHGVIRLEGKVIQVHQDGETGFVESVELEDGSRIEGELFIDCSGFRSLLLGQALQVPFEDWSKWLPCDRAVAVPCTLGGDRQPLTRSTARPAGWQWRIPLQHRIGNGHVYSSAHMEQDKATDLLLANLDGEPLAEPNHLRFTAGHRAQFWEKNVVALGLAGGFLEPLESTAIHLVQSSIARFMAFFPTTAFGEQERLRFNRDTRREYVDIRDFLVLHYKSTERDDSEFWRYCRNLPPPDGLAEKMAIFEGSGRVVREHDEFFTEPSWLAVMAGQGITPKGYHPVAGMLDEAETKKRLEHIRQVIAQAVSQMPTQEDFLQQQGSAIPVGERASA

SEQ ID NO: 83541 - protein, 503 aa, unidentified
  source 1..503: note = Hephaestia caeni
  REGION 1..503: note = tr|A0A397PHN4|A0A397PHN4_9SPHN Tryptophan halogenase; OS = Hephaestia caeni OX=645617 GN=DFR49_1215 PE=4 SV=1
MEKPPYTIVIAGGGTAGWMTAAALARFLERGYRIRLVESEAIGTVGVGEATIPQLRLYLDALGIDEDHFVRTTHGTFKLGIELENWLGDGHRYMHAFGNVGRDVGLIAFQHYWLRARQMGIAAGLDRYALNELAARAGRMHRGGPITAPAIPSMPYAFHFDASLFAGLLRCFAEERRVERTEGRITEVMRDGDSGDVAAIRLDSGERIAGDLFIDCTGFRAMLIGQTLGIDYEDWTHWLPCDRAIAVATAPLADPPLFTRASARKAGWQWRIPLQHRTGNGLVYCSSAISDDDAADLLMHHLDGAATGDPRLLRFAAGRRREGWHRNVIAIGLSSGFLEPLESTSIHLIQSAISRLLKLLPGHASGAADRAEYNRQTDFEIERIRDFLILHYHANTRPEPLWQACRAMTLPDSLGAKIALFAENGQIVREHEELFTEVGWLQVLIGQGISPKGYHPLADQIGDDDLAEFMETIPLLYEREVAQMPSHADFIARHCAGAMARKG

SEQ ID NO: 83542 - protein, 510 aa, Sphingomonas sp.
  REGION 1..510: note = tr|A0A4R2SUS0|A0A4R2SUS0_9SPHN Tryptophan halogenase; OS = Sphingomonas sp. PP-CE-1A-559 OX=2135657; GN = C8J42_102971 PE=4 SV=1
MIDGLGQHIVILGGGTAGWMTACLIAHRWLDRGVRVTSVESPEIGIVGVGEGSTPQLKHFFDTLDIEEAEWMSACDATYKLGIGFDGWSDREGHERYFHPFPTALDGHTAPQFFYNSRARRTGRNVDAHPDQFLLPARLAAAHRAPQPAANFPFEVSYGYHFDAYKVGAFLAAHATETLGVVHLQRRIASVERALTGEITALIDTDGGRIAGDFFIDASGFRSTIFGALDVPFVSYADALFNDRAVVMPTAHNTGAPIPSQTRATALSAGWAWHIPLTSRNGNGYVYSSRHLTEAQAEAELRAHIGAEAGGARHLKMRVGRVRDSWSHNALAVGLAQGFLEPLEATALHLVIATVEAFLDMVDHGGATDAVRTAFNTRIAARYDGVRDYIVAHYRLNQRHDDPTGYWAEARGVDVLSDDLKMLMSTWFTGADIVAAIDRAGLGRYYSATSWHCLFAGYGTFPDAARLISPGADIDPIDLPKIDDFLTRCASNFRSHASRLRAAADHKDHV

SEQ ID NO: 83543 - protein, 534 aa, unidentified
  source 1..534: note = Gammaproteobacteria bacterium
  REGION 1..534: note = tr|A0A1G0GQL8|A0A1G0GQL8_9GAMM Uncharacterized protein OS=Gammaproteobacteria bacterium RIFCSPHIGHO2_12_FULL_36_30 OX=1798275 GN=A3E81_02025 PE=4; SV = 1
MQNNIKNIVVIGGGTAGWMTATYIAKSLNFTVNIIVIESATHAPIGVGEATIPTIKTEFFDRLGIPESEWMPKLGGTFKLGIKYANWKKSIEEGGDYYYHVFGEIPLIDEVPLSSVWIKNYLEGKTKKSFASSCFASHVAFDHHLSPKLLDGTKIQPYAYHFDALLVAQFLKEWAIKHHIHHVIDKLISAKQDEQGNITCVIGESGKEYHGDLFIDCSGFAGFLIDKVYQEPIVPFSDFLLTDRAIAINLPENPEENGIRSYTTATALKAGWVWEIPLYARSGNGYVYSSQFTNDDDAQKELILHFGKRAENIATRPIKFQSRRHQRSWIKNCVAIGLSSSFLEPLESSTIYFIYAALYQLIKCFPQKNIDPILRDKFNQKINYMIDDNKDFIAMHFKTAQREDTPFWKVNKYETKIPESLNIILKKHKSGLPIKRPTVDNNNLYPTFKSLFQNFWTETNYQCILCGVGYYPNNAYPLLQYRDDIIKAGNILFDNIHKRAEELKKILPTHYQYLKNQMKDCDTMKSTEYDAVET

SEQ ID NO: 83544 - protein, 496 aa, unidentified
  source 1..496: note = Hephaestia caeni
  REGION 1..496: note = tr|A0A397NMT7|A0A397NMT7_9SPHN Tryptophan halogenase; OS = Hephaestia caeni OX=645617 GN=DFR49_3585 PE=4 SV=1
MSDGAIRGIAILGGGIVGLSAACAFARALPATRVTLIATPPDPASLADRALATWPGIARFHEAIGLDEPGLLRHAGATHRLGIAFTGWSADGTGWLACFGAHGPRDQAGFHQHWLIARRAGDTTPFHAYAPAAALAAAGRMAPPSDDPASPLADIDHALRFDPAAYTAQLAGLARHLRVETVAGVPGDIERRADGGVAALVLDDGRRIEADLFVDAGGPAAPLLSMLDDAFEDWRDTLPCDRLLIAEPQPPALGLVDERHATDCGWWWLAPGRARTDVGLAYCAALTTDDAAARVLEAEAHARPQARLTLRPGRRPRSWIGNVVAIGDAAAVLDPLAGASLTLAHEAILRAIDLLPDRSMPPALIAEFNRRTADHHARARDFTAAHYVASGRRSGDFWRAIEGRARPESLAITLDQFAGRGHLPHFEEELATADDWRALLLGLGMNPAHGDPAAQAMPADRRTAMLRAARDRAASAPGLALPYREFYARTIDARPG

SEQ ID NO: 83545 - protein, 506 aa, unidentified
  source 1..506: note = Erythrobacter zhengii
  REGION 1..506: note = tr|A0A418NSV2|A0A418NSV2_9SPHN Tryptophan 7-halogenase OS=Erythrobacter zhengii OX=2307003; GN = D2V07_08470 PE=4 SV=1
MIGSGAKPVRVVVLGGGTAGWMTAAGLARMLGERVTVDLVESEDIGIVGVGEATLPHIRGFVEKLGISEAEFMRATHATYKLGIDFRDFGRIGESYIHPFGSFGEELGGVGFHHYWLELQRRGLAGPLGDYSFCVAAALANKFAPPADDMSLASSYGYAYQFDATLFGPFMREFGLSIGVTRHEGLVTQVERDGESGNVTALTLEDGRQLEGDLFVDCSGFRSRILGQELGEEWEDWTHWLPCDRAAAMPCKHATDEIRPYTTATAMPAGWRWQIPLQHRMGNGYVFSSAFIDEDEACETIRKASEGEPLADPRILRFRPGRRRQSWSHNVIAVGLASGFLEPLESTSIYLAQMAITYLIELFPDGAIDPADRDEFNRLVDMEYDRVRDFLILHYHATTRDDSEFWNHVRTMTVPDSLAGKMELWRQAGRIEKYSDGLFYDASWIAVYLGQGLMPERHDPRTGLVDPERLKSATDRLRSEIASSVSQMPDHAEYLRRNNARLAEPA

SEQ ID NO: 83546 - protein, 514 aa, Sphingomonas sp.
  REGION 1..514: note = tr|A0A4R2TEJ1|A0A4R2TEJ1_9SPHN Tryptophan halogenase; OS = Sphingomonas sp. PP-CE-1A-559 OX=2135657; GN = C8J42_102893 PE=4 SV=1
MAEQRIRKVVIAGGGTAGWLAAAALSRQLDQLLDITLVESEEIGTIGVGEATIPTMRAFHTILGLDEREFMRATQATFKLGISFENWARDGDRYIHSFGDIGKSTWMGDFHHFWLAAKADGDTSEIGDYCLELQAAKAERFALPSEGQINYAYHLDAGLYARFLRTRSEANGLKRIEGRIANVDRDGETGFIRALVLESGERVEGDLFIDCTGFRGLLIEGTYAAGYEDWSHWLPTNSALAVQTAATGPAHPYTRAIAHDAGWRWRIPLQHRVGNGLVYASEHLSDDEAHARLLAAIDGAPLIEPRLIRFRTGRRRQVWMGNCVALSLASGFVEPLESTSIHLIMTGITRLMQTFPFGGIAPALVRRYNDQAQAELERVRDFIILHYHLNERPEPFWAARRDMPIPDTLVERIALFTEGAQAYQGGDDLFRVASWVQVMLGQRLTPRDHHRLGSIMGGPQLAGVLTNIRSTIADAVAGMPTHQQFLDRYLAAPITASHGMHHRVERHDDASGKR

SEQ ID NO: 83547 - protein, 513 aa, Sphingomonas sp.
  REGION 1..513: note = tr|A0A4R2STS8|A0A4R2STS8_9SPHN Tryptophan halogenase; OS = Sphingomonas sp. PP-CE-1A-559 OX=2135657; GN = C8J42_101230 PE=4 SV=1
MHEIQNIVIVGGGTAGWLTAGVIAAKHQARRQHGFTVTLVESPNVPTIGVGEGTWPTLRSTLKKMGVSETELFRQCDASFKQGARFNRWTTGAPDDGYYHPLMLPQHFGQVNLAPHWLADEGSATFCDTVTPQGRICDEGLGPKTIATPEYDGHANYAYHLDAGKFSHFLQRHCCDTLGVRHVKADVTEVHLDESGDIATLDTEQGVSIAGDLFIDCTGFAALLIGGAMKVPFRSCTDILFCDTALAMQVPYDVPDAPIASHTISTAQSAGWIWDIGLPTRRGVGHVFSSSHISADAAEQELRDYIGPAARDLTARRLAIRAGHREQFWVRNCVAVGLAAGFLEPLEASAIVLIELSAKMIAEQMPACREVMDVVAHRFNDTAHYRWGRIIDFLKLHYALTKRTDTAFWRDNVRPESIPDRLAGLMELWRFQSPWVHDEFDRAEEVFPSASYQYVLYGMGARTAVMPGSIDDDVALARRARHDNQVQTQRLVSSLPGHRDLIDRIKRHGLQPI

SEQ ID NO: 83548 - protein, 505 aa, Duganella sp.
  REGION 1..505: note = tr|A0A4Y9SLI5|A0A4Y9SLI5_9BURK Tryptophan 7-halogenase OS=Duganella sp. DN04 OX=2561932; GN = E4L98_10335 PE=4 SV=1
MRDPNNRQPVRRVVICGGGTAGWMAAAGISKVLSKVLEITLIESEEIGTVGVGEATIPTLMNFHNVLEINEQEFMAETQATFKLGISFEGWRNVREDYIHSFGVTGTDHWTAGFQHFWHKGVQRGLAGDYGDYCLELKASLENRFAHLPNNGMNYAYHLDAGRYAKYLRRLSEARNVRRIEGKIVRYTRQDATGDVRSVVLESGQEIEGDLFIDCTGFRGMLIGEAMGVPMDDWSEWLFCDRAIAVQTESVGDAVPLTRSIAHQAGWQWRIPLQHRVGNGIVFSSRHLDEDAARQQLLRNVQGRTLIEPRLIKFKPCQRQQTWKGNVIAIGLASGFLEPIESTSIHLIQRAVIRLMQMFPSDGIQQADIDEFNTQCNHEIEHIRDFIILHYHVNNRTDSQFWIDSREMSIPESLQHRIDLFRETGRVFRVPNELFAENSWIQVMLGQGIMPKSHHPTADLMGDEELKGFLGSIKGRIDRIVVQLPTHQAYVERYCGRPDAGAKAA

SEQ ID NO: 83549 - protein, 503 aa, Sphingomonas sp.
  REGION 1..503: note = tr|A0A0Q6KK15|A0A0Q6KK15_9SPHN Tryptophan halogenase; OS = Sphingomonas sp. Leaf339 OX=1736343 GN=ASG67_07445 PE=4; SV = 1
MTGAPISRVVIVGGGTAGWMVAAAAARFLDDGQRTITLVESDAIGTVGVGEATIPPILNFNRLLGIDEAEFLRATNGSFKLGIEFVGWQTGEDRYFHPFGMHGRAFEGLNFHQVWLKLRNRPGIGDIGDYSMSTVAAAAHRFGAPVDDPRSPLSGIAHAYHFDAGLYAAFLRQRAEAEGVTRIEGRIATVDRDGESGHVRAVVLDDDRRIEGDLFIDCSGFRSLLLGEAMGVGFTDWSHWLPCDRAIAVPTVRTEPILPFTRSTARPAGWQWRIPLQHRTGNGHVYASAFMDDDAAEALLLANLEAAPAAEPRRLSFKAGVRAKLWEGNVVALGLAGGFLEPLESTSIHLIQEGISKLFALFPDRRFTPVERDEYNRLMGDAYAGIRDFVILHYHATKRDDSPFWRHVRTMELPDTLRAKIALFREKGRIFRYDDELFAVPSWVAVMLGQGIVPDGYDPVVDALDAERLTAAVVRMRGAMAAAAQALPTHGAVLDRLKGMTTA

SEQ ID NO: 83550 - protein, 497 aa, Sphingomonas sp.
  REGION 1..497: note = tr|A0A0Q6LD65|A0A0Q6LD65_9SPHN Tryptophan halogenase; OS = Sphingomonas sp. Leaf339 OX=1736343 GN=ASG67_16455 PE=4; SV = 1
MPPRRIVILGGGTAGWITANLMAKAWLAPGSGCTITLVEAPDIATIGVGEGSTPSLKRFFEVIGVAERDWMPRCQATYKVGIRFDGWSPQAPGRDYSHPFTTQVDVHTEEAFILNCRNRRLGHDVPVRPDDFLLGGILAAEGKAPVTPPHFPFRMEYGYHFDAGLLGDFLREIAVGRGVVHRPAHVVGARRAENGDIAALVTDTGGEIAADIFVDCSGFAGLLMERALGVPFHSYASMLFNDAAVVMPTAMDRPPPVETVSTALSTGWCWTIPLRHRFGNGYVYSRDFLSADAAEAELRGHLGVGDMGEARHLTFRVGQLARHWERNCLAVGLSQGFIEPLEATALHLVLNTVELFINHYEQGDFTDRHRPAFNDAITARIDGVRDYIVAHYKLNTRTDTDYWRRNAANMTLPDSLLHLLDTWFRKGNLGAELARQGHASQFGNLSWHCLLAGYGAFPPVSEAARDDVDFFAERRIAAFLEGCALNFKSQAEILAGG

SEQ ID NO: 83551 - protein, 416 aa, Flavobacterium johnsoniae
  REGION 1..416: note = tr|A5FKY4|A5FKY4_FLAJ1 Tryptophan halogenase; OS = Flavobacterium johnsoniae (strain ATCC 17061 / DSM 2064 / UW101) OX=376686 GN=Fjoh_1110 PE=4 SV=1
MTKEFVDVLVIGAGPSGCVSASYLHKNNVKVKVVEKQKFPRLVVGESLIPRVMDHFAEAELFEALDAMNFEKKLGARFIRGEEICVFDFSKKFGEGWDWTWQVPRADFDNTMAQEVVRKGVDLEFETEVLEVSFEGKKSKTIVKDKDGNLKEIHANFIIDSSGYGRVLPRLLDLDTPSKLDPHSSIFTHVKDINREEGEEGTQISFDILETEVWLWVIPFSNGNTSLGVVGPTDFINSLSENKDNAEALKNAIQKSDYYIKRFAGTEFLFEPVKLENYSRAVKRMYGDGFALTGNSSEFLDPVFSSGVAFATESGMLAAKLYLKESQGIPVDWEVEFTQYMKRGIAVFTTYVQEWYTGNLQTLFFHQPENPDVKEKICAVLAGYVWNEENSFVKKHDHVIANMAYLLNMQKEQSPE

SEQ ID NO: 83552 - protein, 503 aa, Porphyrobacter sanguineus
  REGION 1..503: note = tr|A0A1M7S2J1|A0A1M7S2J1_9SPHN Tryptophan halogenase; OS = Porphyrobacter sanguineus OX=198312; GN = SAMN02745193_00792 PE=4 SV=1
MVIQRIIIVGGGTAGWMAAAALSRLKAGRPVEITLIESESIGTVGVGEATIPPFVGFNQLIGVDEREMLAAVGGTFKLGIQFENWGKLGDSYIHPFGAYGYTMGGISFHHVWHRMADAGDKRPIQVFNLETMAAYFGKFARTEDFARDDLPPINYAYHLDAGRYAAFLRRLAESRGVVRQEGKVADVALNGETGFVTGVTLDDGRQFAGDLFIDCSGFRGLLIEQALQTGYDDWSHYLPCNRAVALPCLREDGSPPPPFTRATAHKAGWQWQVPLQHRNGNGHVYCSSYMEDHEALDILLGNIAGKPQAEPNFLRFVTGRRKKFWNRNVVALGLAAGFMEPLESTSIHLINTGLDKLLSLLSLDGITQAQEDAFNRLTGREYARIRDFLILHYNATQRDDSDFWNYVRTMEVPDTLTEKVEIFKANGQIFREEDELFTETSWAAVMMGQGIGMDGHNAMADALDPGKTRSEIDEMEKSIRYLVQHMPGHGDYLARYCPAPVAA

SEQ ID NO: 83553 - protein, 516 aa, Sphingomonas sp.
  REGION 1..516: note = tr|A0A4R2SST0|A0A4R2SST0_9SPHN Glycine/D-amino acid oxidase-like deaminating enzyme OS=Sphingomonas sp. PP-CE-1A-559 OX=2135657 GN=C8J42_1027 PE=4 SV=1
MGKRILIVGGGTAGWLTAGYLAKRLGADLPGGVAITLVESRDIGILGVGEGTFPTIRRTLATIGIDEADLIRRCGATFKQGAKFVHWRHAPGQGATDHYSHPFQVADSSDGLDLLPYWLLGHGGPENWDEVSNPQKKASDQHRAPKLPTNPDYVGPLNYAFHFDAVALAGLLREQGVKNGVRHLTDTVSEVLLDAEGAIGGVRTERNGVLDADLYIDCTGFRAELIGKAMKVPYRSCRDVLFCDRAIAAQLPYARPDDPIASYTISTAQKNGWIWDIGLDRRRGIGHVYSSDHGDDETAERVLRDYLGAAGEKADVRHFKFDAGYREVNWYKNCVAVGLSSGFFEPLEATGIAFAEVSAGMIANLFPWGGDYETSARQFNANMLRRYERARDFIKLHYCISERRDTAFWRDNVADASVPDSLLALLDRWRFRPPNELDIDGQVDIFTEASWQYVLYGMGWKTDLSAKAGALRYHEDARRAFAEVQRQARYAIANLPSNRDLVAYAQTHSFGARAAA

SEQ ID NO: 83554 - protein, 502 aa, unidentified
  source 1..502: note = Hephaestia caeni
  REGION 1..502: note = tr|A0A397NR86|A0A397NR86_9SPHN Tryptophan halogenase; OS = Hephaestia caeni OX=645617 GN=DFR49_3584 PE=4 SV=1
MTERATRVVILGGGTAGWMTAAAIARLLPQVELRLIESADIGIVGVGEATLPHLRAFVETLGIDEAEFMRTTSATYKLGIAFEGFGRIGATYTHPFGGFGSDLAGVGFHHYWRRMHAAGRARDIGAYSYPVVLAAARKFARPTPDGDPITSTYGYAYQFDATRFAPYLRDYAIARGAVRTEGKVVRVEQHPETGDVTALHLESGEAVTGDLFIDCSGFRSLLLGDTLKTPWEDWSHWLPCDRAAALPCESPEGDIEPLTRAIAMPFGWRWRIPLQHRVGNGYVYSSAHLSDDDACAAIVGAVEGKPIASPRVLRFRAGRRRLGWVKNVVAIGLSSGFLEPLESTSLYLAQAAITQLIELFPEDGRSTDADRDEFNRVIDLEHDRIRDFLILHYHATTRDDSDFWNHVRTMRVPYSLHEKIAMFRASGRVARYTKGLFLEPSWVAVYLGQGIIPERWDQRADLADEAQLDRALAGLDRALGAAAARTPGHREALAAHHAGAPA

SEQ ID NO: 83555 - protein, 537 aa, unidentified
  source 1..537: note = Hephaestia caeni
  REGION 1..537: note = tr|A0A397P978|A0A397P978_9SPHN Tryptophan halogenase; OS = Hephaestia caeni OX=645617 GN=DFR49_1933 PE=4 SV=1
MGMGGNTGSGATAPGGTAPGRATDQDTGGARAPIERLVIVGGGTAGWMAAAAFSRYLNNGRTKVTLIESAEIGTIGVGEATIPPILSFNKMLGINENEFIAATQGTFKAGIEFVDWGAIGERYVHPFGYHGHEIHGVAFHQLYLRARAQRQMPPISDWSMSAAAIRHGRFARPGTGASFPLDQLYYAYQFDAALYARYLRGYAERGGVERIEGKVVDVALDGESGFVTDLTMADGRIIAGDLFLDCSGFRGLLIEQALKTGYDDWSRWLPCNRAVAVATENVVPPEPLTRATARARGWQWRIPLQHRMGNGLVYSSAYLSDDEARDTLMANLEGPALADPRTLSFTTGRRRLSWNRNVVTLGLSSGFVEPLESTSIHLVQAGIAKLIALFPDKRCTAVERDEYNRAMKDLAEDIRDFVILHFHATRRDDSPFWDYCRTMEPPDSLARKIALFREKGRVFRDNFELFATPSWVAVMFGQGIWPEGYDPIADALDESRVDQAMAQMRRDYEDAALRLPSQAEFIARCCAAPAMPMAAAS

SEQ ID NO: 83556 - protein, 505 aa, unidentified
  source 1..505: note = Burkholderiales bacterium
  REGION 1..505: note = tr|A0A257FIC3|A0A257FIC3_9BURK Tryptophan halogenase; OS = Burkholderiales bacterium PBB2 OX=2015564; GN = CFE41_23245 PE=4 SV=1
MTAALLAAEHGGLEPGALDICLIESPDTPAIGVGEGTWPSMRETLQRIGLREVDLVRECDAAFKQGSRFDGWVNGSSEDRYYHPFSLPQGYGDADLVGGWLQGHADRPFAECVSPQPHLCNAHLAPKQVSTPEFAAVANYGYHFDAVKIGVLLRKHAVATLGVRHILDHVTLVRSHDNGDIAALQTRTHGDIAGDLFIDCSGMPSLLLGQHYGIALQSQQHVLFNDSALALQAPYADGHVPLASATISTAHAQGWTWDIGLPTRRGVGLVYSSAHTSLDAATTALHQHIQRSGWAAELPTPRHIRFTPGYRERFWHRNCVAVGLSAGFIEPLEASALALVELSVAMIRDELPANRADMDLVAKRFNDAFSYRWARIIDFLKLHYALSQRQDSDYWREHRLPQSQPERLQELLQLWKHRAPYRNDLFRIEEVFPAASYQYVLYGMGFKPDLAHAQPAQRMRSERLAQAQASLHSAAIITKRQLGGLPRHRDLIEHIRMHGMHGMPP

SEQ ID NO: 83557 - protein, 503 aa, Limnohabitans sp.
  REGION 1..503: note = tr|A0A315CDX1|A0A315CDX1_9BURK Tryptophan halogenase; OS = Limnohabitans sp. Hippo4 OX=1826167 GN=B9Z46_14635 PE=4; SV = 1
MQNPLIQNIVIVGGGTAGWMTATALASVLRGKYNIRLVESDEIGIVGVGEATIPMIQRFNKVAGIDENEFLKATYGTFKLAIEFVNWGQVGDRYMHGFGPIGQDLWTVPFEQYWHKMRTAGKAADLGSYSITRAAARANKFMRPDLSVPNSPLGDITYAYHFDANLYAKYLRKLCEARGVVRTEGKITQVSQRASDGHVDAVVLASGERVEGDLFIDCSGFRGLLIEETLKTGYEDWTHWLPCDRALAVPCESAPQLLPFTRSTAHKAGWQWRIPLQHRIGNGHVFCSQHISEDEAAATLLSNLDGKPLADPRLIKFNTGMRKKAWNKNVIAVGLSSGFLEPLESTSIHLIQAAVAQLVEFFPDQGFSQIDIDTYNAQSRFQYERIRDFIILHYHANQRTDSEFWKACAYMAVPDSLKEKIALYQTHGRIFRFNEELFSQVGWLQVMEGQNLKPAHYNPLVDLQDEGSIQEYLESVRNVIAKCVDFMPDHAEYIAKHCAAPAM

SEQ ID NO: 83558 - protein, 502 aa, Idiomarina insulisalsae
  REGION 1..502: note = tr|A0A432YPN1|A0A432YPN1_9GAMM Tryptophan halogenase; OS = Idiomarina insulisalsae OX=575789 GN=CWI71_02285 PE=4; SV = 1
MTQPYHIVILGGGSAGWMTAAALAKVLDQKHYKLTLVESSAIGTVSVGEATIPGIREFNQLLQIDEDEFLRETQGSFKLGIAFENWQNIGDAYMHPFGPYGVTLNGVPFHHYYLRHEREQGQGAAMPLHELNLEWSMANGNKFSRPIADKRSPLGHIKYAYHFDAHAYARYLKKYATQRGVVALEDRMLEAKQAQKHGALQALILEQHGELQADFFIDCSGFKALLIGEALGVEYHDWRKWMPCDSAVALPGQHDADTILPYTRSIAHHEGWRWKIPLQHRTGEGWVYSSRFTDSDKAEREFRETIGNFDSKANHLRWMNGRRDEAWKHNVCAIGLSAGFIEPLESTGLQLTQSGIMRLISLLPGAGSMTERAHAFNRYTAEEITNIRDFVMCHYKLTARDDSAFWRYCRDMAIPDSLQERLELYRENASIFRNSNNELFNEISWFSMFHGQGLTPKNVHPLAEQMPAANLQQHLKTIQGIFKQSVAQLPSHAAFIRKHCQA

SEQ ID NO: 83559 - protein, 499 aa, Sphingomonas sp.
  REGION 1..499: note = tr|A0A0Q6LB53|A0A0Q6LB53_9SPHN Tryptophan halogenase; OS = Sphingomonas sp. Leaf339 OX=1736343 GN=ASG67_03795 PE=4; SV = 1
MRRIERVVILGGGTAGWMTAAALNATFGHTLSINLLESDAIGTVGVGEATIPTIRWFNELIGVDEADFVRATTASFKLGIEFVDWAQPAHRYFHPFGRYGVDLDRVPFHQHWLRAQQDGSDRPLSTYSLATQLAAAGRFAKPASEHRSILSTLGYAYHFDAGLYARHLRGIAEGRGVTRQEGVLGQIERDPDTGFITALKTERGDRLAGDLFIDCSGFRSLLIGETMGANFEDWSHWLPCDRAVAVPCARVAETTPYTRSTLRPAGWQWRIPLQHRTGNGYVYASDHVSDDEAAATLLTHLDGKALADPRFLRFKTGFRREAWRGNVVAIGLASGFLEPLESTSIHLIQSGIAKLITLFPDADCDPGLARQFNTLFSRDMDGIRDFLILHYHATEGHDAPLWRHTRTMALPDTLVDKMEQYTRTGRLMLGPDELFREASWLAVLNGQGIYAAGTAPIADTLDGAMNQRQLDQIEAAIARAVPTLPRHDEAIAALIGGPR

SEQ ID NO: 83560 - protein, 497 aa, unidentified
  source 1..497: note = Sphingomonas naasensis
  REGION 1..497: note = tr|A0A4S1WS64|A0A4S1WS64_9SPHN Tryptophan 7-halogenase OS=Sphingomonas naasensis OX=1344951; GN = E5A74_03585 PE=4 SV=1
MTEPAVKRVVIAGGGTAGWVAAAALVKHLGPLLDITLVESDEIGTVGVGESTIPTSRSFHELLTINEPAFMRATQATFKLGIVFENWGRAGDRYVHSFGEIGKRSTWMADFHHFWLEAQRQGFGGSLADYCFELQAAEAGKFFKGDNFPINYAYHLDATLYARFLRGLAEPAGVRRVEGKIARVEQDPESGFLTALALESGQRVEGDLFLDCTGFRAMLIEQTLQTGYEDWTRYLATNSAFAVQTRATGPAAPYTRAIAHEGGWRWRIPLQHRVGNGIVFSSDLMSDEQARLKLLNDIDGEALTEPRLIRYRTGARRKVWNKNCVALGLASGFIEPLESTSIHLVKVAVTRLIQEFPFGGCQPALAERFNQQSRHEIEGIRDFITLHYHLTERDDSPFWRRCREMEIPDSLAQRMASFREAAHAWQEGNDLFRVDSWVQVLLGQGLRPGSYHRLARMMDPGALRAALATLKGNIDAAVARMPSHEQFLASYRAASDG

SEQ ID NO: 83561 - protein, 505 aa, unidentified
  source 1..505: note = Sphingomonas taxi
  REGION 1..505: note = tr|A0A097ECK0|A0A097ECK0_9SPHN Tryptophan halogenase; OS = Sphingomonas taxi OX=1549858 GN=MC45_01225 PE=4 SV=1
MDDTNAAIRSVLIVGGGTAGWMTAAALSHALGERCQITLVESDEIGTVGVGEATIPPIRLFNDTLGIAEADFLRETKGSFKLGIEFVDWAKLGHRYFHPFGTFGKPFDLVAVHQHWLAARAAGSTIPLDDLSMAWAAASRGRFAAPMTDPRSVASTFDYAYHFDAGLYAAFLRRYAEARGVSRVEGRVGDVALHGETGHVAHVGLRDGRRIDADFFVDCSGFRGLLIEGALATGYEDWAHWLPCDRAVAVPCATGGDGMTPYTRSTARAAGWQWRIPLQHRTGNGYVYCSRHISDDEATATLMANLDGEALSEPRLLRFTTGRRRTFWNRNVIAIGLASGFMEPLESTSIHLIQTGIAKLLAYFPTRDFSPLLIDEYNRVAITEYERIRDFLILHYKLTSRDDAPLWRDCAAMTIPDTLALKIAHFRQGGRLIARDMDLFGPASWLAVHIGQLNHPLGSDPLLDSSKAAAASTTFIGRLSEAMATMARSMPTHESYLQRLTRSMA

SEQ ID NO: 83562 - protein, 506 aa, Sphingopyxis sp.
  REGION 1..506: note = tr|A0A1P8WWU7|A0A1P8WWU7_9SPHN Tryptophan halogenase; OS = Sphingopyxis sp. QXT-31 OX=1357916 GN=BWQ93_08555 PE=4; SV = 1
MTSEMERVVIVGGGTAGWLAAARIAAARPALSVTLIEAPDIPTIGVGEGTWPTMRAALAAIGIDEGEFLAACDGSFKQGSRFDRWVSGADDDRYLHPFTPPPPLATRELLAAWQAGEPGQSFAAAMTAQAAVCHHDLAPRQRAMPGYQGAANYAYHLDAGKFAALLMAHAKQRLGVRHVADHVTGVRRGEGDLIAAVVTREHGEVAGDLFLDCTGHAALLIGGELGVEWIDRSDTLFNDRALAAQVPTDPDSAIASQTVSTAHRAGWIWDIALPTRRGIGCVYASRFLSDDEAEAVLRAYIAEQLPHAPEVPVRRLGFPTGHRARFWQGNCLAVGLSAGFIEPLEASAIVMIELSLNALVDNFPASAAVLPIHAQRFNALFRYRWNRIVDFLKLHYVLSRRPEPYWRAQRDPQHIPATLAAMLTLWQDQPPSVWDFPQVDEIFSAESHQYILYGMGFAPPPGLAPSDRAVAALAEQQKRARALVSALPTNRDYLDALGAAAATAAE

SEQ ID NO: 83563 - protein, 504 aa, unidentified
  source 1..504: note = Erythrobacter zhengii
  REGION 1..504: note = tr|A0A418NS29|A0A418NS29_9SPHN Tryptophan 7-halogenase OS=Erythrobacter zhengii OX=2307003; GN = D2V07_11395 PE=4 SV=1
MAIEKIVIVGGGTAGWMAAAPLSRMLQGDRELSVTLVESEAIGTVGVGEATIPPFRDFNQALEISDREMLSNVQGTFKLGIQFENWGAKDDRYIHPFGNYGYTIGGLSFHQVWHHMKKLGDNRPIQAFNVETMAAYFGRFMRSEDTQRDDLPPVNYAFHLDAGQYAKFLRRYAEARGVVRKEGKVCDVSLDGESGDVTSITLEDGSVIEGDLFIDCSGFRGLLIEQTLETGYEDWTHWLPCNRAVALPCNRDDGSPPPPFTRAIAHDAGWQWQVPLQHRNGNGHVYCDAFMSADEATDILVNNLAGKPTADPNHLRFVTGRRKKFWNRNVVALGLSAGFMEPLESTSIHLINTGINKLIAMLSLDGITEATRNTFNRLTGKEYARIRDFLILHYNATKRDDTEFWNYCRTMSVPDSLSEKVELFRTSGQIFREEDELFTETSWAAVMMGQGIPMQGNIAMTNTLERGKTKSELDEIEKSIRYFVQHMPPHAEYIAKYCPAPPIS

SEQ ID NO: 83564 - protein, 504 aa, Novosphingobium sp.
  REGION 1..504: note = tr|A0A257G887|A0A257G887_9SPHN Tryptophan halogenase; OS = Novosphingobium sp. PASSN1 OX=2015561 GN=CFE35_17045; PE = 4 SV=1
MNQGDRRIRSVLVVGGGSAGWMSAAMLGTMLKRDCKVTLVESDEIGIVGVGEATIPPIRLFNETLGISEADFIRETRGTFKLGIEFVDWGSVGSRYFHPFGPHGRNFDMVPLHQYWLKTREEPGAFPLEELSMAWQIARAGRMARPVPDQRSLLSTFDYAYHFDASLYAAFLRRHAEARGVTRVEGKIEGVSLNGETGFVESVTLEGGRKLEADLFIDCSGLRALLIEGALKTGFEDWSHWLPCDRAVAMPCASAGPPTPYTRSTAREAGWQWRIPLQHRIGNGYVYSSQFMEDDKAAELLASRLDGAALGDPRFVRFRTGRRKQHWNRNVIAVGLSSGFLEPLESTSIHLIQANISKLIGLFPDRDFGPATIDEFNRIAHAETDRIRDFLILHYKLTQRQDHELWRYVSAMEVPETLALKMEHFRRNGRLIAREMDLFAPPSWLAVHIGQHHYPEGLDPLIEHRGIDAREYLAKLRAGMAAEAARLPSHEAYIAGLTGAAAAA

SEQ ID NO: 83565 - protein, 509 aa, Sphingopyxis sp.
  REGION 1..509: note = tr|A0A0M8JHF4|A0A0M8JHF4_9SPHN Tryptophan halogenase, putative OS=Sphingopyxis sp. C-1 OX=262667; GN = SC1_02500 PE=4 SV=1
MNSAIERVVIVGGGTAGWLAACRLASARRSAKIEVTLIEAPDIPTIGVGEGTWPTMRATLSAIGIGEAEFLAACDGSFKQGSRFDRWVTGAEGDSYLHPFTSPPAAPVAELLAAWQAGAPDLPFAAAMTAQAHVCDLHLAPRQRAMPDYQGAANYAYHLDAGKFAALLAAHAVQRLGVRHISDHVVDVARDDDGGIASVATRQNGDIAGDLFIDCSGHAALLIGGHLGVEWIDRGDTLFNDRALAAQVPVAAGSPIASQTVSTAHAAGWIWDIGLPGRRGVGCVYSSRFMTDDAAEATLRAYIARVLPDAPAVPARRLSFPTGHRARFWEGNCIAVGLSAGFIEPLEASAIVMIELSLNALIDNFPVRRGAMPIHAERFNELFCYRWDRIVEFLKLHYALSRREEPYWLAQRDPAHMPPSLSAMLELWRDQPPSLWDFPRVDEIFSAESHQYILYGMGYPVPPGVPMSERAVALLAENRQRARALVAALPANRDYLDALATSAHNAAVR

SEQ ID NO: 83566 - protein, 561 aa, unidentified
  source 1..561: note = Ruegeria profundi
  REGION 1..561: note = tr|A0A0X3TSG1|A0A0X3TSG1_9RHOB Tryptophan halogenase; OS = Ruegeria profundi OX=1685378 GN=AVO44_13310 PE=4 SV=1
MNNRLRKITIVGGGTAGWMTALILDMVFSRTSAPKDRPSICLIESPNISTVGVGEATVPRMPVTLRQAGISERDFFRETNASFKLGVKFCNWNKDAKGNRIDYVNPFAHGQMVEGLDAAEYFLRFGNGDRDFTQSISPHDHLGRLCKGARQLGQPEFEQRFGYAYHLDAVKFAGMLTKVCTQRGVEHIRDEVQTVELDENGNVSHLMLERAGRHDIEMVVDCTGFRGLIINQALGEPFMDYSDYLPNDRAMALQIEHPNPRKIESLTRSTALGAGWTWRVPLYNRVGTGYVYSSAHRTDDQAADEYLEWLGDSGKGATPRVIPMRVGRVRNAWVKNCVAIGLSGGFIEPLESTAIHMIDHAVRWFAEHLPTRDIEPSLRARYNRQMDKLYNEVLEFICLHYKLGNRKDDPYWIDARTEMKVPDRLAENLELWQHRLPMQHDVEFATLFDHRVYQTVLLGKQSYDTGYGTGIRDRVRPLKKQIWEQGMRRAKADLAQIINTMPDHKTLLRDIRGELKQPAFVMANAAKPTVAVPGTAPEPITIQNMPNLAEIQSGKKDLQLF

SEQ ID NO: 83567 - protein, 409 aa, Corallococcus coralloides
  REGION 1..409: note = tr|A0A410RZ74|A0A410RZ74_CORCK Tryptophan halogenase; OS = Corallococcus coralloides OX=184914 GN=cmdE PE=4 SV=1
MKTESADILIIGAGPAGSVAAGLLRKQGRDVLVLEREQFPRFSIGESLLPQSMEYLQEAGFLQDVVEAGFQFKNGAAFERGGRYTDFDFRDKFSPGWGTTYQVQRARFDQLLAQAAQKKGATVRFRHEVLTVDFSSGQPVVTARSPEGETYQVKARFILDASGFGRVLPRMLNLETPSNFPVRGAIFTHVVDNVPLGTFDRNKIRVTTHPEHVHVWYWTIPFSDGRCSLGVVAKKEFLDQYTGTDTERLQAIVKEAPSLRNLLKDAVWDTPARKLTGYAANVKSLWGPGFALLGNAGEFLDPVFSSGVTIAFKSASLASACIAREFAGEQVDWENDYAKPLKAGVDTFRTFVESWYEGGFQNVIFHPNPSEDVRRMISAILAGYAWDKNNPYVADSKRRLGVLEALCAA

SEQ ID NO: 83568 - protein, 514 aa, Streptomyces sp.
  REGION 1..514: note = tr|A0A2U8V9U3|A0A2U8V9U3_9ACTN Tryptophan 7-halogenase OS=Streptomyces sp. NEAU-S7GS2 OX=2202000; GN = DKG71_23395 PE=4 SV=1
MINSVVIVGGGTAGWMSASYLKAAYGDRINVTLVESDRVATIGVGEATFSTVRHFFDYLGLDEREWMPECSGSYKLGIRFENWREPGHHFYHPFERLRTSDGYTLADWWLQEGDRSQPFDRSCFITPALCEAKRSPRLLDGSLFAGGLDGSLGRSTLEEQRAQFPYAYHFDAALLAKFLTKYGTDRGVRHVVDDVTQVGRDERGWISHVATREHGDLTGDLFIDCTGFKGMLINETLDEPFESFQDVLPNNRAVALRVPQADQATTGMNPYTTATAMDAGWIWNIPLFGRNGNGYVYSDEFCTPEEAERTLREHVAPGQDDLEANHIRMRIGRNRRSWVNNCVAIGLSSAFVEPLESTGIFFIQHGIEQLVKNFPDENWDPALVDDYNNRVAEVLDGVKEFLVLHYKAAQREDTPYWKEAKTRALPDGLAERLATGASHLLDERTIYQPYHGFEQYSWITMMLGLGHEPKRPRPSLAHIDPTNARAELARLKADADELVAALPSCYEYIASLNS

SEQ ID NO: 83569 - protein, 498 aa, Pseudoalteromonas lipolytica
  REGION 1..498: note = tr|A0A0P7E9H0|A0A0P7E9H0_9GAMM Tryptophan halogenase; OS = Pseudoalteromonas lipolytica OX=570156 GN=AOG27_02590; PE = 4 SV=1
METKKITKVVIAGGGTAGWITAALLNKVLGKVLDITLIESAEIGTVGVGEASIPPILHLNGALGISEKEFIKATGATIKLGIEFENWRSQDHSYMHAFGEIGKDFPFCEFYHFWLKANQTQNAPDFWDFSLNYQAAKAHKFAHLKHIPNTQLAGLHYAYHFDATRYGEFLKELAQSRGVKRIEGKIESVNQCHQSGHVRSLLLKNGEQLDGDLFIDCTGLRALLIEQTLNTGFEDWSHWLPCDSAIAVQSESASDAIPYTRSIARDSGWQWQIPLQHRVGNGLVYSSRFLSDEAAKQQLLDYLPAKPLTEPRVIKFKTGRRLKQWHKNVVSVGLSSGFLEPLESTSIHLIQSAAIRLIKFFPHQGIKQSLVDEFNQQSKTEFERIRDFIILHYKLTERDDSAFWRFCKGMDIPCSLRKKIELFKTSGKLIREDDELFAEIAWQQVMIGQGLIAEDHHPLTDALSDEQLNELFSNLKTLINSTVEQLPTHNQFLEKVQN

SEQ ID NO: 83570 - protein, 502 aa, Sphingopyxis sp.
  REGION 1..502: note = tr|A0A0M9TX21|A0A0M9TX21_9SPHN Tryptophan halogenase; OS = Sphingopyxis sp. C-1 OX=262667 GN=SC1_00514 PE=4 SV=1
MGDSRITKVVIVGGGTAGWMAAAALSRTIDNLSIRLVESDEIGTVGVGEATIPAIRLFNALVGIDENEFIRETGGTFKLGIQFHDWGRLGDVYMHAFGQIGRSLGMLPFQQYWLRGRNEGVAGRLGDYSLNETAGRQSRFARLPQIPNTSLDGIAYAFHFDAALYAAYLRKLAEAAGVRRTEGKIARVRKDGDSGHVQAVVLEDGTAIEGELFIDCSGFRALLIEGALETGFEDWTHWLPCDRAIAVPSENPGPARPYTQAIAHKSGWQWRIPLQHRTGNGHVFCSDFVSEDEATAILLANVEGRPLAEPRTLRFRTGMRKQAWNRNVVALGLASGFLEPLESTSIHLIQNGIAKLLAHFPDRDFDAANIDAYNRRVRFDYERIRDFVILHYHANQRTDSPFWIRCREMAIPETLARKIELFRSQGQIVREGDELFVEIGWFQVLTGQNIMPESYHPMADQLTRDELAGFFADIETIVARAASQLPRHDDFIAQHCAAGVPA

SEQ ID NO: 83571 - protein, 48 aa, unidentified
  source 1..48: note = Verrucomicrobia bacterium
  REGION 1..48: note = tr|A0A2V6MG76|A0A2V6MG76_9BACT Tryptophan halogenase (Fragment) OS=Verrucomicrobia bacterium OX=2026799; GN = DMF16_10805 PE=4 SV=1
MAVESYDVAIIGGGPAGSTAATLLSKAGRRVIVLERDKFPRFHIGESL

SEQ ID NO: 83572 - protein, 503 aa, Sphingobium yanoikuyae
  REGION 1..503: note = tr|A0A177K0X9|A0A177K0X9_SPHYA Tryptophan halogenase; OS = Sphingobium yanoikuyae OX=13690 GN=AX777_08155 PE=4 SV=1
MHADFPTSDRVVKRVVVAGGGTAGWVTATALVRHLGPLIDITLIESDAIGTIGVGESTVPTFRGFHQLMKIREDRFMAEAQATVKLGIEFKNWGQVGDRYIHPFGTIGLQWSWMADFHHFWLHARAQGFGGELGEYCLEWVAGEANRMSLSSSVAPSYAYHIDAARYARFLRSLAEPAGVKRVEGKIRNVELAPESGHIAALVLESGTRIEGDLFIDCTGFRSLLLGEALGVGFEDWGQWIRTDRAVAVQSTSDGPAQPYTSAIAHEAGWRWRIPLQHRDGNGFVFASDFMSDDEAHARLLAEIEGEPIVDPWLVRFKTGTRTRAWHKNCVGLGLAGGFIEPLESTSIHLMMAAVTRLIEDFPFHGFDDALLDHFNRKSRLEFENIRDFIILHYHVTQRDDSPFWDHCRTMEIPDSLKERLALWQENGRAYQLGHELFRVDSWSSVLLGQGMHPRGYHHVAAMMPEPQLREELARMRKDIAGVVAEMPSHREFLRRYCPAELV

SEQ ID NO: 83573 - protein, 541 aa, Shewanella sp.
  REGION 1..541: note = tr|A0A2N7DV59|A0A2N7DV59_9GAMM Uncharacterized protein OS=Shewanella sp. 10N.286.48.B5 OX=1880834; GN = BCU57_00285 PE=4 SV=1
MNNKITEVVIVGGGTAGWLTAGILAAQFKKKSLAFNITLVESADIPTIGVGEGTWPSMRETLKHIGIRESDFLTHCDASFKQASKFVNWNNPTTSHSYYYHPFTQPVAADFQQITDNAVTNHSAYHYDGAASFAQLFCYQSSLCQLNLAPKLTHTADYDYIGNYGYHLDAGKFALLLKNHCIDTLNIKHISANVIGLNADATDFITCLQTDSLTSPLVNGDLFIDCSGQQGLLIKQHYKIPFICKKSILFNDRAVAAQVPYSSKNHPINSSTLATAQAAGWIWDIGLQSRRGVGYVYSSEFISDEETKIALTQYIGGEVDSVSVKHLSFNPGHLSKFWHNNCVAIGMSAGFIEPLEASALALVEQSAMFIAEQFPHHVQVLPLIEERFNQRMLNHWQQIIDFLKLHYVLSNRKDSEYWRKHKDDTTTPTSLLKLLALWQHQAPSKYDITQAYPLFPAASYQYVYYGMKQHELSDKLDLSQYSAQIQKVAQQQQQLKQVAICNRSLLNSIQQSIIQTSRNKDLTIKKKPFITAPTIIMTRLN

SEQ ID NO: 83574 - protein, 541 aa, Shewanella sp.
  REGION 1..541: note = tr|A0A2N7DMI3|A0A2N7DMI3_9GAMM Tryptophan halogenase; OS = Shewanella sp. 10N.286.48.B5 OX=1880834 GN=BCU57_13830; PE = 4 SV=1
MEQAINHIVIVGGGTAGWITAGILAAEHNADNGKLSPSPKLNITLVESPDVATIGVGEGTWPSMRTTLKKIGISETEFLISCDASFKQGSRFINWTHSLTENHSNNPSNSPSNSPSNKSSDHYLHPFSLPMGTNEIDLCPYWLPHRDQVSFADAIGQQNQLSQLFLAPKQITTAEYQFQNNYGYHLNAGKFSQLLQKHCTEKLGVSHLRDHVTAIHKKDNGDIGYLATKHSGEIAADLFVDCTGVKSLLLGEQLEVPFICQKAVLFNDSALAVQVPYPEPETDIASCTHSTAQTNGWIWDIGLPTRRGVGHVYSSSHTTQAEAEQQLIDYLKPTAGLDVDNLNIRALSIAPGHRQVCWKNNCMAIGMASGFIEPLEASALALVEWSANTLAQQLPANRHVMDIVSARVNKRFQQHWQQIIEFLKLHYVLSKRSDSDYWHDHRESSTIPDSLQEQLQLWQTQPPSRHDIQHTDVLFPAASFQFVLYGMGFETQMPNQLKPSLQNRAQQLFADNIKRTQGLKQVLPSNRELLNKIQQYGLSRI

SEQ ID NO: 83575 - protein, 514 aa, Colwellia sp.
  REGION 1..514: note = tr|A0A2N1HG65|A0A2N1HG65_9GAMM Tryptophan halogenase; OS = Colwellia sp. Bg11-28 OX=2058305 GN=CXF79_07950 PE=4; SV = 1
MGKAIKKIVIVGGGSAGWITAGSLAAEHCVNAASSIEVILIESPEVNSIGVGEGTWPSMRNTLEKIGIDEKEFLQQCDASFKQGSKFIGWTTGDDTDSYYHPFMTPDGYGHIDLHAAWQANHSEQAFADAVNIQSHVCQAGLAPKQLATPSYAAVTNYGYHLDAKKFASLLHKHCTQKLNVQHIVDHMDGIISADNGDINAISTKEHGHIAGDLFIDCTGSASLLLGKHFNIGFINKQHILFNDSALAVQVPYPDQVNPINSATLSTAQSAGWIWDIGLQTRRGVGYTYSSQYISDAEAEKSLRQYLVNSVGEEQANLLKPKKLIFEPGHREKFWHKNCVAIGMSAGFLEPLEASALAMVELSSTMVSEELPVTRAHMDIIAKRFNERFNYRWQRIIDFLKLHYILSKRTDSHYWRDNQQPNSISEELQELIKLWQYQPPSRYDFVQNEEVFPSASYQYVLYGMGFETEQRANPRKFEANPLAEKTIAETQKKIDKYLTGLPTNRELLNKLKEK

SEQ ID NO: 83576 - protein, 497 aa, Sphingomonas melonis
  REGION 1..497: note = tr|A0A0D1MID8|A0A0D1MID8_9SPHN Tryptophan halogenase; OS = Sphingomonas melonis OX=152682 GN=SR41_01495 PE=4 SV=1
MNAVTPRRIVIAGGGTAGWMAAAALTRTLGRTATVTLVESDAIGTVGVGESTIPPLITFNRLLGINEAEFMAATQATFKLGIQFDGWKGPDDSYFHAFGLTGKDHWAAGFQHFWLDGQARGIAEPYDDYCLELMAARAGKFAHLPDDRMSYAYQLDSTLYGRFLRRMAEGDGATRIEGKIARVDLDGESGDIAALVLDGGTRVEGDLFLDCTGFRALLIEQALHVGYDDWTHWLPCDAAIAVQTTSMRAPVPFTRAMAHDAGWQWRIPLQHRVGNGIVYCSRYLSQDAALDRLLGNVEGAVLTEPNRLRFVTGARRKQWHRNCIAIGLAGGFMEPLESTSIHLIQRAILRLIRLLPPAGAISAHDIAEFNDQQLTDMDQIRDFLILHYKVTERRDSPFWRQCAAMDIPDSLAQKIGLFRETGRVFRRNDELFAENSWIQVMLGQGIVPQTHHPIAAKLPDDELARFLGGLRQGVATTVRGLPAHADYVARYCGAAPA

SEQ ID NO: 83577 - protein, 508 aa, Pseudoalteromonas lipolytica
  REGION 1..508: note = tr|A0A1I7BDH1|A0A1I7BDH1_9GAMM Tryptophan halogenase; OS = Pseudoalteromonas lipolytica OX=570156; GN = SAMN04487854_11215 PE=4 SV=1
MNTHINNIVIVGGGAAGWLTAGLLASEHPDKIITLIESVNIGISGVGEGTWPSMRNTLQRIGIKETDFLRHCDASFKQGSKFINWQTELEGDNYYHPFMVPQGYTECDIHAAWQYLSPEHKYADTVNMQSFVCQAALAPKQAQTPDYAAVTNYGYHLDAHKFAHFLAHHCVNKLNVKHIVDDVLNANNDSHGYIQSVNTLSNAAISGDLFIDCSGSAGLLIAKHYQIEYLNQNHILFNNCAVTTHLPYQDPHDNIASATLSTAQQAGWIWDIGLPTRRGIGYTFSDKYCDEATAIKTLKHYAEQSIGSKLAEQLDTRTLRFTPGYRKEFWHKNCVAVGMSQGFIEPLEASALAMVELSISMLSEQMPSNRQHMTLLSARFNERFNYRWQKVIEFLKLHYVLSKRNDSPYWLDNRQTNTIPTALQKLLELWCYQPPSRFDLIENEEVFPSASYQYVLYGMGFHTPLPAHMSTKQQEFAQQLCKLNRERIGHYLKNLPSNRLLLQQLLAK

SEQ ID NO: 83578 - protein, 508 aa, Marinimicrobium koreense
  REGION 1..508: note = tr|A0A3N1P249|A0A3N1P249_9GAMM Flavin-dependent dehydrogenase OS=Marinimicrobium koreense OX=306545; GN = EDC38_2304 PE=4 SV=1
MTTTGKPEKILIVGGGTAGWMAACLLNSRWPDIEVCVLESRDIGVVGVGEGSTPHLKVFFDAVGIEESEWMPKCNATYKNGISFHGWSSIPGFESYFHPFPAQTDDLLTVPLFLRNVQARLRGDYAHAHPDSYFLETYLAQNNLGPLADECFPFGAAYGYHFDSKLLGQFLSEKAVARGVKRIIGTVTEVLLSTDGAISSVRLAGNDTLEADFFVDCSGFRSLLMQGALKTRFLGFEDNLFNDAAVVLPSETSTTIPPETRSTALSNGWAWKIPLTNRYGNGYVYSSSHIDADRAETELRQNLGLLESDTPARHLNMKVGRVASHWTKNCLAVGLSQGFIEPLEATAIALSFETVRRFMLHFERGGFTNQGADDFNREINTKFEGIRDYIVCHYKVNQRRDTAYWRDNAENTKLSEHLSRILYLWQHSENFAQEMQANHLGGSYQPKSWACLLAGYGVFPPLRSSTGSPTAEASQEQDQLADFIRRCALNFRPHNELLAPAVAEQSVV

SEQ ID NO: 83579 - protein, 520 aa, Erythrobacter longus
  REGION 1..520: note = tr|A0A074MW71|A0A074MW71_ERYLO Tryptophan halogenase; OS = Erythrobacter longus OX=1044 GN=EH31_11940 PE=4 SV=1
MTYGVASNEGTPSGAAKRINHVVVVGGGTAGWMTAAGLAHMLGASGLGQAGLKVTLIESEAIGVVGVGEATLPHIKAFNDTIGINEAEFMAATSATFKLGIEFVDWGRKGDSYIHPFGEFGLPNEGVAFHHYWRKFADVAGPLDDYSLPVVACRNAKFQPPSEDPRSVLSTYRYAYQFDTLQYAPFMRSHAEKKGVTRIEGKVVDVALDPDDGRVTELTLENGQSVAGDLFIDCTGFFGLLIEKQLETGYDDWSEWLPADRAVAVPCESAGPLLPYTRATAHEAGWSWRIPLQHRTGNGHVYSSQFLSDDAACDTLLGGLEGGRLADPRFLRFVTGKRRKLWNKNVVAIGLSGGFLEPLESTSIYLIQEGISKLVELFPQDQDCAVETREYNYWMDLQFERIRDFLILHYHATQRDDSDFWNHMRNLKVPDSLQERLELFRAHGHVSAYEHGLFLVPSWIAVLIGQRVIPQGFDARVAGTPEAHVKQHLAGLRDHMSKAAGSMEDHATFLRRYAQMSDAA

SEQ ID NO: 83580 - protein, 505 aa, Erythrobacter longus
  REGION 1..505: note = tr|A0A074M8V8|A0A074M8V8_ERYLO Tryptophan halogenase; OS = Erythrobacter longus OX=1044 GN=EH31_11925 PE=4 SV=1
MNPHLLEHCVIVGGGTAGWMAAATLGHLLEGSPTKVTLIESEQIGTVGVGEATIPPIITFNTMLGIDEDEFVRETNATFKLGIEFVDWFERGQSYIHPFGDFGRDFDAIPFYQYWLHRNLAGTKDDLFSYSLMVEACRREKFMRPLTNRPQSALSGINYAFQFDASLYAAFLRRFAEGKGVTRVEGKIQDVTQASENGHVQSLKLESGETIEGDFFVDCSGFRGLLIEQTLETGYEDWRQWLPCDRAVAMPCAKVGDPLPYTRATARDAGWQWRIPLQHRTGNGHVYCSEFMEDDTAEQILRDNLDGEPLADANRLRFVTGRRKKFWDGNVLALGLAAGFMEPLESTSIHLIQTSLARLLTHFPDKRFKSADIDAFNHRTTKEYERIRDFLVLHYTATRRDDTPFWRHCQAIEQPDSLKSRIEQFRDCGRIFSEPNDIFGTASWLAVLYGQGVRPTAANPLIAKIPSDKIDNIIRQIGATIDHAATSMPFHQDFINENCSTFSEP

SEQ ID NO: 83581 - protein, 492 aa, Sphingomonas melonis
  REGION 1..492: note = tr|A0A0D1MS39|A0A0D1MS39_9SPHN Tryptophan halogenase; OS = Sphingomonas melonis OX=152682 GN=SR41_01530 PE=4 SV=1
MSDTRIRRIVILGGGTAGWMTAAALSRALAGQGVAITLVESDAIGTIGVGEATIPTIHWFNQIIGMDERQFMAETKATVKLGIEFVGWNGEGSRYFHPFGTFGPPGDGAMFLHRLIRARADGDTASTEAYSLTAQAARAGRFTRPVPDRRSLLSTLGYAYHFDAGLYARYLRGLAERAGVTRIEGMVASVERHDDSGYVRSLTLADGQVVAGDLFIDCSGLRGLLIGETLGVGYDDWSHWLPCDRAWAAPSAAEVGRTPFTRAAAAEAGWRWRIPLQHRVGNGYVFASRFQDEEAARASLIAGMDGPPLADPRLIRFTPGMRREAWRANVVAIGLSSGFLEPLESTSIHLIQSGIAKLLSLFPAADCSPLLARQFNRVFGQEMLDVRDFLILHYHATTGRTEPMWQERQAMAIPDTLAEKIAHFRASGRIVLSSDELFRDASWFAVLDGQGVRPGDHNPLIEAVGRDDNLRQLAALRADIAKVTATLPPLPA

SEQ ID NO: 83582 - protein, 510 aa, Erythrobacter longus
  REGION 1..510: note = tr|A0A074MAS0|A0A074MAS0_ERYLO Tryptophan halogenase; OS = Erythrobacter longus OX=1044 GN=EH31_11930 PE=4 SV=1
MSEGSIKRVVIAGGGTAGWMTAAALSKIMGPAGIKVTLIESEAIGTVGVGEATIPAIMKFNAQLGIDEHEFVRATQATYKLGIEFKNWGDLGESYFHPFGRIGFDLDGIDFHQFWSRLKQEGGEHGLGDYSLNTVAAYAGKFVRPEPDHGQVINQMGYAFHFDASLYAAFLRAFAEGEGTTRIEGRIEHVEQDAQSGLLTALKLDHDREIEGDLFIDCTGFRGLLIGQALGSQYVDWSHWLPCNRAVAVACEKQGDPVPYTRSTARDAGWQWRIPLQHRTGNGYVYCDKFLSAEDAEEALLGSLDGAPVSSPNHLRFQTGHRDQFWAGNCVAIGLSSGFLEPLESTSIHLIQMGIAKLIALFPDAIEAPIERAEYNRLMTDDFTHVRDFLILHYKATRRSGAPFWDYVRTMSIPDTLQQKMDLLRSRGRFFKYDAELFDLTSWLVVAEGQGWGPQGYSPAASRITSANLTQSLANMRDVYARTAKAMPEHQAYIDRFCKAAGDKMRADAA

SEQ ID NO: 83583 - protein, 503 aa, Sphingobium yanoikuyae
  REGION 1..503: note = tr|A0A291N7V5|A0A291N7V5_SPHYA Tryptophan halogenase; OS = Sphingobium yanoikuyae OX=13690 GN=A6768_22480 PE=4 SV=1
MHADFPTSDRVVKRVVVAGGGTAGWVTATALVRHLGPLIDITLIESDAIGTIGVGESTVPTFRGFHQLMKIREDRFMAEAQATVKLGIEFKNWGQVGDRYIHPFGTIGLQWSWMADFHHFWLHARAQGFGGELGEYCLEWVAGEANRMSLSSSVAPSYAYHIDAARYARFLRSLAEPAGVKRVEGKIRNVELAPESGHIAALVLESGTRIEGDLFIDCTGFRSLLLGEALGVGFEDWGQWIRTDRAVAVQSTSDGPAQPYTSAIAHEAGWRWRIPLQHRDGNGFVFASDFMSDDEAHARLLAEIEGEPIVDPWLVRFKTGTRTRAWHKNCVGLGLAGGFIEPLESTSIHLMMAAVTRLIEDFPFHGFDDALLDHFNRKSRLEFENIRDFIILHYHVTQRDDSPFWDHCRTMEIPDSLKERLALWQENGRAYQLGHELFRVESWSSVLLGQGMHPRGYHHVAAMMPEPQLRAELARMRKDIVWVVAEMPSHREFLRRYCPAELV

SEQ ID NO: 83584 - protein, 493 aa, unidentified
  source 1..493: note = Verrucomicrobia bacterium
  REGION 1..493: note = tr|A0A2V5TNP4|A0A2V5TNP4_9BACT Uncharacterized protein OS=Verrucomicrobia bacterium OX=2026799; GN = DME24_19950 PE=4 SV=1
MKISSIVVLGAGSAGLMAALTLKRKVAQLAVRVVRSPDIGIIGVGEGTTVVFPRHFFEYLKMKPRDFYAEAEPTWKMGLRFLWGPRKEFYYTFSFEFEKRLHELSRNNGFYYSDECPWLGHASAFMAHNKVFPRRPDGLPQFHNNHAFHIENKKLVAWLENRCRDHGVGILDATVRAEKGGDGIGSLVTENGEHITADLFVDASGFRSELLSRALGEPFRSYQDALFCDRAVIGGWPRTEEPILPYTTAETMDAGWCWQIEHEHFINRGYVYSSGYISDDAALAEFMRKNPKLATAPRVVKFRSGRYERSWVGNVVGIGNAVGFVEPLEATALQVISVEASTLADSLLDSLCEPTPSLIRLYNRYNGDQWDDIRNFLAIHYKFNTRIDTPFWRACRADTALHGAQDIVDWYRENGPSVLAGVALVHPSNSFRMDGYLALLAGQKVPHNRPYHPPPAERNFWRQHCRNLAAEAQRGLDVKEALQAIRSPGLKWS

SEQ ID NO: 83585 - protein, 104 aa, unidentified
  source 1..104: note = Verrucomicrobia bacterium
  REGION 1..104: note = tr|A0A2N9NSD3|A0A2N9NSD3_9BACT Tryptophan halogenase; OS = Verrucomicrobia bacterium OX=2026799 GN=SBV1_2950015; PE = 4 SV=1
MESLAAGDDGRRRFWSYEKRVFRSMQFYWDMVEAFYTTPFMELFMQPRPKYNLPDAIVAILAGELEGGWKLDWRRRVFFWLVKLQGRRPFMPRISFAETGEPTV

SEQ ID NO: 83586 - protein, 499 aa, unidentified
  source 1..499: note = Verrucomicrobia bacterium
  REGION 1..499: note = tr|A0A2V5YUY3|A0A2V5YUY3_9BACT Tryptophan halogenase; OS = Verrucomicrobia bacterium OX=2026799 GN=DME56_09395; PE = 4 SV=1
MGIANHNAIVVGGGPGGSTAATLLAKAGARVLLVEKEKFPRYQIGESLLPATVHGVCRLLGVSDDLHAAGFIKKRGGTFRWGKHPTPWTFDFGSAEVNQILEFNFAYQVERAKFDELLLNNARRQGVEVREETSVTDVIQEGGRCSGVTLLDRSGRSTEARATFIIDASGNQSRLHALAGKRVFSKFFQNLALFGYFEGGGRLPAPHSGNIFSCAFPFGWFWYIPLSQTLTSVGAVVAKEHAAKLRSGPDYAMGQFIDACPEIKQLLANATRIENGMYGGYRVRKDYSYINSRFWVPGLVLVGDSACFVDPIFSSGVHLATYSGMLAARSIATILKRGMPEAVGLDIYERRYRLEYSVFYDFLVSFYDMHQDEQSYFWKARKVLGSDQAANHAFLQLVAGAGTTVAEFLRLRERSGELFQLRVDGTVDPNKRSGLLRELMKERDMAQVHLRAVGRSAQMGRQDGLDAPLDFNPGGDPATNDGYRVSPDGLCWERLAESG

SEQ ID NO: 83587 - protein, 326 aa, unidentified
  source 1..326: note = Verrucomicrobia bacterium
  REGION 1..326: note = tr|A0A2N9NSK4|A0A2N9NSK4_9BACT Tryptophan halogenase; OS = Verrucomicrobia bacterium OX=2026799 GN=SBV1_2950014; PE = 4 SV=1
  VARIANT 290: note = Xaa can be any naturally occurring amino acid
MAYDAIIVGGGPGGSSAGTLLARAGKRVLVLEKEQFPRFHIGESLLPYNRRLFEEMGVLPSLEAAGLIKKFGAQFHLGNASSSLKMVFRNGCFTREGQAFQVERSAFDHLLLNHTRASGAEVREGCTVTKFWNEPGQVAVEARSKEGPNETLRASFLIDASGRGNFTGNQEGLRVVHPHLKKLAVFGHFEGVRLDEGAPGGDTVIVRLEDKWFWIIPVSPQKVSVGCVLDQEQFARAKQAPAELFTRLWQSSTAMRSRMENAKLVNTIQTTSDFSYYNRRLVGPRLLRVXFFGGCLFGHVFGETGLAGHRGVTGRRRRWPAPILVL

SEQ ID NO: 83588 - protein, 499 aa, unidentified
  source 1..499: note = Verrucomicrobia bacterium
  REGION 1..499: note = tr|A0A2V6ASH3|A0A2V6ASH3_9BACT Tryptophan halogenase; OS = Verrucomicrobia bacterium OX=2026799 GN=DME53_09555; PE = 4 SV=1
MGIANHNAIVVGGGPGGSTAATLLAKAGARVLLVEKEKFPRYQIGESLLPATIHGVCRLLGVSDDLHAAGFIKKRGGTFRWGKHPTPWTFDFGSAEVNQILEFNFAYQVERAKFDELLLNNARRQGVEVREETSVTDVIQEGGRCSGVTLLDRSGRSTEARATFIIDASGNQSRLHAIAGKRVFSKFFQNLALFGYFEGGGRLPAPHSGNIFSCAFPFGWFWYIPLSQTLTSVGAVVAKEHAAKLRSGPDYAMGQFIDACPEIKQLLANATRIENGMYGGYRVRKDYSYINSRFWVPGLVLVGDSACFVDPIFSSGVHLATYSGMLAARSIATILKRGMPEAVGLDIYERRYRLEYSVFYDFLVSFYDMHQDEQSYFWKARKVLGSDQAANHAFLQLVAGAGTTVAEFLRLRERSGELFQLRVDGTVDPNKRSGLLRELMKERDMAQVHLRAVGRSAQMGRQDGLDAPLDFNPGGDPATNDGYRVSPDGLCWERLAESG

SEQ ID NO: 83589 - protein, 494 aa, Sphingopyxis sp.
  REGION 1..494: note = tr|A0A0M8JHI9|A0A0M8JHI9_9SPHN Tryptophan halogenase; OS = Sphingopyxis sp. C-1 OX=262667 GN=SC1_02735 PE=4 SV=1
MSAVRDITLLGRDAPLWLAAAALRRALAPAGVKVRAVALPDENGPADLYATLPAIEALHNQIGIDEAALLRGVRGAFTLGQNFVDASGAGRAPFLHSYGAFGTGINGGDFFPHWVKARRHGLGVGLDDFSLTATAAHNGRLFLPDEVSEIYGRSDYGYHLPAAAYAKSLKAIARHLGVEIFETTGVMVERGDDGIVALLLDDGGRVESALFADLTREGLLREATGSAFEAWTMPGDRMLTALAPRFAALPVYAEIRAGVDGWTGLFPSLTHMHVAHVFSGAATSDDAALQAAATTSGLTLDAVTFRTFTSGMAREPWAGNVIGLGEAACSFDPSHGLALHGLQLSVVHLLGVYPAEGYSYAARRAEYNRVMRSHFARVADFQAAHLTLQDYAGPFWDTARTLPISAELAHMIDFFRARGELAPQEDESLPPDSWRALFIGHGIAPESWRPAVDRVPPHEVNVHFRKMLGFVREQVLRQPTHDAYLARIMQRAHG

SEQ ID NO: 83590 - protein, 536 aa, Yersinia intermedia
  REGION 1..536: note = tr|A0A208ZSE5|A0A208ZSE5_YERIN Tryptophan halogenase; OS = Yersinia intermedia OX=631 GN=CBW57_18930 PE=4 SV=1
MSKPIKNIVIVGGGTAGWMSASYLVRALQQQANITLIESAEIPRIGVGEATIPSLQKVFFDFLGIPEREWMPQVNGAFKAGIKFVNWRKSPDPSRNDYFYHLFGSVPNCDGVPLTHYWLRKREQGFQQSMEYACYPQPEALDGNLAPCLHDGSRQMSHAWHFDAHLVADFLTRWAVDRGVNRVVDEVVEVKLNDRGFISSLFTKEGRKLEADLFIDCSGMRGLLINQALKEPFIDMSDYLLCDSAVATAVPTDDAQVGIEPYTTSIAMNSGWTWKIPMLGRFGSGYVFSSKFTSRDQATADFLNLWGLSDNQPLNQIKFRVGRNKRSWVNNCVAIGLSSCFLEPLESTGIYFIYAALYQLVKHFPDTSFDLRLTDAFNAEIIYMFDDSRDFVQAHYFTTPREDTPFWLTNRHDLRLSDAIKEKVERYKAGLPLTTTSFDDSTYYETFDYEFKNFWLNGNYYCIFAGLGMLPDRSLPLLRLRPESNDKAEAMFARIQREAERLRANLPTNYDYLRSLHEGDSGLFRPGPTPASLEIP

SEQ ID NO: 83591 - protein, 497 aa, unidentified
  source 1..497: note = Mycobacteroides chelonae
  REGION 1..497: note = tr|A0A1S1L0I7|A0A1S1L0I7_MYCCH Tryptophan halogenase; OS = Mycobacteroides chelonae OX=1774 GN=BKG75_04245 PE=4; SV = 1
MTASYLKVAFGDRITVTVVESARIGAIGVGEATFSTIRHFFDYLGLEEHEWMPSCCATYKLGIRFQDWRKPGHHFYHPFERQRVVDGFGLTDWWLDNPRSDSFDRDCFLIGTLCDNDKSPRRLDGSLFMDTDGEHTAYRTTLSEQDTQFPYAYHFDASLLADFLRDFAVRRGVRHVVDDVVDVLQDDRGWISEARTRAHGSIEGDLFIDCTGFSGLLLGRAMGEPFESYQGSLLNDRAVALRVPTDQNGGHLPPYTTATAQDAGWIWSIPLFDRIGTGYVYAEDYCSPEDAERALRDFVGPAAEGLEANHIRMRIGRSRRSWVGNCVAIGLASGFVEPLESTGIFFIQHGIEQLVKHFPDENWEESLRDSYNRVINRCMDGVREFLVLHYYLAARVDTQYWRDTKSVQLPTALAERIEHWRSKLPDAGSVYPHYHGFEPYSYVCMFVGLGGIPARPAAVVRYLDATRAQREFDLIAQQASRLRHSLPTHREYLAQMY

SEQ ID NO: 83592 - protein, 498 aa, Sphingopyxis sp.
  REGION 1..498: note = tr|A0A0M8JH89|A0A0M8JH89_9SPHN Tryptophan halogenase; OS = Sphingopyxis sp. C-1 OX=262667 GN=SC1_02497 PE=4 SV=1
MSDKKPVRVVIAGGGTAGWMMAAAIARTMGQTVDLTLVESEQIGTIGVGESTIPPLVNFNRILGIPETEFMRATQATFKLGILFDNWKHDGDSYFHSFGLSGKDHWSAGFQHFWLNARERGHEQPYSDYCLELVAGMEGKFAHLPEERMNYAYHVDATLYGRFLRKLAETDGCKRVEGKIARVELDGESGDIAALHLDGDRRIEGDMFVDCTGFRGLLIDGALHAGFEDWSHWLPNDSAIAVQSKHLGPPQPYTQAIAHDAGWQWRIPLQHRMGAGIVYSSGYLSRDEAYDRLMGSVGEPLIEPFDIKFKGGVRRKQWFRNCVAVGLAGGFVEPLEATTVHLIQRAVLRFIRLMPNGRVSERDAQEFNDQQRLDIEQIRDFVVLHYKATNRRDSPFWRHVANMPIPDSLQQKIELFRETGRVFRKYEELFAENSWVQVMMGQGIEPQSYHPIADKLRDDEVERLFQSIRDNIAQTVATLPEHHAYVARYCGAEEPKAA

SEQ ID NO: 83593 - protein, 497 aa, Pseudoalteromonas sp.
  REGION 1..497: note = tr|A0A3R8TGD4|A0A3R8TGD4_9GAMM Tryptophan 7-halogenase OS=Pseudoalteromonas sp. J010 OX=998465; GN = EAG18_18855 PE=4 SV=1
MNEKISNSVPKSIAIIGGGTAGWMSAILLKSNWVNSKVILIESPDVPVIGVGEGSTPALKYFFQSLNIDEKEWMKRCNATYKVGIQFPNWSTVPGYESYFHPFFSALDSQTSTAFVKQAKKWRQGERVNVLPDNFFVAASLAKKHKAIITKKSLPIELDYGYHFDSALLGDYLKEKSIERGVIYQEATVDSVIHSDKNIDSLVLDTKQTVTAELFVDCTGFSGVLVNKALKRDFHSYSDMLFNDAAVAIQTPKVTEQLESKTISAAMSCGWRWQIPLRNRDGNGYVYSSKYLSSDEAEQELRSVLPEQGKGCHARHIKMRVGRLNEHFLGNCLAVGLSQGFIEPLEATALMLVQYTVMSYINGVENEYSAEKLNKKINDQFDSVRDYVVCHYKINSKEGKYWQDCRENNSISANLNAILQAWTSSDDFESSYKELLGDSAYAKASWYSILCGMGLSDLDIEARTTLDSLATKALAYCEDTAELFIDQAELFASDTTR

SEQ ID NO: 83594 - protein, 511 aa, Massilia sp.
  REGION 1..511: note = tr|A0A4R3UX76|A0A4R3UX76_9BURK Tryptophan halogenase; OS = Massilia sp. GV097 OX=2135674 GN=C8K02_103557 PE=4 SV=1
MDQGRGRAIRKIVIVGGGTAGWMTAAPLALRLGKACEIVLVESPEIGTVGVGEATLPTIAYYNRALGLDPADFARKTKATFKLGIEFKDWGHVGNRFFHGFGDFGPAIENRSPYMYWLRLARAFKDMPSYEGWSAATAMGRANRFVEPYGDQPSVTNAFSYAYHFDAGLYAAYLRDYAMQRGVARIEGMITAVEQHPETGFITAVRLRDGSRVEGDLFIDCSGFRGLLIEGVFQTGYDDWSAMLPCNSAQAVPCARVEPLTPYTRSTAQSAGWTWRIPLQHRTGNGYVYCNGFTSDEEALRVLLAGLDGRALDEPRQLRFTTGRRRKSWIKNCVAIGLSSGFLEPLESTSINIIENSVGWLLQHFPDRDFQPALADEFNRLVSQRYESVRDFIVMHYKITQRDDSEFWRYCAAMPVPDTLRHQIELFRETGRVAIYDPEGFQVSSHISIMAGLGLTPKTYDPLIDLMDLQALRTHFDRVRDTISRAVQAMPDHGAYVSQLAAEPTLSGLAA

SEQ ID NO: 83595 - protein, 498 aa, Xanthomonas campestris
  REGION 1..498: note = tr|Q8P6Z0|Q8P6Z0_XANCP Tryptophan halogenase; OS = Xanthomonas campestris pv. campestris (strain ATCC 33913 / DSM 3586 / NCPPB 528 / LMG 568 / P 25) OX=190485; GN = prnA P E=4 SV=1
MTQARIRKVVIAGGGTAGWVAAAALAHQFRGLLEIVLVESEQIGTIGVGESTVPPIRAFHRFLQIDEQEFLRAVAGTFKLAISFEDWQGQGDRYIHPFGSTGQGTLVCAFHHFWLEAQRRGMHSGFDEYCLEAQAARADRFAVLQQPAVNYAYHLDAGLYARFLRTHAQRYGATRIEGKIQQVRQHADSGFVEALVLEDGQVVEGDLFIDCTGFRGLLIEQTLHTGYEDWSHWLPCDRAVAVQTESVEPPVPYTRAIAHAAGWRWQIPLQHRVGNGLVYARAHLSDDEASAMLLAAVQGTPRRDPMLVPFVTGRRLQTWNKNVVALGLASGFVEPLESTSIHLAIVAVMRLITLFPADGIAQPQVDLFNRISRAEAEHVRDFVILHYHATQREEALWRQCRAMELPESLQLRLRAWREGAHAWQDGDELFRVDSWTHVLLGQRVAPAQHHPLTRALPDQHLQQLLDGIRQPLQHVVTQLPTQQAFIDSYCKVDQSTWG

SEQ ID NO: 83596 - protein, 502 aa, unidentified
  source 1..502: note = Verrucomicrobia bacterium
  REGION 1..502: note = tr|A0A3E1ECG3|A0A3E1ECG3_9BACT Tryptophan halogenase; OS = Verrucomicrobia bacterium OX=2026799 GN=DVB22_003187; PE = 4 SV=1
MKEASKITRVLVLGGGTAGLLAALTLKRKLPQLEVEVVRSVEMGVIGVGEGTTAAFPRHLFEYLKLPPGEFYAGAEPTWKLGIHFVWGPYPQGYYYTFQNEFKSRWPELKRNTGFYYEPETRWLGIVSACMAHGKAFPRKPDGSLHMHNNHAFHIENKKLVGWLESTCERNGVRLTEGTVERVETGAEGVEALHLAGGRRVTADLYVDASGFRSELLGRALGEPFLGYEKSLFCDRAVIAGWPRTDEEIKPYTVAETMDAGWCWQIEHENWINRGYVYSSRFISDEEALAEFRRKNPKIANEPRVVKFRSGRYARPWVGNVVAVGNSMGFVEPLEATAIQVICVECSTLADTLVDSLQEPTQTLKDLYNTYNVRQWDDIRDFLAVHYAFNTRVDTPFWRACREETDLGGAVAMVRYYKENGPSVLPEPVLFDPNNSFGLEGYLAMLVGMGVPHGKPWKASDPEKKIWRERLAGFGQHGQRGFSVKEVLGMIRAGGVKQAGSG

SEQ ID NO: 83597 - protein, 503 aa, Pseudoalteromonas lipolytica
  REGION 1..503: note = tr|A0A0P7E6G4|A0A0P7E6G4_9GAMM Tryptophan halogenase; OS = Pseudoalteromonas lipolytica OX=570156 GN=AOG27_14560; PE = 4 SV=1
MIKKIAIVGGGTAGWLAANHLGHALLQSGIEITLIESPNIASIGVGEGTVPSMRYSLQKFGISESDFINECDVTFKQSIKFVNWLDKHKHGANFYHHLFDHPHIFGEDLTQQWLADGHGNDYADFVSKQHACCENNLAPKTIATPQYAGINGYAYHFDAKKFAAFLGSHATQHFAVKHLFAEIKDVSCDEQGFITHLIDSDGNALEFDFIIDCSGFSAAFIGQKLGVGFVDKSASLLTDTAITLQVPTQSDDEIPPYTIATAHQAGWIWDIALTERRGVGFVYSSKYMSDEQAHAKLHHYLGNKFEHLTPRKIPMKVGHREKMWHKNCVAIGLSQGFVEPLEATAILIADFSAGLLAKRFPRTREDINLVADEYNQQVNYVWQQTFDFIKMHYCISDRTDSAFWRDNKKTDQLSEKLKNNLARWQRFSPVREDFASKFDLFDLENYLYVLFGMHYVPAKQQTKQSDNQQVAKLKQQRVNQLLSELPKHRELLDKIKKFGLQKY

SEQ ID NO: 83598 - protein, 513 aa, Pseudoalteromonas lipolytica
  REGION 1..513: note = tr|A0A1I6ZL82|A0A1I6ZL82_9GAMM Tryptophan halogenase; OS = Pseudoalteromonas lipolytica OX=570156; GN = SAMN04487854_10645 PE=4 SV=1
MQQNNVKKVVILGGGTAGWLTAGLIAAQPHLTHNAQITLIESPDIATIGVGEGTWPTMRQTLKTIGISESDFIQTCDASFKQGSRFDGWCEDDGSTHYYHPFSLPVAYQQLNIAPYWFANKEAVSFSHAVASQTYLCDHHKAPKNHLHSAYQGEANYGYHLDAGKFAMLLQTHCTTQLNVEHIVSHVESINNDDEGYISSLETRDHGIITGDLFIDCSGTHAKLLHQHYGVELIEQQDVLFNDRAVAVQVPYASPQQDILSYTKATAQDAGWIWDIGLQSRRGLGMVYSSRFANSDDAKQALGRYIESTQPGTDQSQLTFREIRFTPGYRRTFWHKNCLAIGMSAGFIEPLEASALVMVELGLNNLLANFPTHRAAMLTLAKRFDDQCHYRWQRIIEFLKLHYVLSKRTSPYWQAHKEAASVPAQLQENLALWQYQSPWLNDFDRAQEVFSAASYQYVLYGMKQLPKFPSMAMPAAIVEHFTANQQHAKHALQQLPTNRELLNHIQQFGIQPI

SEQ ID NO: 83599 - protein, 501 aa, unidentified
  source 1..501: note = Verrucomicrobia bacterium
  REGION 1..501: note = tr|A0A388PCH1|A0A388PCH1_9BACT Flavin-dependent tryptophan halogenase RebH OS=Verrucomicrobia bacterium; OX = 2026799 GN=EMGBS8_05900 PE=4 SV=1
MIQDVLILGGGTAGFFMAASLKTHHPCLRVRVVRSPTLGIIGVGEGSTTDLLRFIHGFLRVPPSEFYRAVKPSLKLGIKFLWGKEDYHYTFTGALRQKFEPSGVPIGFACDETLADVDIHTSLMAAGKVFPRSPDGPWPLVNPTVGYHIENAELVAWLESHAAKLGIEVIDGDLAAVEQAEGEIQALHLKDGQRLAADFFVDASGFRAELIGKALGTPFISYADSLFCDKAVVGGWARTSEPILPYTTAETMAAGWAWQIEHPGRINRGYVYCSKFISDADAEAEFRAKNPKVGPTRIVPFVPGRYAHQWVGNVFAVGNAAGFVEPLEATSLLCIAHECRFLTIALAEGGLKKNYSMRETTDHLCGRLWDEIRDFLAVHYRFNQRADTPFWRHCRAHVALHGAQRMVDFYRENGPTFCLEVELLAPAQSIFQLEGFWLHLVAMGVPHERMDRLTPAERQWWASQRASNRGRAATGLTVEESLKVLHDPRWSWRPDFYKDVH

SEQ ID NO: 83600 - protein, 520 aa, Sphingopyxis sp.
  REGION 1..520: note = tr|A0A0W1G454|A0A0W1G454_9SPHN Tryptophan halogenase; OS = Sphingopyxis sp. H071 OX=1759078 GN=ATE69_19935 PE=4; SV = 1
MTQKVERVVIVGGGTAGWLAASLIATSRRAKAAPLSVTVVEAPDVPIVGVGEGTWPTMRTTLQTIGLDEAEFLAACDGAFKQASRFDGWVDGSAGDSYLHPFTTPPPLPIGELLAAWQATAPDQPFAAAMSAQAAVCDLHLAPRQRAMPGYQGATNYAYHFATEKFGALLGAHAKRNPLITHILDHVTGVRHAENGDIAALTTRSGREVEGDLFIDCSGFKGLLIDGALGVEWVDRSDHAFNDRAIASQVPVPPGSPIASQTIATAHEAGWIWDIGLPSRRGIGCVYSSRFMDAERAEAILRNYIARELPGAVPDSNVFGVPFRHIGFKTGHRERFWERNCLSVGLAAGFVEPLEASAIVLIELSLRALIDNFPADRAAMDIHAGRFNKLFRYRWDRIIEFLKLHYVLSRREEPYWRAHRDPDHIPPHLADLLTLWRDQPPSSSDFPYIDEIFSAQSHQYILYGMGFPPPAGWPASDGAVAALAEMRQRARTLAAGLPTNRAYLDALAGERPGAAEAAAE

SEQ ID NO: 83601 - protein, 498 aa, Sphingopyxis sp.
  REGION 1..498: note = tr|A0A0W1G654|A0A0W1G654_9SPHN Tryptophan halogenase; OS = Sphingopyxis sp. H071 OX=1759078 GN=ATE69_18340 PE=4; SV = 1
MRLMIIGGGTAGWMAAACLRRFLPRDWSVRLVESDEIGTVGVGEATIPQIRLFNDALGIDEDEFLAATQGTIKLGIEFRDWTRVGHRYMHAFGAIGRGLGLVDFHHYWLRARAAGLAESLDHYSLNERAARARRMQRGAPRTSRYLLEMPYAYHFDAALYAAFLRRRAEAGGVERIEGRIGEVRLDPQRGDVAGVTLDDGRRFDGDFFIDCSGFRGLLIEGALASGYEDWSRWLLNDRAVAVPCAHGTVPQLPWTGATARDAGWQWRIPLQHRIGNGYVYCSAHIGDDAALDTLLSDLDGAAQAEPNQLRFVSGKRRRMWNRNVVALGLASGFMEPLESTSIHLVQAGISRLVKMLPSGAADPAVAAEFNRQSDFEWERIRDFIILHFKATERQDTPYWRDRAEMDVPDTLAAKIDLFRAQGLIFREHEELFTESGWLQVLVGQAVEPLRWHPLADSLEPAELAQFIAGISLTIEREVAQMENYDAFLAAARPAGVAA

SEQ ID NO: 83602 - protein, 786 aa, Methylobacterium sp.
  REGION 1..786: note = tr|A0A5C8WTW7|A0A5C8WTW7_9RHIZ Tryptophan 7-halogenase OS=Methylobacterium sp. WL8 OX=2603899; GN = FV234_11025 PE=4 SV=1
MTRRIVIAGGGLAGWMTAAHLRRVLRRAGWSVTLVAPRRRPSGPSALATGPDLTRALRASDIDETIFMRRSGATYRLASRFTDWFQPGAGHWLPFGPCGPRPNGFDLFHFWLKHHLAGTTATAYADHALQARMAALRLGPTRADGASSVIEAGDYGYHVDREGMIGFLRDLALSEGVRAVEGRIEGVRRDFGGDVAGLAVAGGRSIEGDLFLDCTGSAALLIGDALGEPWEEASPAHHSVSLALPIDPARTPATEYRGVADGWIETIPLARSTVATFHYDARDTSGEAALARLHPAGEAGVPVSHRAIVAGRRARSWRRNVLAIGDSARAGEPLLGLDLHRILRAVESLVDFLPYGVGETHLRHAFNARMAELDAGLRDATALHYRLGRRPEPFWTRARDDAPGGALPERLDLYEMAGRIEAPQGIGFDETAYYHTLAGAGLLPRRAYAPADLVDARESARFLAAVQARTEALATAFAPHARALERIHGGALPASPAISASLRPPAPAHDPLANLRRSEHGTRLIDAVLALGQPFGHEHSVKASAGVLQADRYLLSLHRTALGLDPSHTLDRVAAGLGLSAGARAEAAAAIAGADIVHLGFEDGPSGPLYKLYVEWSSEADRVWREGAAAQGGASILVHRAYKWRPLDDAPPVVTLYRWPRVRTPDEIAARLACLGEAAGGAFTRRLADAILDVVRRQGTGLPHYLEAAEEPGPRLSYDLNLYAAGLKLGAVAPILRDAFVAVGVPVGEAERMLAARQEEDLGHVASGLGRDGRPFVTVYSGVRAA

SEQ ID NO: 83603 - protein, 503 aa, Sphingomonas sp.
  REGION 1..503: note = tr|A0A0Q4IQ79|A0A0Q4IQ79_9SPHN Tryptophan halogenase; OS = Sphingomonas sp. Leaf230 OX=1735694 GN=ASE82_18335 PE=4; SV = 1
MTEHPIRRVVIAGGGTAGWMAAAAIARTMGSTIELTLVESDAIGTVGVGESTIPPMITFNRLLGINEAEFMRETQATFKLGILFDDWKDRGESYFHSFGITGKDHWSAGFQHFWLHGLTKGHAQPYDDYCLELRAALQGKFAHLPDDRMNYAYQLDSTRYAKFLRKMAEADGTRRLEGRIAQVELNGESGDIAALVLESGARIEGDLFLDCTGFRALLIEGALHAGFDDWTHYLPCDSAIAIQTESVRPALPYTRAMAHDAGWQWRIPLQHRTGNGIVYCSRYLDRDAALDRLLAHIEGKTLTEPNVIRFVTGARRQQWHRNCIAIGLSGGFMEPLESTSIHLIQRAVLRLLRLFPSGPVSPREVAEFNDQQHTDMLQIRDFLILHYKATNRRDSAFWRQCTAMPIPASLEQKIELFRETGRVFRKNEELFAENSWVQVMLGQGIVPRSYHPIATKLRDDELARLLGGLRDGTNATVAGLPEHAEYVARYCGAAPAPSPVLAA

SEQ ID NO: 83604 - protein, 536 aa, Ideonella sp.
  REGION 1..536: note = tr|A0A437RSG2|A0A437RSG2_9BURK Tryptophan 7-halogenase OS=Ideonella sp. KYPY4 OX=1862385; GN = EOE66_03840 PE=4 SV=1
MPTQPTHIQHIVIAGGGTAGWMAAAALAKLLGTAWRITLIESEEIGTVGVGEATIPLINIYNNALELDENLFMRETAATFKLGIEFVNWGRQGDRYIHGFGPLGPDIGLTKFHHYWLKMRALGQADDLDAYSINNAAAKANKFIRAQRDMGNSPLAEIAHAYHFDAGLYAAFLRRYAEKLGVVRLEGKISGATTRPEDGFVDAVVMEGGRRIEGDLFIDCTGFRGLLIEQALHTGYDDWSHWLPADRAWAVPCESVNPLTPYTRSTARTAGWQWRIPLQHRTGNGHVFSSKFIGEQDAADVLMQNLDGAPLADPRMLKFVTGKRKQLWNKNVVAVGLASGFMEPLESTSIHLIQNTIARLTTFFPYRKFDAADIAEFNRQSDFEFERIRDFIILHYKATERDDTAFWNYVRTMPIPDTLQHKFDLFRSNGRVFRENGELFSEISWVEVFLGQRVMPEAYHPLVDTLPEAKIADFLKSVRHTIARCVDAMPTHAEFVAQHCATDIPKRKAEAEAAAMAMKKMQAAAGAGPKPAVQTA

SEQ ID NO: 83605 - protein, 390 aa, Corallococcus coralloides
  REGION 1..390: note = tr|A0A410RQQ0|A0A410RQQ0_CORCK Tryptophan halogenase; OS = Corallococcus coralloides OX=184914 GN=EJ065_2647 PE=4; SV = 1
MSEDSCDVAVIGGGPAGAALAVALRRRAPSLSVTLVERTTYDAPRLGETLPPDVRLPLSRLGVWEGFLRDGHLASRGTSSCWGRAEPGFHDTMMSPWGSAWHLDRARFDERLSLEAFHQGAQVLRAATLVDSESLGRSGYRLRLAHGAADPSTLRARFVVDATGGKATFASARGARRLVSDRCFAVYGAFQLQGDAAFPSHALVEACPEGWWYSALLPRGRVVVALVGDGDSLRGLRWATPASWMNLLRQAPATRARLDVCDFTGEALVAVPVLVGQLDRPRGEQWLAVGDAACTYDPLSSQGITKALDSALLAADALERCLRGDADALQDYESTLNTRFQDHQRTRAAYYRQEQRWPQAPFWKNRWEALPAPAAPPAQLLRPHSTEVNP

SEQ ID NO: 83606 - protein, 513 aa, Sphingomonas sp.
  REGION 1..513: note = tr|A0A0Q4IXM0|A0A0Q4IXM0_9SPHN Tryptophan halogenase; OS = Sphingomonas sp. Leaf230 OX=1735694 GN=ASE82_06425 PE=4; SV = 1
MHEIQNIVIVGGGTAGWLTAGVIAAKHQARRQHGFTVTLVESPNVPTIGVGEGTWPTLRSTLKKMGVSETELFRQCDASFKQGARFNRWTTGAPDDGYYHPLMLPQHFGQVNLAPHWLADEGSATFCDTVTPQGRICDEGLGPKTIATPEYDGHANYAYHLDAGKFSHFLQRHCCDTLGVRHVKADVTEVHLDESGDIATLDTEQGVSIAGDLFIDCTGFAALLIGGAMKVPFRSCTDILFCDTALAMQVPYDVPDAPIASHTISTAQSAGWIWDIGLPTRRGVGHVFSSSHISADAAEQELRDYIGPAARDLTARRLAIRAGHREQFWVRNCVAVGLAAGFLEPLEASAIVLIELSAKMIAEQMPACREVMDVVAHRFNDTAHYRWGRIIDFLKLHYALTKRTDTAFWRDNVRPESIPNRLARLMELWRFQPPWVHDEFDRAEEVFPSASYQYVLYGMGARTAVMPGSIDDDVALARRARHDNQVQTQRLVSSLPGHRDLIDKIKRHGLQSI

SEQ ID NO: 83607 - protein, 505 aa, Xanthomonas citri
  REGION 1..505: note = tr|A0A2H1SMM5|A0A2H1SMM5_XANCI Tryptophan halogenase; OS = Xanthomonas citri pv. fuscans OX=366649 GN=prnA PE=4; SV = 1
MTQAQIRKVVIAGGGTAGWIAACALSHQFRNLLDITLVESEQIGTVGVGESTVPPIRTFHRFLQIDEQEFLRAVAGTFKLSISFEHWRRQGERYIHPFGITGQSTLVCAFHHLWLESQRRGMPGSFGDYCLETVASRVDRFALHGEPAVNYAYHLDAALYARFLRARSEACGVKRVEGRIQQVTVQPHSGDVASLVLEDGQTIEGDLFIDCSGFRGLLIEQTLHTGYEDWSHWLPCDRAVAVQTEALGPPVPYTRAIAHEAGWRWHIPLQHRVGNGLVFSSKHLSDDEAHAKLLRDVAAPAVKEPWMVPFRTGRRLKAWNKNVVSLGLASGFIEPLESTSIHLTISAVVRLLALFPAGGIAPSQVQLFNDISRAEMEHVRDFVILHYHATQREEPLWQQCRQMELPESLALRLRAWRERAHAWQGADELFRVDSWTHVLMGQGIAPEQHHPLPRAFSDHDLRRLLDGIAQPIQHAVQQMPSQQDFIERYCKAGEQVWGMRSPVPA

SEQ ID NO: 83608 - protein, 521 aa, Xanthomonas axonopodis
  REGION 1..521: note = tr|A0A1T1NT12|A0A1T1NT12_9XANT Tryptophan halogenase; OS = Xanthomonas axonopodis pv. melhusii OX=487834; GN = Xmlh_19860 PE=4 SV=1
MPDTTPSDPQQRPVRRVVIAGGGTAGWMAAAALSKLLGRHLQITLVESDEIGTVGVGEATIPSLVTFHRLLEIDEAAFMAATQATIKLGIAFEHWRDVDQHYIHSFGHAGTDHWSAGFQHFWLKGRQRGVARDFGDYCLELRAAQEGRFAHLPNGGMNYAYHLDAGLYARFLRRFSEGFGVSRVEGRIGQVETDAQSGFLAALTLQDGTRLEGDLFLDCTGFAGLLIGKTLGVGSDDWSRWLFADSALAVQTESVGPPVTYTRSRADQAGWMWRIPLQHRVGNGIVYSSRYMDQDGARAVLERNLTGRALTEPRPLRFTPNQRHRVWEKNCVALGLASGFLEPLESTNIHLIQRGIIRLLQTFPQVINAVDIAEYNRQAAQEITHIRDFVILHYHATDRRDTPFWRDCAAMDIPDSLRHRVELFRQSGRVFHQANELFAENSWVQVMLGQGVVPQQHHPVADLMGDAELSRFLETIRTRVEAALVRLPAHADFLQRYCPAPPLPEAAARVPAPPVMATPAG

SEQ ID NO: 83609 - protein, 510 aa, Ideonella sp.
  REGION 1..510: note = tr|A0A437RRP2|A0A437RRP2_9BURK Tryptophan 7-halogenase OS=Ideonella sp. KYPY4 OX=1862385; GN = EOE66_01925 PE=4 SV=1
MHTPEDRRIRHVVIVGGGSAGWMSAAALSRAVGTACRITLVESEEIGTVGVGEATIPPIRLFNQMLGIDEAEFLRRTQGSCKLGIEFVNWGAEGHRYFHPFGPHGLAFDLAPLHQHWLRHRHTPGVAGLDEHSMAWNLARRARFERPSGDPRSVMSTFDYAYHFDAGLYARFLRELSESRGVQRLEGRITGTRLRGHDGFVEAVQLADGRSVEGDLFIDCSGFRGLLIEEALHTGYEDWRHWLPCDRAMAMPCASAGPLLPYTRSTARAAGWQWRIPLQHRTGNGYVYCSQYISDDEAAATLKSHLDGEALGEPRPLRFVTGRRKQLWHRNVVAVGLASGFMEPLESTSLHLVQSGLSRLLALWPDRDFDPLVTAEYNRIGVQEFERIRDFLVLHYKLNAQRSGLNQPLWRYCAEMAIPETLQYKMAHFRRYGRLVSDGPDLFGAASWLAVHIGQLHWPERHDPMVDLRPLDGASVLQRQRAAMAQAAEAQPTHAAFLQRHAPAAPVARV

SEQ ID NO: 83610 - protein, 508 aa, Brevundimonas sp.
  REGION 1..508: note = tr|A0A4P8QJC1|A0A4P8QJC1_9CAUL Tryptophan 7-halogenase OS=Brevundimonas sp. SGAir0440 OX=2579977; GN = E7T10_13035 PE=4 SV=1
MMTQTDAGPIRKVVILGGGTAGWMTAAALSHRLAGSPVSIELVESDEIGIVGVGEATLPHIRAFNTAMGIDEQTLIDQTQATFKLGIQFVDWGRPGDSYIHPFGAYGEPIEGIDFHHVWAARRAMGDAADISDYSYPVRAAEANRFQRPVSAPGSMLSTFSYAFQFDASLYAAFLRRVSCGRGVLRTEGKVVDHVLNGATGDVDAIVLSDGRRITGDLFVDCSGFRGRLINQALETTFEDWSHWLPCDSAFAVPCQTTAPVGPYTRATARVAGWQWRIPLQHRTGNGHVFSSAHTSDEDAVATLMSNLEGPALAEPRRLSFKTGRRHKLWNRNVVAIGLSGGFLEPLESTSIYLIQLGITTFLDLFPDRVGMAADAEEYNRIMALEFDRIRDFLVLHYVANQRDEPFWREMRTMAWPDSLSAKVEAFKSRGLLPDYDIGVFLPPSWLAVLVGQNIVPNGWDPRVDRLEPHVLSDKLAALRDDVRSTVDRTPDHMTFISDAAARAGSLR

SEQ ID NO: 83611 - protein, 505 aa, Sphingomonas sp.; identical to SEQ ID NO: 83486
  REGION 1..505: note = tr|A0A0Q4K8T4|A0A0Q4K8T4_9SPHN Tryptophan halogenase; OS = Sphingomonas sp. Leaf32 OX=1736214 GN=ASE83_12770 PE=4; SV = 1

SEQ ID NO: 83612 - protein, 512 aa, Caulobacter sp.
  REGION 1..512: note = tr|A0A0Q7W5I0|A0A0Q7W5I0_9CAUL Tryptophan halogenase; OS = Caulobacter sp. Root1472 OX=1736470 GN=ASD47_15460 PE=4; SV = 1
MQDSASDRRIRDIVIVGGGTAGWMAAASLKHHFGAAPVTITLIESSEIGTIGVGEATIPTIRRFYQALGLSDIDVLRATGGTCKLGIRFNDWTTPGASFIHPFGLYGQDLKGVAFHHYWMRLRALGEAAPIGDYSLGASLAAGGKFTTPSRNPPSTLSVFDWALHFDAGLFARLMRQVAEQNGVRRLDAKIVKTNLRGEDGFIESVTLDSGATVAGDLFIDCSGFRGLLIEEALHTGYEDWSRWLLCDGAMAVQSEGKGDPPPYTDVTARPAGWQWRIPLQHRWGNGYVYSSRHTTDEAARMVLTGSLDERLLHEPRKIGFHPGRRLKAWNKNCIALGLASGFLEPLESTSIALIETGIEKIKSLFPNRDFDPAVIDEFNEMSRLEMERVRDFIILHYKLNQRPEDPTGFWTHCREMAIPDTLRKKIDLWRAQGHFVRYRWEMFSPPSWLAIYAGFGLLPETYDLSVDGFDAGQLSAALAEMRKAVADTVASTRAHGDFIEQYARPRSVAAE

SEQ ID NO: 83613 - protein, 522 aa, unidentified
  source 1..522: note = Unknown
  REGION 1..522: note = tr|A0A061QFG6|A0A061QFG6_9PROT Flavin-dependent tryptophan halogenase PrnA OS=alpha proteobacterium Q-1; OX = 1492281 GN=prnA PE=4 SV=1
MNSSDRPAPPPHHHPGTDHAIRTIAIIGGGTAGWMAAAVLAKALGQQIRIRLVESDAIGTIGVGEATIPQIRNLNHYLGLDEHEMIRQTKGSFKLGIEFSDWGRIGDRYMHAFGDIGQSLGLSPFHHYWLRATQSGHPHSLWAYSLNQQAAIQNRFGPLERLGDSRLTGLRYAFHLDAGLYAAMLRSYSEARGVERLEGRVVDVKQHSGDGFIQSVLLENGTEIEADLFIDCSGFRGLLIEDALKTGYEDWSHWLPCNRAAAVPSETPTDASGKPLMRPYTQSMARPAGWQWRIPLQHRVGNGHVYCSAHLSDDEACALLLANLEGPALTEPRLLQFKTGRRKKAWNRNCVALGLAGGFMEPLESTSIHMIQTGISRLVSMFPDKNCDPALAAHYNEATRFEYERIRDFLILHYKATQRQDTAFWRACAEMPIPQSLQQKIELFEASARLYREADELFTEIGWLQVLLGQSITPRAYHPLADAISDAQLAEFLDHIRLLINRGVASLPNHHSFISRISANFN

SEQ ID NO: 83614 - protein, 503 aa, unidentified
  source 1..503: note = Verrucomicrobiales bacterium
  REGION 1..503: note = tr|A0A352XMS3|A0A352XMS3_9BACT Uncharacterized protein OS=Verrucomicrobiales bacterium OX=2026801; GN = DDW21_07790 PE=4 SV=1
MVSQTSTNEDKYISSVLILGGGSAGLLAALTVKCMLPQYRVVLVHSQEIGVIGVGEGTTAVFPAHLFGTLGIPKERFYREAQPTWKQGIRFLWGERGDYFYDFGFQYDLQYPGMSKATGFYCDQECTDLNDVCAMMQDGKAFASGPLNKPLIKGEYAFHIENEKLVRCLTNIAIEQGVIIEEDTLQHAEQDDLGITALHFTSGRIHHADLYIDASGFRSELIGKALGVTRNSFSKALFCDRAVIGGWTREEEPLQAYTTAETMDAGWCWKIEHENFINRGYVYSSKFISDEDALAEFKKANPKINATRVVKYLSGRMERNWEKNVVAIGNSSGFVEPLEATSLAQIIFASRWLVELLKQQQHRATAAGRERYNREMGRAWDEIRDFLAFHYKFNTLRDTAFWKHCQEHTHLGEFQEFFEMYQKIGPAPELVNALPFKPNIYGIEGYLAHLIGMKVPFHARHEPTAEEKTLWQKHRRKSRLIASAALTSEEALAAIRKPEWSWK

SEQ ID NO: 83615 - protein, 502 aa, Caulobacter sp.
  REGION 1..502: note = tr|A0A0Q7WIG0|A0A0Q7WIG0_9CAUL Tryptophan halogenase; OS = Caulobacter sp. Root1472 OX=1736470 GN=ASD47_14940 PE=4; SV = 1
MDRVRRLVILGGGTAGWMAAAALAKTFGPQLKIDLLESEAIGTVGVGEATIPTIQWFNELIGLDEAEFVRATKATYKLGIEFVDWARPGHRYFHPFGRYGVDLGPVPFHQRWLKACAEGLDRPLSAFSLATQLAAANRFAKPTNEARSILSTLGYAYQFDAMLYAKYLRGLAEAGGVTRREGKLETVERAPDTGFVTALTTDRGERLEGDLFLDCSGFRALLIDGVMEAGFEDWSHWLPCDRAVAVPCARVAETTPYTRATLRPAGWQWRIPLQHRTGNGYVYSSAFLSDDEAAATLLGGLDGAALDAPRFLRFKAGFRRETWRKNVVAIGLSSGFLEPLESTSIHLIQSGIAKLITLFPDRDCDPGLARQFNTLFGRDMDGIKDFLILHYHATEGHETPLWRHTRHMALPDSLVDKEEQYRRAGRLMLTSDELFREASWLAVLEGQGVRAQGYSPLADTLDPTLNRQQLEQIEAVIARATPTLPRHDDAVAALIGALATAV

SEQ ID NO: 83616 - protein, 497 aa, Streptomyces vitaminophilus
  REGION 1..497: note = tr|A0A0T6LSS8|A0A0T6LSS8_9ACTN Tryptophan halogenase; OS = Streptomyces vitaminophilus OX=76728 GN=AQ490_21395; PE = 4 SV=1
MTATYLKAAFGDRIQVTLVESEQVTRIGVGEATFSTVRHFFDFLGLDEADWLPKCAGGYKLGIRFQNWSKPGEHFYHPFERLRVVDGFSLADWWLELGDRSQPFDRQCFITTALCDAKRSPRMLGGSLFASGLDGSLGRSTLQEQRDQFPYAYHFDADAVAQYLAEYGVKRGVRHVVDDVLAVEQDERGWIDHVRTRGHGDLRGDLFIDCTGFRGMLINQTLGVEFESFADVLPNNRAVALRVPREEATEMDPYTSATAMSSGWMWTIPLFRRNGTGYVYSDEYISADEAEAELRAAVGPGAEDAEANHIRMRIGRNKQGWSGNCVAIGLAYAFVEPLESTGIFFIQYAIEQLVRHFPDENWDPQLRLDYNERMHRVVEGVREFLVLHYKAARREDTPYWKEAKARKAPDSLLQRLEMASSHLLDDETIFPFYHGFENYSWNAMNLGLGIIPPTSRPAIRHIAPDNAKREFARLKAEADELVAALPSCYEYLASIND

SEQ ID NO: 83617 - protein, 508 aa, unidentified
  source 1..508: note = Verrucomicrobiales bacterium
  REGION 1..508: note = tr|A0A2D4ZBG2|A0A2D4ZBG2_9BACT Uncharacterized protein OS=Verrucomicrobiales bacterium OX=2026801; GN = CMO46_06960 PE=4 SV=1
MEFKNIVIVGGGSAGWMTAATMAKAFPNKKITIVESPTKPVIGVGESTTQLMRRWQEYLEIPDIDFITKCNATNKLSIRFENFHKNDKVGFHYPFGRLDQRFFNVAEWFQHQYLTKVPFENLVSDMSPISKCLDSNKVPVTMFGDGIWSLQKDAAWHFDTHKFYAYLRDEYCLPKGVVHIVTDVYGAQTDEHGYITSLNTDNGPITGDIFFDCTGFKRALIEDVLEEPWGEFNNKTYTDCAWAAARPYKDKEKELRLYTNSVALGYGWVWEIPTWERIGTGYNYASKYISKEEALQEFKNYLGPVAEEMEFKHIQMRNGMSKRLWVKNCISIGLSGAFIEPLESNGLMSVHEFLLNFVNIAEGKDVLNNFDAQSFNHTCREQFLYFADFITLHYAMTNRNDTQYWQDIQQQDFNDSPLLKEIYELRGSQFFNVEERLSFNTLGANIYMLAGHKINPYTSFKHSNMHFWNVDFDNKVKDLQQIIDNNNKEKQQITDTFPTSLEYYSQFH

SEQ ID NO: 83618 - protein, 309 aa, unidentified
  source 1..309: note = Chitinophagaceae bacterium
  REGION 1..309: note = tr|A0A4Q3SRS1|A0A4Q3SRS1_9BACT Tryptophan 7-halogenase (Fragment) OS=Chitinophagaceae bacterium; OX = 1869212 GN=EOO07_33750 PE=4 SV=1
ESGVIEADFFIDCTGFSSLLIEKTLDVSFVSFNDNLFNDRAIAIPTPIDNNQEIPTETVSGAMKYGWAWKIPLVNRYGNGYVYSSEFVTPEDAESELRASLGVDSDNMPARHLKMRVGRREVHWKNNCLAVGLSQGFIEPLEATALMLVQFTIEIFADNYSFADSIDIAQSVVNKKINKMFDGVRDYIVAHYHLNNRVDTAYWIANREHKNHSDSLIAILDAWDRGLDFEARLTELRETQVYMRPSWYCLLAGMGRFPTPEKLSKNIGNINDSIGIRKNCDTLAYSLFPSHREYLKEIYGFAWNNSPTH

SEQ ID NO: 83619 - protein, 500 aa, Novosphingobium sp.
  REGION 1..500: note = tr|A0A102DDQ5|A0A102DDQ5_9SPHN Tryptophan halogenase; OS = Novosphingobium sp. Fuku2-ISO-50 OX=1739114; GN = AQZ50_03960 PE=4 SV=1
MDDTRIRKVLIVGGGSAGWMTAAMLAQILRHECQVTLVESDDIGIVGVGEATIPPIRTFNETLGIAEKDFLRATQGTFKLGIEFVGWGARDGRYFHPFGPHGRNFDVVSLHHYWLRARAMGDTSSFDEHAMAWALARAGRMAKPATDPRSVMSTFDYAYHFDAAGYARFLRGYAEARGVTRVEGTIAAVDQHGETGFVEAVRLDDGRRLEADLFIDCSGFRGLLIDGAMHEPFEDWSHWLPCDRAVAMPCAHPAGSTNPTPYTRSTAQEAGWQWRIPLQHRIGNGYVYCSAFLDDDRAATLLAGRLDGEALADPRFIRFKAGRRRRHWVRNVIAIGLSSGFLEPLESTSIHLIQANISKLIAFFPDKRFDPLVIDEFNCVACGETERIRDFIILHYKLMQRDDAELWRHTAAMDVPETLALKIAHFRRHGRLIARELDLFGPDSWLAVHLGQGNVPEDCDPLIDYRGIDARDWLAKLRAAMAQEAARAPDHARHIAQVMA

SEQ ID NO: 83620 - protein, 503 aa, unidentified
  source 1..503: note = Verrucomicrobiales bacterium
  REGION 1..503: note = tr|A0A352XPF6|A0A352XPF6_9BACT Uncharacterized protein OS=Verrucomicrobiales bacterium OX=2026801; GN = DDW21_10865 PE=4 SV=1
MIQSILVLGSGSAGLIAALTIKRKIPQVRVTIVRSPEIGIIGVGEGTTPNFPRHLFDYLGISRKEFYAIAKPTWKLGIRFLWGERKEFYYGFSQQLDAQWSALPKPNGYYCDDDFSAVDLPVAMMEQGKVFARQANGAPDVQPWHAFHIENVNLVECLQRYARAIGVEIIDGKVVGAERGPKGISAVFTEDGRKFEADFYVDSSGFHSELLGKTLEKPFVSFDKSLFCDRAVVGGWERGADEPILPYTTAETMDSGWAWQIEHEHHVNRGYVYSSHFISDDQAAEEFTRKNPKAPKSPRVVKFRSGCYKRMWVENVVAIGNAGGFVEPLEATALMIVCSESQTLVEFLLHSNLKPTDTFRNLFNKALWNTWEEIRNFLALHYYANTRMDTPYWKACREETDISGLQELLAFYRENGPTGFGRHTLPHTGTDFGMEGYLVMMVGNKVPYQNRSTPTEAEWNIWRSAQAQNRAIASQAMTVKEALYFVHHPGWQWTSDAQPLISK

SEQ ID NO: 83621 - protein, 210 aa, unidentified
  source 1..210: note = Betaproteobacteria bacterium
  REGION 1..210: note = tr|A0A2N2QZ80|A0A2N2QZ80_9PROT Tryptophan halogenase (Fragment) OS=Betaproteobacteria bacterium HGW-Betaproteobacteria-6 OX=2013718 GN=CVU33_20725 PE=4; SV = 1
QAEQELREHLGLLDDPVGARHLQMRVGRVEQVWSHNCLAVGLSQGFIEPLEATALHLVQTTLESFIEHVERDGDLDMRRQSFNEGIARDFDGVRDYIVCHYRMNRRTDTEYWRANASHDQLSDSLKAILTCWFTGQSLEQELARQNIADIYPAMSWHCLLAGYGQFPDAAKLRAPEPGIGKADMAAIDDFRSRCALNFRDHAKVLSEMAA

SEQ ID NO: 83622 - protein, 496 aa, Stenotrophomonas rhizophila
  REGION 1..496: note = tr|A0A1B2N4Q0|A0A1B2N4Q0_9GAMM Tryptophan halogenase; OS = Stenotrophomonas rhizophila OX=216778 GN=BAY15_2027; PE = 4 SV=1
MVIAGGGTAGWLAGCALSHQFREQLDITLVESEQIGTVGVGESTVPPIRTFHRYLQIDEQEFLKAVAGTFKLSISFENWRRPGERFIHPFGSIGQSTWATPFHHFWLDSLRRGMPSDLGDFCLESVASRGDRFSLQSQPQVNYAYHFDAGLYAKFLRRRAEAQGLRRVEGKIREVRQHAHDGSVAALVLEDGQVIEGDLFIDCTGFRGLLTEQTLHSGYEDWNQWLPSDRAVAVQTESVKPPVPYTRAIAHEAGWRWHIALQHRVGCGLVFSSRHMSDDEAQAKLLRDIEGQPLRDPWLVPFRSGRRLKAWNKNVVALGLASGFIEPLESTSIHLTISAVVRLIQLFPFDGITPTLTALYNDVSRQEMEHVRDFIILHYHATQRDEPMWKACREMELPESLAVRLRAWRERAHAWQDPGELFRVDSWTSVLMGQGILPGPPHPLARALSDADLRTLLARIQQPIQQAAASMPSQAEFIERYCKASAEVWPRSLATA

SEQ ID NO: 83623 - protein, 519 aa, Caulobacter sp.
  REGION 1..519: note = tr|A0A0Q7W6Y3|A0A0Q7W6Y3_9CAUL Tryptophan halogenase; OS = Caulobacter sp. Root1472 OX=1736470 GN=ASD47_22540 PE=4; SV = 1
MERRRRILIVGGGAAGWLTAAYLAKSLRVAEQAHLEITLLESPEVGIIGVGEATFPTIRTTLQFLGVDEARFIRETSATFKQGIRFNDWAWAPRQDGERHQYFHPFEAPFSTDGASLAPYWLLQNEATRAPFAEAMTIQARVADAQRAPKRPHEGNFSGPLNYAYHFDAAKLAQVLAERARELGVRHLQGRLTEVELDATGAIDHVVCAEHGRLEAELYIDCTGFHAELIGKALKAPFKSARPILFADRALACKAPYDRPDAPIQSFTIATAHEAGWIWDIGLKDARGVGCVYSSDHMDDDRAEAILRGYVGQDVEIAPRALAFEAGYRTKQWVKNCVAVGLSAGFLEPLESTGVVLIEAAVAIIAELFPHNGPISAPALRFNELMTARFDNIITFLKLHYCLSRRTEPFWRQNADPASMPERLVDLLEQWRWRPPTRYDFILDLETFAFFNYQYILYGMGFKTDLSPGRSEFPDVAGAEKLFAKIRNFGERATHDLPSHRDLIAQINRFGFDRSLEPA

SEQ ID NO: 83624 - protein, 493 aa, Sphingomonas sp.; identical to SEQ ID NO: 83464
  REGION 1..493: note = tr|A0A0Q4KGC8|A0A0Q4KGC8_9SPHN Tryptophan halogenase; OS = Sphingomonas sp. Leaf32 OX=1736214 GN=ASE83_02965 PE=4; SV = 1

SEQ ID NO: 83625 - protein, 509 aa, Stenotrophomonas rhizophila
  REGION 1..509: note = tr|A0A498CPW6|A0A498CPW6_9GAMM Tryptophan halogenase; OS = Stenotrophomonas rhizophila OX=216778 GN=BCL79_0307; PE = 4 SV=1
MNVANTTQGRIRKIVIAGGGTAGWLAGCALAHQFRDQLDITLVESEQIGTVGVGESTVPPIRTFHRFLQIDEQEFLQAVAGTFKLSISFENWRRPGERFIHPFGTIGQGTWATPFHHFWLDSLRRGMPSDLGDFCLESAASRQDRFSLQSQPQVNYAYHFDAGLYAKFLRRKAEGHGLRRVEGKIREVRQHAHDGAVQSLVLEDGQVIEGDLFIDCTGFRGLLTEQTLHTGYEDWHEWLPSDRAVAVQTASVGSPVPYTRAIAHEAGWRWHIALQHRVGCGLVFSSRHMSDDEAHAKLLRDVDGPPLRDPWLVPFRSGRRLKAWNKNVVALGLASGFIEPLESTSIHLTISAVVRLIQLFPSDGISPALVDLYNEVSRQEMEHVRDFIILHYHANQRDEPMWKACREMELPESLAVRLRAWRERAHAWQDPGELFRVDSWTSVLMGQGIQPGPAHPLAAAIGDADLRTLLMRIRQPVEQALATMPSQAAFIERYCKAAQDVWPRASALA

SEQ ID NO: 83626 - protein, 511 aa, Caulobacter sp.
  REGION 1..511: note = tr|A0A0Q7VBH2|A0A0Q7VBH2_9CAUL Tryptophan halogenase; OS = Caulobacter sp. Root1472 OX=1736470 GN=ASD47_07935 PE=4; SV = 1
MLTETSRENGPLRRIAIIGGGAAGWMAAAALARVLGPRGPAITLVESEEIGIVGVGEATIPPIRAFNAMIGLDEDVFVRETKGTFKLGIEFVDWRQRGHRYFHPFGVYGPDFGPTPFEGAWRRLRQAGLGQPLETYSICAQAAAAGRFARPQPGAGPLSQLAYAFHFDATLYAKLLRAHAEAAGVVRREGKVAAVNLRSGDGFVESVTMEDGERIAADLFLDCTGFRALLIGQALESPFEDWARWLPNDRAVAVPSANAGPPAPYTRSTAREAGWQWRIPLQHRTGNGYVFSSRHVSEDEATATLLAHLDGEPLAEPRVLRFQAGRRPAGWVKNVVALGLASGFLEPLESTSIHLIQVGIARLLEMLPTRAFEPADARRYNRLMATEFNGVRDFLILHFHATERRDTPYWEQLAGMSVPDTLLERLRIYRATGRVFRESDELFTKTSWLAVLDGQGPEVEGVEPLAEGLPLDQVEARLARIAEATAQAVRRMPAQADFIRAHGQAGAPVAV

SEQ ID NO: 83627 - protein, 518 aa, Pseudoalteromonas espejiana
  REGION 1..518: note = tr|A0A510XX06|A0A510XX06_9GAMM Tryptophan halogenase; OS = Pseudoalteromonas espejiana OX=28107 GN=PES01_24280; PE = 4 SV=1
MNQQDKKIKTVVVVGGGIAGWLTAGRLAAHHKSNTPDGLNVVLVESPNVPIIGVGEGTWPTMRSTLIALGISETDFIRECEASFKQGAKFAKWVDGSNDDFYYHPLVLPQGFSKTDMAGHWLNNTAESASFSNAVCYQEAICEQGLAPKTIRTPEYAAIANYAYHLDSAKFAVFLQKHCTQQLGVKHILADVTQVNSAKSGDISSVTTKQQGEISGDLFVDCTGFSSLLLGEHYKVPFKPCDDVLFIDTALAVQVPYDNEDESIASHTISTAQEAGWIWDIGLQHRRGVGYVYSSKYSSEAQAREKLKAYVGDKIESLTVRKIPIKSGHRSHFWQNNCVAVGLSAGFLEPLEASALVLVEMSAQMISEQLPHTRDIMDITAKRFNETFTYRWEKIIDFLKLHYILSNRDDNAFWRDNRDPKTIPQSLQDLMKLWQYRAPADHDFTSNNEVFPAASYQYVLYGMGFKSDYSTTAYMLKDTVFAKSQFDKNKSMINQAVTNLPSNRELLNKIKHHGFSAI

SEQ ID NO: 83628 - protein, 509 aa, Stenotrophomonas rhizophila
  REGION 1..509: note = tr|A0A3N1KQB3|A0A3N1KQB3_9GAMM Tryptophan halogenase; OS = Stenotrophomonas rhizophila OX=216778 GN=EDF74_1306; PE = 4 SV=1
MNVANASQGRIRKVVIAGGGTAGWLAGCALSHQFRDQLDITLVESEQIGTVGVGESTVPPIRAFHRFLQIDEQEFLQAVAGTFKLSISFENWRRPGDRFIHPFGTIGQGTWATPFHHFWLDSLRRGMPSDLGDFCLESVASRADRFSLQTQPQVNYAYHFDAGLYAKFLRRKAEAHGLRRVEGKIREVRQHAHDGAVAALVLEDGQVIEGDLFIDCTGFRGVLTEQTLHTGYEDWNEWLPSDRAVAVQTEAVGPPVPYTRAIAHEAGWRWHIALQHRVGCGLVFSSRHMSDDEAQAKLLRDVDGPPLRDPWLVPFRSGRRLKAWNKNVVALGLASGFIEPLESTSIHLTISAVVRLIQLFPSDGISSTLVDLYNEVSRQEMEHVRDFIILHYHANQRDEPMWKACREMALPESLAVRLRAWRERAHVWQDPGELFRVDSWTSVLMGQGIQPGPPHPLAAAINDADLRTLLTRLRQPIEQAVATMPSQAAFIEQYCKAAQQVWSRGAVVA

SEQ ID NO: 83629 - protein, 487 aa, Caulobacter sp.
  REGION 1..487: note = tr|A0A0Q7VD63|A0A0Q7VD63_9CAUL Tryptophan halogenase; OS = Caulobacter sp. Root1472 OX=1736470 GN=ASD47_12425 PE=4; SV = 1
MAAAAFSKLLGKDFVETVLIESDQIATVGVGEATIPPIRHFNERLGLDEVDFVRQTQATFKLGIEFQDWGTIGHRFFHAFGDFGADIEAIGAHHYWRKLQEQGERFALEDLSMPTQAAYRNKFVPPNPDPRSVMHDYAYAFQFDAALYARYLRGYAQERGVTRIEGRIVDVQLRGTDGFIEAVVLESGARVEGDLFIDCSGFRGLLIEGALETGYEDWSHWLPCDRAIAAGCGSGGDGLTPYTRTTARPAGWRWRIPLQHRTGNGYVHCSQFVSEDEAVADLLSSLDGPLIGQPQTIRFTPGRRLKAWSRNCVAMGLASGFIEPLESTSINLIQTAIGRLLDFFPNKDFDPVLIDEFNRLSQQEMEHVRDFIILHYKLTERTDSGLWDYCRAMAIPDELAHRLAVFQRTGRLVTHDDDGFAPPSWLAIFHGLKVVPDRYDPLVDRMSVEEIRAVLDARRAAILRAAEAMPGQQAFIDKFCRAELPAA

SEQ ID NO: 83630 - protein, 483 aa, Sphingomonas sp.; identical to SEQ ID NO: 83439
  REGION 1..483: note = tr|A0A0Q4JWE1|A0A0Q4JWE1_9SPHN Tryptophan halogenase; OS = Sphingomonas sp. Leaf32 OX=1736214 GN=ASE83_12760 PE=4; SV = 1

SEQ ID NO: 83631 - protein, 537 aa, Streptomyces sp.
  REGION 1..537: note = tr|A0A3N6FFU2|A0A3N6FFU2_9ACTN Flavin-dependent tryptophan halogenase RebH OS=Streptomyces sp. ADI95-17; OX = 1522759 GN=rebH PE=4 SV=1
MTGTSTATDKAIKKVVILGGGTAGWMTAAYLGKALHSTVDVTVLEAPSIPRIGVGEATVPNLHRVLFDFLGIEEEEWMRECNASYKMAVRFINWRTPGKGQSGPRELDKGGPDHFYHPFGISPEHDNIPMSHYWFKNKFEGKTDEPYDYACFREAPLMDANKAPRHLDGTSPTRYAWHFDAALVADFLRRFATEKQGVNHVQDEMTRVEKDERGFVKALHTKEGRVLDADLFVDCSGFRSLLMNQAMEEPFVDMSDQLLCDRAVATAVPHDDEANGVEPYTSAIAMSSGWTWKIPMPGRFGTGYVYSSRFTTQEEATAEFCELWGLDPETTKFNHVKFRVGRNRRAWVKNVIGIGLSSAFLEPLESTGIYFITAAAYQLAKHFPDKTFNQTLVDNFNKEIEVMFDDTRDFIQTHFYFAPRTDSPFWRANKELKLPASIREKIDAYKAGLPVNPAATDDTTYYGNFEAEFRNFWTNERYYCIFAGLGLEPDAPLPILYHKPESVAAAQAMFTQVKKEQQELLNSLPSTHEALLRLHAK

SEQ ID NO: 83632 - protein, 496 aa, unidentified
  source 1..496: note = Chitinophagaceae bacterium
  REGION 1..496: note = tr|A0A4Q3TA61|A0A4Q3TA61_9BACT Tryptophan 7-halogenase OS=Chitinophagaceae bacterium OX=1869212; GN = EOO07_24560 PE=4 SV=1
MHKPIKKVVIVGGGTAGWMSAALLKKIMGTVIDIELVESEDIGRIGVGEATIPPIRYFNQVLGINEAEFLQATKASIKLAIKFEHWRTQGESYFHTFGGAGKNIAFCPFHHFWLRAKSLGDTSSLWDYDLNYLCATSNKFAPINSKDSALDMPYAYHFDASLYAAFLRTLSESLGVKRVEGLIEQVLVNPDSGYVEKLFLKSGEIIQGDLFIDCSGMRGLLIQQNLNTGYEDWSHWLPCDRAIAIPSERLEQTLPYTRSIAHSAGWQWRIPLQHRNGNGIVYSSNYYSQDEAATILLNNLDSKAIGEPNFISFKTGRCLKQWNKNVIAVGLSSGFLEPLESTSIHLIQSAIVRLIKIFPHLGIDECNVAEYNKQSKLEFEQIRDFIILHYHVNERTDSQFWCDLRNMEIPETLAHKINLFRSTGKIFREQDDLFLESSWLQVMLGQGVFPKDYHPLANGPSNEELIDLLGNLKKIKNSPLEHIPHHDEFLKQVCAP

SEQ ID NO: 83633 - protein, 502 aa, unidentified; identical to SEQ ID NO: 83213
  source 1..502: note = Betaproteobacteria bacterium
  REGION 1..502: note = tr|A0A2N2QZ68|A0A2N2QZ68_9PROT Tryptophan halogenase; OS = Betaproteobacteria bacterium HGW-Betaproteobacteria-6; OX = 2013718 GN=CVU33_20720 PE=4 SV=1

SEQ ID NO: 83634 - protein, 515 aa, unidentified
  source 1..515: note = Massilia violaceinigra
  REGION 1..515: note = tr|A0A2D2DHE6|A0A2D2DHE6_9BURK Tryptophan halogenase; OS = Massilia violaceinigra OX=2045208 GN=CR152_07710 PE=4; SV = 1
MKAFHNVLIVGGGTAGWLTACYLARTLGTAGAGAAGVSITLVESPEIGIIGVGEGTFPSIRATLAAIGIDEARFVRECQATFKQGVRFNHWVRPAGAPGADHYFHPFSQPSQRQGGPELLPHWLQGTAGAGIPFAEAATMQKRVADAAHGPKRLADADYTGPMNYAYHFDAGRFAALLAEHGRFLGVRHVQATVERVELDAGGAIACVHTREHGALGADLFVDCTGFRAALIGDALGSPFRKMDDVLFVDRALAMQVPYPSPDTPIPSYTVSTAHEAGWTWDIGLQQRRGIGYVYSSRHTTDERAEEVLRQYIGPAADGLTPRQLKLNIGYRDVQWVKNCVAVGLSGGFLEPLESSGIGLIETAAYLIGHLFPFNGDTAPVAAQFNRLMRERYERVVDFIKLHYCLSQRTDSAFWTDNTDPRSIPASLRDKLAMWRCRPPHRLDFVADVEMYPTSSWQYVLYGMEFATGLHPSACQPERRDEAAAEFAMIAKLAGHALADLPPHRALVEHLCQRR

SEQ ID NO: 83635 - protein, 496 aa, Caulobacter sp.
  REGION 1..496: note = tr|A0A0Q7W891|A0A0Q7W891_9CAUL Tryptophan halogenase; OS = Caulobacter sp. Root1472 OX=1736470 GN=ASD47_13200 PE=4; SV = 1
MQDQVVKKVVVAGGGTAGWMAAAALARQLGPLLDISLVESDEIGTVGVGESTIPTARTFNALLGIDEPAFMRATQATFKLGISFEDWGRVGDRYIHSFGQVGKSNWMGSFHHFWLQARAAGFGGELGDYCFELQAALADRFSVGEGPELNYAYHLDATLYGGFLRQMSEGLGVRRIEGKIGQVERHPETGFIRALVLENGDRVEGDLFIDCTGFRGLLIEQTLKAGYEDWSHWLPTNSALAVQTRSTGPAVPYTRAIAHQAGWRWKIPLQHRVGNGLVYCDDYMSDDQARETLLGALDGERLIEPRVIRYRTGRRRKTWSKNCIALGLASGFVEPLESTSIHLIMIGVTRLMQLFPFGGVSDAVVARYNQQAVDELEKIRDFIILHYKLTERTDSPFWDRCRTMDIPDSLAQRIALFHESAQAFQAPGELFQVDSWLQVMLGQRLEPVAHHQMGRLMPPEQLRAALADLSGNIARAVGSLPNHQAFLDRYCGVAAA

SEQ ID NO: 83636 - protein, 513 aa, Caulobacter sp.
  REGION 1..513: note = tr|A0A0Q7W5G5|A0A0Q7W5G5_9CAUL Tryptophan halogenase; OS = Caulobacter sp. Root1472 OX=1736470 GN=ASD47_06865 PE=4; SV = 1
MRPIKNIVIVGGGTAGWLTAGVIAAKHKARAGTGFTVTLVESPNTPIIGVGEGTWPTLRTTLATIGVSETDFFRECDAAFKQGAKFARWTTGAADDAYYHPLMLPQGFSQVNLAAHWLANPGEQSFCDAVTPQGRICDAGLGPKTITAAPYQGAANYAYHLDAGKFAPFLQRHCCGKLGVRHILADVRGVAMTDDGDIRGVVTEQAGEIQGDLFVDCTGFRALLLGEALGVPFKDCGDVLFCDTALAIQVPHEHENAPIASHTISTAQSAGWIWDIGLPTRRGTGHVYSSRHISDEDAERELRAYIGPAARDLPARKIPIRSGHRETFWKRNCVAVGLAAGFLEPLEASAIVLIELSAKIIASQMPACREVMDVVAARFNATTHYRWGRIIDFLKLHYVLSKRSDTAFWRDNRDPATVPERLADLLRLWRHQPPWLHDEFDRVEEVFPTASYQYVLYGMGFRTEIEPEALADERVLAERAMRENAVQTERLSASLPRHRDLIRKIVEHGLQPV

SEQ ID NO: 83637 - protein, 504 aa, Alteromonas sp.
  REGION 1..504: note = tr|A0A433F4G2|A0A433F4G2_9ALTE Tryptophan halogenase; OS = Alteromonas sp. KS69 OX=2109917 GN=C7Y69_01145 PE=4 SV=1
MMSSDSDNSNTSGAKTSPVKRVVIAGGGTAGWMAATALSKLLGKSLSITLVESKDIGIVGVGEATIPPIRTFHKLLGIDEKAFMRATNATFKLGIEFENWREQNHSYIHSFGVTGRECWAGEFHHFWLRAKDLGFGGDFGDYCTELKAAKEGKFAYGERMPMNFAYHFDAVAYGRFLKGLALEAGVTHIEDDIQHVSKRSQTGCITSIKLSDDKEIAGDLFIDCTGFKGLLIEKALHTGYENWSHWLPCDSALAVQTASTGAPIPYTKSVAHTAGWRWKIPLQNRVGNGLVYCSNYMSDDEAKDTLLSAIEGETLNEPRIIRFTPGKRRLGWNKNCVALGLASGFIEPLESTSIHLIMTGIVRLMRLFPFDGITQSTVDEYNNKYNSEMAAILDFIVMHYKVTNRKDSPFWEHCNSMDIPPSLTHKINLFKQTGRVFLDDGDIFRVDSWTQVMMGQGVVPEQYHRVADEMSETELERFLAGLKQQVDKQVSALPYHQDFLKKYL

SEQ ID NO: 83638 - protein, 511 aa, Caulobacter sp.
  REGION 1..511: note = tr|A0A0Q7VAY6|A0A0Q7VAY6_9CAUL Tryptophan halogenase; OS = Caulobacter sp. Root1472 OX=1736470 GN=ASD47_12420 PE=4; SV = 1
MTDNRIRKIVIVGGGTAGWMAAAGLSRVLREHQPQPLKVEIQLIESEEIGTVGVGEATIPPLILFNQFLGVNEDEFVRATQATFKLGIEFVDWTRLNHRYLHPFGRYGADLASSAFHHYWLKLRSLGDPSDFGDYSLPTLAAGLRRFDRPTANSASIMSTYSYAFHFDAGLYARFLRGYAEARGVQRVEGKIVDVALRGGDGFIQSVTLADGRVVDGDLFIDCSGFRGLLIEQALKSGYDDWSNWLPCDRAVAVQSESVEDLTPFTRATAHPAGWQWRIPLQHRVGNGYVYSSPFISDDEAAATLLRGLDGEPCVDPRFLRFTAGRRRRYWNKNCVALGLASGFMEPLESTSIHLIQTGITKLIQLFPDRSFSPVLLDEYNRLTDQEYEKIRDFLVLHYHANERTDSPLWRQVREMPIPDGLAHKMELFRETGRLASMGQDLFQEPSWLAVLIGQNVMPRAYDPLVDLMDAGVVEKNLRAMRIAMRQAAEAMPSHRDFIGAHCAAPDLSPR

SEQ ID NO: 83639 - protein, 496 aa, Caulobacter sp.
  REGION 1..496: note = tr|A0A0Q7W5D2|A0A0Q7W5D2_9CAUL Tryptophan halogenase; OS = Caulobacter sp. Root1472 OX=1736470 GN=ASD47_06905 PE=4; SV = 1
MNSGHQQDIVILGGGAAGWIAAALLAKKTGRHQTRITLVESEEIGIIGVGEATVPVLAQCNALLGIDESDFVRRTQGTFKLGIEFCDWGVAGNRHFHAFSDYGHQVEGVAPHHYWLRLRQSGDDHPIDDYSFAYAVAKNNKFAPTDPQNPRYHHAYHFDAALYARYLRDVATELGVQRIEGKMTHVDLDGETGDIAAIHLANGVTVAGDLFLDCTGFASELLGKALNTPFVDWSRWLLCDRAMAAPSKRPDEPTPFTRSTAHAGGWRWTIPLQHRSGNGMVYSSEFWSDDAARDALLGNLDGEPLAEPRLFRFTSGHRKQFWNRNCVGIGFASSFLEPLESTGLQLIVMGMLKLLRYFPERTIDPVLRDEYNQLSTREIERIRDFIIAHYYLSRRPEPLWAACRDIEIPDSLRHKLDVWNATGQIALGDSESYMEPSWLAILLGNGVIPARYNISADLYPLDQIRKGMDLRREEIIRSAQSVPSHQDFIDRHCKAP

SEQ ID NO: 83640 - protein, 504 aa, Caulobacter sp.
  REGION 1..504: note = tr|A0A0Q7W5J8|A0A0Q7W5J8_9CAUL Tryptophan halogenase; OS = Caulobacter sp. Root1472 OX=1736470 GN=ASD47_15465 PE=4; SV = 1
MAHLNKIVIVGGGSAGWICAAMLSHYFQNGPTQVELVESEEIGTIGVGESTIPPFLQLIRTLGINEQEFIQETQAAFKLGIRFENWLEKGDVYYHPFGQIGGPLEVNEFYQCWLRAKQNGHPSKLQDFAPASVMAEAGKFMLPAAAQKTMIANANYALHVDARLVALYLRRFAEARGVKRTEGIVTEVATRPDGGVAKVILKDGREVAGDFFIDCSGFRALLIGKTLGEPFRDWGDVLLCDRAVVAQTENVGPPHPYTLVQAQDFGWRWRIPLQHRAGNGYVFASKYLSDDEATATLMRQVQGEVVLGPNIIPFKTGVRERPWVKNVVSIGLSCGFIEPLESTALHLIYKGMDYLLRFMPDMDADPVLAAEYNRRMVADYEEIRDFIVLHYVTTRRDDTPFWRDYQQVVPPESLRERIALFKAAGVLRDGVDDMFRAPSWQSVMEGMGVRPERYQQLVDRIPLSVIMNLMDKSAPMLADFVATLPSHEEFLRTHCPAAPLRRSA

SEQ ID NO: 83641 - protein, 524 aa, unidentified
  source 1..524: note = Limimonas halophila
  REGION 1..524: note = tr|A0A1G7P938|A0A1G7P938_9PROT Tryptophan halogenase; OS = Limimonas halophila OX=1082479 GN=SAMN05216241_102481; PE = 4 SV=1
MADRIDAVTIVGGGIAGWLSAVMLDRFLNTGSDAPVRITVIESPSPDAPMAGEATLPSLPNLLRQLGISESEVFRRCHATFKLGVRYTGWDTDHRGKPLRYLVAHTAEPLCAGRPAALYHLAFGGGGPDFAQAALPASALIGMSRGPRTPADGEYGARAGYGYHLDPEAFAHLLWETAVQRGIEHVLADVAEVERDDAGNAAALRLADGGAVPVQLVFDTTGRIHRELGGAEVEAAPTPNDRVIAARMPAPRGAKKRPSMDVTALSAGWAWDFPLRNRIGAGYVFSAQHLSDEQARDELLALLGRGASEAGVQVRTLPARFGWLRRRWVGNCIALGPAAAAHEPLEATAVAGINRAVRWLMYYWPDRGDPGALRERYNGLMRQLDQEIADYTATHYRLSNRADTAYWQAVSGRVPVSAAHRANLDLWQTSLPGKDDVTRNALFQAGTYTMMLFGKGFYRGRALPKSRDLAERDWAEHRRKVEAAKAQMGRNLPDHDALLAATRGDRGQQVAGLTTLAGEQPAMP

SEQ ID NO: 83642 - protein, 513 aa, Rhodanobacter sp.
  REGION 1..513: note = tr|A0A1E4NLY0|A0A1E4NLY0_9GAMM Tryptophan halogenase; OS = Rhodanobacter sp. SCN 66-43 OX=1660135 GN=ABT18_06530; PE = 4 SV=1
MSESAIRRVVIVGGGTAGWMAAALLARGLGAACEIRLVESAEIGTVGVGEATIPQILHINAFLGIDEDELMRFTHGTYKLGVQLNDWGRIGDSYLHAFGDVGLPLGLLPFHHYWLRSRAQGDPHSLWAYSLNAAAAALNKFARLDKVGNSPLGGIRYAYQFDAARYAQYLRERIPEGAVKRIEGKVVEVELRGEDGFIESLRLEGGELVEGDFFIDCSGFRGLLIEGALKTGYENWQHWLPCDRALAVASARSTPMLPYTQAFARSSGWQWRIALQHRTGNGHVYCSRFISDDEAAAQLLANLASEPLEDPRPLRFVTGMRKLAWNRNCLALGLAAGFMEPLESTSIHLVQSGIARFLGMFPDRHCDPLLVDQYNRQTRFEYERVRDFLILHYKATERDDTPFWQQCGAMDVPEELARRIVLFRRTGLIFREADELFTETGWLQVMLGQRIEPRQYHPLADELEASKLQAFLSDIRTLVNRTVERLPAHDAFVARTCTPVASGPTSKVARSAT

SEQ ID NO: 83643 - protein, 515 aa, unidentified
  source 1..515: note = Flammeovirgaceae bacterium
  REGION 1..515: note = tr|A0A2D7NTF0|A0A2D7NTF0_9BACT Tryptophan halogenase; OS = Flammeovirgaceae bacterium OX=2026740 GN=CMB82_01090; PE = 4 SV=1
MNASPHHIVILGGGTAGWLVAGVLGAEFDTSSIKVTLIESPTTPAIGVGEGTWPSMKSTLLKIGLSERMFLEECSAALKQGTHFKNWLHGKGETYYHPFTLPHGFGEINLADHWIRGHLGDQSFASSVTPQFAVCEAGLAPKQLSVPEYAYTLNYGYHLDAGKFAAMLSAHAVNNLGVEHVLADVTAVTSRENGDIEALVTDKGPIAGDLFIDCSGFRSVLLGEHYNVPFVSQRHVLFNDSALAVQVPYGSDSKIATTTKSTAHEAGWIWDIGLQHRRGVGAVFSSAHASAEAIEPQLDTYLKESGSASGLSEFEPRLIRFDPGYRASFWHKNCVAVGLSAGFIEPLEASALVLVELSARSIAQQFPKTRQQMGTVAQRFNAEFLQRWEQIIEFLKLHYVLSQRDDSAYWIEHRQAASVPTALTEKLADWCHRCPWHLDERRVDEMFPSASYQYVLYGMNFKSELGKDSRRHSEASLARAHALKAEVDAQSSRYLQHLPCHRSLLDKAIAHGFAG

SEQ ID NO: 83644 - protein, 518 aa, Colwellia chukchiensis
  REGION 1..518: note = tr|A0A1H7JQ29|A0A1H7JQ29_9GAMM Dehydrogenase (Flavoprotein) OS=Colwellia chukchiensis OX=641665; GN = SAMN05216262_102319 PE=4 SV=1
MSKPLKHVVIVGGGSAGWIAAGSIAAMHNTQSAQGLKVTLIESPDVKSIGVGEGTWPTMRTTLQKMGISETDFIRECDVSFKQGAKFAKWVTGADDDFYYHPLVLPQGYFDIDLFKYWQKDQQGKSFSEAVCFQEQVCENGLAPKLITSPEYAAVANYAYHLNAGKFAEFLKAHCINKLGVNYISDHVGKINSTETGDIASLSTKKHGDITGDLFVDCTGFSALLIGQHYQVPFISKKDILFIDTALAVQVPYEDGADEIASHTISTAQDAGWIWDIGLPSRRGVGHVYSSRHTTQAEAEKALRRYLKDSIGEKSESLSLRKIDINPGIREKFWVNNCVAVGISAGFLEPLEASALVMIELAVATIAEQLPANRECMDIVAQSFNERFNYNWDRIIDFLKLHYIASKREDTAFWRDNRDPATIPDSLKSLMTLWQHRSPSEYDFHHKREVFSAASYQYVLYGMDFDFTPNDRGATETEEKMAQRMFTENKQITQKYVSALPKNRDLIDKIHEFGFSKI

SEQ ID NO: 83645 - protein, 516 aa, unidentified
  source 1..516: note = Kitasatospora xanthocidica
  REGION 1..516: note = tr|A0A372ZRJ5|A0A372ZRJ5_9ACTN Tryptophan 7-halogenase OS=Kitasatospora xanthocidica OX=83382; GN = DR950_12690 PE=4 SV=1
MLDRVVIVGGGTAGWMTASYLKAAFEDRVDITLVESGNISTVGVGEATFSDIRHFFEFLGLKEKDWMPACNATYKLAVRFEDWREPGHYFYHPFEQMRSVNGFPLTDWWLKQGPTSRFDKDCFVMASVIDAGLSPRHLDGALIDQPFDEGADEMQGLTMSEHQGKTQFPYAYQFEAALLAKYLTQYATDRGVKRIVDDVQDVRLDDRGWISGLRTAEHGELTGDLFIDCTGFRGLLLNKALEEPFISYQDTLPNDSAVALQVPMDMAKRGVLPCTTATAQDAGWIWTIPLMGRVGTGYVYAKDYLSPEEAERTLRAFVGPAAADVEANHIRMRIGRSRNSWSRNCVAVGLASGFVEPLESTGIFFIHHAIEQLVKYFPAQDWNPVRRDLYNRAVAHVMDGVREFLVLHYVAAKRTDTQYWRDTKTRKIPDSLAERLELWKAQLPDSETVFPYYHGLPPYSYMSVLLGMGGIEVAHSPALDLSDGAAAEREFAQIREKTERLVATLPKAYDYFARMR

SEQ ID NO: 83646 - protein, 497 aa, Pseudoalteromonas espejiana
  REGION 1..497: note = tr|A0A510XT14|A0A510XT14_9GAMM Tryptophan halogenase; OS = Pseudoalteromonas espejiana OX=28107 GN=PES01_10140; PE = 4 SV=1
MKPIKHVVIAGGGTAGWIAAALLNKVLGKVINITLIESSTIGTIGVGEATIPPIIQLNNALGINEQDFINATNASIKLGIEFENWKTPSHSYMHAFGSFGKDFPFCDFYNFWVKGKITGSEDSLWDFSLNYQAAKQHKFSPLNTIPNTQLPGLSYAYHFDATRYAEYLKTLATSRGVKHIDAKIEQVNQCLHSGNITSLTLDNDTEINGDLFIDCTGQRALLIEQTLNTGFVDWSHYLPCDSAVAVQSQGTDSLKPYTRSIAHSAGWQWQIPLQNRVGNGLVYCSRYLSDESATQLLLNNLPAEPITAPRVIKFKTGRRLKQWYKNVVSVGLASGFLEPLESTSIHLIQSAVTRLIKLFPHNGISDALVGEFNNQSVIEIEHIRDFIILHYKLTEREDSAFWRQCKQMDIPESLAHKLNLFKHTGKVVRENDELFAEVAWQQVFIGQGIIPDDYNSIVDSLSSEQLNDLFSTLKTLITSTVEQLPTHKDFLAKIKKA

SEQ ID NO: 83647 - protein, 512 aa, Caulobacter sp.
  REGION 1..512: note = tr|A0A0Q7W245|A0A0Q7W245_9CAUL Tryptophan halogenase; OS = Caulobacter sp. Root1472 OX=1736470 GN=ASD47_17970 PE=4; SV = 1
MTAAYLARRLGSTRPDGVRITLIESSEIGIIGVGEGTFPTIQNTMRTLGVDEARFLREAGAAFKQGIKFIDWKTAPKDGVHSHYYHPFAQPRLLNGGLDLAPYWLMGEAGDIPFSDAVTLQDKVCEAMRGPKRRDDPQYGGPMAYAYHFDAGKLATLLRDVGKATGVRHLLGNVLVVNKADDGAIASVTTREHGDLVADLYVDCTGFAGALIGEAMGSAWIDKSDTLFVDRALALQVPYDRPDAPVATTTISTAHEAGWTWDIGLPDRRGTGYVYSSRHTTDDRAEQILRGYVGQAGDGLTPRLLKLKVGHRQAHWIRNCVAVGLSGGFLEPLESTGIVLIEAAAYMLARNLPRRGGMEAAARQFNAAMTDRYLRAIDFIKLHYCLSQRTDNRFWTDNADPASIPETLRDHLAMWKYRPPNVFDFPNLHESFKYFNYQYILYGMGFETRVDPAAHVHGDLARADFARVREAGLRAAAGLPDHRALLTEIHAHGFSTAAPGLATAEAGEAPRR

SEQ ID NO: 83648 - protein, 516 aa, Massilia sp.
  REGION 1..516: note = tr|A0A1M5L3D3|A0A1M5L3D3_9BURK Tryptophan halogenase; OS = Massilia sp. CF038 OX=1881045 GN=SAMN05428948_1183 PE=4; SV = 1
MKTFQNVLIVGGGTAGWLTACFLAKTLGAARPGGVRITLVESPQIGIIGVGEGTFPSIRGTLSAIGVDEARFVRECHATFKQGVKFANWVRPAGSFGSDHYFHPFSHPSQRQGSAELLPYWLRGLAGEGVPFAQAATMQKRVADAARAPKRTSDGDYLGPMNYAYHFDAGRFAKLLAEHGVTLGVQHVLGNVGQVELNDDGAIARVHTEEHGALEADLYIDCTGFRASLIGQALGSPLRKLDDVLFVDHALAMQVPYPAADTPIPSYTISTAHEAGWTWDIGLQERRGIGYVYSSRHTSDERAEEVLRAYVGPAAAGLTPRKLELQLGYREVQWVKNCVAVGLSGGFLEPLESSGIGLIETAAYLIGFLFPFNGQTEPVARTFNDLMRQRYERVVDFIKLHYCLTQRTDSAFWRENADAASIPASLQAKLAMWQGRPPHRLDFVTDLEMYPPSSWQYVLYGMEFHSALHASAANAALDGQARDEFKTIAMLAERALADLPPHRDLVDHMCARASAR

SEQ ID NO: 83649 - protein, 493 aa, unidentified
  source 1..493: note = Citromicrobium sp.
  REGION 1..493: note = tr|A0A2P0AZJ6|A0A2P0AZJ6_9SPHN Tryptophan halogenase; OS = Citromicrobium sp. RCC1897 OX=1812182 GN=A0U43_11735; PE = 4 SV=1
MAAAALARLTPCAVTLVESEAIGKVGVGEATIPQIRLFNEALGIDEAEFLRETKATFKLGIEFAGWSRAGASYMHAFGEIGAGAGLLPFHQLWLRGLELGMAKDLATYSLNERAARALKMQMWRGDAGHSVPDMPWAYHFDASLYAAYLRRLAEARGASRIEGKVASVERDGANGDIAAVALEDGRRIAGDFFIDCSGFRSLLLGQELATAFEDWSHWLPCDRAVAVPCTTKGEFTPYTRSTAHSAGWQWRIPLQHRIGNGLVYCSDYLSDDEAEAQLLANLDGAPQATPNRLRFTTGMRAQQWSHNCLALGLAAGFMEPLESTSIHLIQSSIARFINMLPGKQPAPAMRAEFNRQAEFEWTRIRDFLILHYWANGRVGEAFWDRCREMALPDTLTAKIEQFKASGFIHREHEELFTIPGWAQVLIGQEVMPQSLHPLTASTDPAALERMLGEIEAGIGQLVDAMPSHVEFLRAYCMPRATNPSPTPVSETAR

SEQ ID NO: 83650 - protein, 487 aa, unidentified
  source 1..487: note = Planctomycetes bacterium
  REGION 1..487: note = tr|A0A5B9MJA1|A0A5B9MJA1_9BACT Tryptophan halogenase; OS = Planctomycetes bacterium OX=2026780 GN=Mal15_37510 PE=4; SV = 1
MDGRFDVAIIGSGFSGSILARILASRGRRVALLDAATHPRFAIGESSTPIADLLLRRLGRQYGFPDLEALSAYGNWQQSLPELACGMKRGFSYFDHRTGIVESRLGERSMIVAASPSDWKSDTHWYRSDVDAFLFAKAVEAGAVAQEGVAVTSLELSTAGDARIGFASGDQVAAAMVVDASGPAAVSARLLGVAPLTDRLQTKTCAAFAHFRGVDSYSSVFNSIHGDGRGCDPFDADAAAQHHLIDQGWAWMLRLDNGITSVGITSPLPADAATRHDTVDRAVQILADRFSAYPTLHQIMRNCEIVAPHSTIHTIGRLQRLYDPVVAENCVMMPTTAVAIDPLHSTGIAHALAGVERLAGLILTPDRGDGVQRYREVILGEAFHLDQIVALGYRAMPSFRRFAASCMVYFAAAIACEERIGRGDVPTKLWQADQERFVAAVGRCAEWVDSDADDNEVVRRMRELIEPWNTAGLFDSVGNRYAYTATK

SEQ ID NO: 83651 - protein, 506 aa, Sphingomonas sp.
  REGION 1..506: note = tr|A0A0W1QJW7|A0A0W1QJW7_9SPHN Tryptophan halogenase; OS = Sphingomonas sp. WG OX=1592629 GN=ATB93_12075 PE=4 SV=1
MDRAISHVVIVGGGTAGWLSACRIAAATAGAIAVTLIESPDVATIGVGEGTWPTIRRTLERIGISETELLLACDGSFKQGTRFDGWATGAADERYYHPFVPPLELDPADLPGGRPYAVAACPQPQVCAADLAPRQRAMPDYAGALNYAYHLDAAKLAVLLTRQATTRLGVRHVRDHVLSVERAEHGSIAAVQTRETGRIAGDLFLDCTGQSALLIGDTLAVDVVDASATLFNDRALAVQLPVAPDSPIASQTVATAHAAGWIWDIGLPSRRGIGCVYASAFMDEAAATAVLADYCRAFLPEMPAPRALRFRSSYRARPWEANCLAIGQSAGFMEPLEASAIVMIELSLDALLEDFPVDPALMPIQARRFNALACYRWERIVEFLKLHYVLSRREEPYWRAHRAAATMPERLVEALQLWRYRAPSALDLPMQDELFPAASYRYILWGMGFPFPQPSPVQRPVRPDLPNQLRQLDQRSRALAASLPTNRAYLDALRGERPPFLERCAS

SEQ ID NO: 83652 - protein, 214 aa, unidentified
  source 1..214: note = Chitinophagaceae bacterium
  REGION 1..214: note = tr|A0A4Q3T4N6|A0A4Q3T4N6_9BACT Tryptophan halogenase (Fragment) OS=Chitinophagaceae bacterium OX=1869212; GN = EOO07_28420 PE=4 SV=1
MSHIKRIIIVGGGTAGWMAAAGLSQYLRQRDIRIHLVESAEIGTIGVGEATLPGIRDFNASLGIDEIDFIKRTQATFKLGIEFNDWKSLGSQFFHPFASYGLPIDDVEFYAVWQRLFKQHKAKDLMHYCLPSMMAKQNKFAQPNPTTTSPLARYHYAFHFDASLYAAYLRRYSEAMGVIRHEDKITQVKLLDNGFIGSVCLEKSDELTGDLFID

SEQ ID NO: 83653 - protein, 529 aa, unidentified
  source 1..529: note = Luteibacter pinisoli
  REGION 1..529: note = tr|A0A4Y5Z2G4|A0A4Y5Z2G4_9GAMM Tryptophan 7-halogenase OS=Luteibacter pinisoli OX=2589080; GN = FIV34_10005 PE=4 SV=1
MAQLKKVLVVGGGTAGWLAACYLAKAVNAVDPRSVQVHLVESPDIGLLGVGEATFPSIRGTLAAIGLDERRFLAGATATYKQGIHYRHWVRPPGAPGATHFFHPFNAPSQRPGGPELLPYWLLGAAPEGMAFADAVSMQSTLVNHSRAPRRAKDPDYQGPVNHAFHFDAACFARVLAEHGQETLGVIRHVATVERTELDEQGAIARVVTKEEGDLTADLYVDCTGLRGMLIGNVMQSPFRSRADVLFADRAVAMQVPYEAPDTPIPSYTISTAQEAGWIWDIGLQKRRGVGYVYSSRHSTDDRAEAVFRRYLGKAGEGAKAMHIKFETGYRPEHWRKNCVAVGLAGGFVEPLESTGIALIELATYLITHLLPTDTDDMEGAAQHFNAMMVARYDRIIDFIKMHYCLSQRRDSAFWTDNCDPASIPLTLQEKLAKWRQRPPHRLDFISDLEMFMTSSWQYVLYGMEFKTDLEPMRSAYPHMEAARQEFAMIQQAASRALDDLPGHRELVEQLCREHAKSLPVAARTGTID

SEQ ID NO: 83654 - protein, 500 aa, Sphingomonas sp.
  REGION 1..500: note = tr|A0A0W1QJ09|A0A0W1QJ09_9SPHN Tryptophan halogenase; OS = Sphingomonas sp. WG OX=1592629 GN=ATB93_13560 PE=4 SV=1
MNVPLRRIVIAGGGSAGWMAAAALSQALAGTGIAITLVESEAIGTVGVGEATIPPIHGFNQMIGVDEAAFVKATGGTFKLGIEFVDWWRRGEGYFHPFGRYGDDFGMVPFHQHWLAARAEGDTTPLGAYSLSTLAAMNGRFGLPQGDARSVFATYGYAYHFDAGRYAAFLRQLSESRGVVRHEGRIGDVEQDPETGFVRTLTLEDGRTISGDLFLDCTGFRALLIGDALSVPYQDWSHWLPCDRAIAVPTAAVAPPTPFTRATARGAGWQWRIPLQHRTGNGHVFCSSFCSEAEAEALLLANLDAPTVGELRHLRFTTGRRTTPWAANVVAIGLASGFLEPLESTSLHLIQSAITALLSWFPDQQFDPVVRAEYNRRVTREWDAIRDFLILHYTATERDDTSFWRHCRAITVPETLIEKVALFARTGRLLGREGDLFMDASWLAVLLGQGVIPRGHDSLANSMTPELRSKILAAMRKTIAGAAAALPPHASTIAQYLHAC

SEQ ID NO: 83655 - protein, 509 aa, Streptomyces puniciscabiei
  REGION 1..509: note = tr|A0A1D7YND1|A0A1D7YND1_9ACTN Tryptophan halogenase; OS = Streptomyces puniciscabiei OX=164348 GN=BFF78_15620; PE = 4 SV=1
MTATYLKASFGERLKVTLVESKKVPTIGVGEATFSTVRHFFARLGLAEHEWMPECHASYKLAIRFENWRAEGHHFYHPFERPRVVDGFPLADWWLHKRPSDRYDHDTSVLAALCDAQRSPRHVGGGLFEQDLEGVPGQDGGTDRAGATPDGRTTQFPYAYHFDAALLARFLTRYGTERGVRHVLDDVLDVRLDDTGAISGVLTKEHGELTADLYVDCTGFRGLLLNKALEEPFRSYQDSLPNDSAVALRVPVDVTRRGMRPCTTATAQDAGWIWTIPLYGRLGTGYVYASDYCTPEQAERTLREFVGPEAADLPANHIRMRIGRSERSWVKNCVAIGLSSGFVEPLESTGIFFIQNGVEQLVRHLPDGGDGEALRRAYNRQVAGVMDGVREFLVLHYYAAARDDTAYWRDTKTRPLPDALAARIEDWRHKLPDEDSVHPYFHGFEPYSYTAMILGLGGLPVRPRPVLARMDDTAALREFDRVRRQAAALIERLPSQADYLAWQRSCRNP

SEQ ID NO: 83656 - protein, 496 aa, unidentified
  source 1..496: note = Porticoccaceae bacterium
  REGION 1..496: note = tr|A0A2E1SRH1|A0A2E1SRH1_9GAMM Tryptophan halogenase; OS = Porticoccaceae bacterium OX=2026782 GN=CMK31_03115 PE=4; SV = 1
MSNQPVKKVVIVGGGTAGWMAAAAISKLIGKNIEVTLIESDAIGTVGVGEATIPTMITLHRLLKIDERDFMKSVQGTFKLGISFENWKNVNENYIHSFGFTGKDCWAAGFQHFWLKGKEQGISSDFGDYCNELQAAKQNKFAVIPQNGLNYAFHMDAGLYANYLRKIAEKNNCKRIEGMITEVVTDPQTGNISQVNLESGQTIEGDLFIDCSGFMGLLIDKALHTGYDDWSHYLPCDSAVAVQTQSVAEPIPYTRSIAREAGWQWRIPLQHRVGNGLVFCSKYLTDEQATQTLLNNIEGEPLTKPRIIKFRTGQRHQHWNKNCVALGLAAGVLEPLESTSIHLIQRGIIRLLQLFPTQGISQTDVDEFNAQMKEEFLNVRDFIVLHYHVTEREDTPFWRHCKSMKIPETLAHRVELFKQSGRIFQKDNDVFAENSWSQVMLGQGILPEQYHPIVNMMSDEELVRFLNGIKGSVNNVVDQLPTHQQFIDSYCKAPSM

SEQ ID NO: 83657 - protein, 496 aa, unidentified
  source 1..496: note = Cellvibrionales bacterium
  REGION 1..496: note = tr|A0A1Z8YMF4|A0A1Z8YMF4_9GAMM Tryptophan halogenase; OS = Cellvibrionales bacterium TMED79 OX=1986768; GN = CBC39_09705 PE=4 SV=1
MKQRTVNNVVIAGGGTAGWMAAAALSRLVGRKINVTLVESEEIGTVGVGEATIPTILTINRLLQIPEPDFIKLTSGTFKLGIRFENWRKQGEDYIHSFGDTGKGSWAAGFHHFWLRAKEMGLAEEYGEYCTELKAAEAERFAITSQNKLNYAYHLDATKYGMYLRKLAESSGATRIEGKIKRVETSSEDGFIEALHLEDGQRIEGDLFVDCTGFRALLSEGALATGFDDWSHWLPANRAWAVQSELNEHPKPYTRAIAHKVGWQWRIPLQHRAGNGLVYSNEFMDDDTARERLLSNVPDKPLTEPRPIKFVTGQRKQYWNKNCIAIGLSSGFIEPLESTSIHFIQNGIMWLLLMFPDACIEPSTVNEYNRTMRSEAEHIRDFIVLHYTLNQRHGDPFWDYCRNMDLPDSLKHRMELFERSARVFKPQDDVFAENSWVQVMMGQGMEPQGYHNIAQAMSESQMTAFLKGIQHEVAQTVAKLPEHGAFVKTLVQHAKL

SEQ ID NO: 83658 - protein, 500 aa, unidentified
  source 1..500: note = Arsukibacterium sp.
  REGION 1..500: note = tr|A0A0M2VCM2|A0A0M2VCM2_9GAMM Tryptophan halogenase; OS = Arsukibacterium sp. MJ3 OX=1632859 GN=VT06_12405 PE=4; SV = 1
MNNVVKNAVKKVVVLGGGTAGWMAAALLKKVLAGAVEITLVESEDIGTVGVGEATIPPIRLFNNVMGINEAEFLRETKATIKLAIKFDNWRVPGEGYFHTFGAPGKSLAFCHFHHLWLRARQQGDTTSLWQYDLNYLCATTGKFAPINAKDSILELPYAYHFDAGLYARYLRKLSEQMGVLRHEGKVQQVFQHPNGDIKCLVLENGHELAGDLFIDCSGFRGLLIQEQLNAGYDDWGHFLPCDRAVAVPSERFEKTVPYTRSIAHSAGWQWRIPLQHRNGNGLVYSSAHYSDEQASDLLLANLERKALADPKFIRFRTGRRRQQWQRNVVAVGLASGFLEPLESTSIHLIQSAVVRLIQLFPHNGICQSAIKEYNQQSQLEYEQIRDFLILHYHANQRSDSPFWRDMQQMAIPDSLRQKMAIFADNGQLFREQNDLFLESSWLQVMLGQGIEPKDYHPIANNFSAEKLREMLANIQAIKQEPLAKLPDHDTYIQTMINRG

SEQ ID NO: 83659 - protein, 520 aa, unidentified
  source 1..520: note = Porticoccaceae bacterium
  REGION 1..520: note = tr|A0A2E6G9N1|A0A2E6G9N1_9GAMM Tryptophan halogenase; OS = Porticoccaceae bacterium OX=2026782 GN=CMK42_05070 PE=4; SV = 1
MQRQVNNIVILGGGTAGWLTASIIAAKHKITPTNSAFNVTLIESPDVNSIGVGEGTWPSMRVSLRRIGIRETDFFRKCNASFKQGTQFFDWTCKDKRSYIHPFTLPNNYAETNLVESWQKLSHEVTFAEAVCPQSEVFDKHLAPKQISTPEYVGQLNYGYHLDAGKFAELLRKHATETLGVCHLIDHVITVNNNEVGDIKSLTTTSREIEGELFVDCSGMQSILLGEHFKIPITKKHKYLFNDSALAAQVPYEDQNYKIESCTLSTAQKAGWIWDIGLQSRRGIGYVYSSAHTTDEAAHDALLAYINGSSKPNNPSPISPRKITFEPGHRTAFWHRNCVAVGMAAGFIEPLEASALVLVELAASTITDQLPYDRAHMEIVAKRFNKDFSRRWDSIVDFLKLHYVLTDRQDSAYWRDNKDAETIPESLADSLAHWKYHPPWHHDNIYASEMFPSASYQYVLYGMGFKTHLEQSRESFKLNSWDIAKQCFENNLKQSKQLCATLPTNRELINKINTYGFQAV

SEQ ID NO: 83660 - protein, 526 aa, unidentified
  source 1..526: note = Porticoccaceae bacterium
  REGION 1..526: note = tr|A0A2E0EVK4|A0A2E0EVK4_9GAMM Tryptophan halogenase; OS = Porticoccaceae bacterium OX=2026782 GN=CMK34_05590 PE=4; SV = 1
  VARIANT 196: note = Xaa can be any naturally occurring amino acid
  VARIANT 216: note = Xaa can be any naturally occurring amino acid
  VARIANT 221: note = Xaa can be any naturally occurring amino acid
  VARIANT 240: note = Xaa can be any naturally occurring amino acid
  VARIANT 244: note = Xaa can be any naturally occurring amino acid
  VARIANT 260: note = Xaa can be any naturally occurring amino acid
  VARIANT 313..314: note = Xaa can be any naturally occurring amino acid
  VARIANT 318: note = Xaa can be any naturally occurring amino acid
  VARIANT 325: note = Xaa can be any naturally occurring amino acid
  VARIANT 344: note = Xaa can be any naturally occurring amino acid
  VARIANT 347: note = Xaa can be any naturally occurring amino acid
  VARIANT 370: note = Xaa can be any naturally occurring amino acid
  VARIANT 381: note = Xaa can be any naturally occurring amino acid
  VARIANT 444: note = Xaa can be any naturally occurring amino acid
  VARIANT 447: note = Xaa can be any naturally occurring amino acid
  VARIANT 476: note = Xaa can be any naturally occurring amino acid
  VARIANT 520: note = Xaa can be any naturally occurring amino acid
MTQTKNINRIVILGGGSAGWLTAGVVAAEHCAGGDSAGLTDTTITLVESSTISTIGVGEGTWPSMRSTLQKIGISETDLITKCDASFKQGTLFHGWKTGKGDSYTHPFTVPYGYNDTNLADQWRRFRHQIPFAEAVSSQNSLMFSDLAPKQITTPEYAFNTNYGYHLDAAKFAELLKMHCVENLNVNHVVADVVGXNSNSTGDISSLIIDAGEDVXGDLFXDCSGSRALLLGEFYEVPFXSKKXFLFNDSALASQVPYSXSEDPIASSTISSAQTEGWVWDIGLPTRRGIGHVFSSAHSDEDQVGESLLKYIXXTVSXEAASKTXIRKISFSPGHRAKFWHRNXVAXGMSAGFIEPLEASALVLVELSAXMIAEELPANRXVMDIVAKRFNDKFLYRWDRIIDFLKMHYVLSERKDSDYWRDSVSSESIPDSLAEKMELWRWQXPWXRDTMHVDEMFPSASFQYILYGMDFKTRAXTANRRSDFDAQNSAERLFQENAQRTKKLVAAMPTNRELINKIHXYGLQKI

SEQ ID NO: 83661 - protein, 498 aa, unidentified
  source 1..498: note = Porticoccaceae bacterium
  REGION 1..498: note = tr|A0A2D8GMG2|A0A2D8GMG2_9GAMM Tryptophan halogenase; OS = Porticoccaceae bacterium OX=2026782 GN=CMK27_06085 PE=4; SV = 1
MKANKKSINQIVIVGGGTAGWMTAASISALIGKGLSVTLIESDQIGTVGVGEATIPTFFALHQLLKIDESEFLSAVQGTIKLGISFENWHTLGESYIHAFGHTGKSCWAAGFHHFWLKGKENGFSEDYGCYSPELTAAKSEKFGFLKQNPLNYAYHLNAGLYAKFLRKIAEQNGVIRKEGKIVQVSKTDDENISNVALESGEIIGGDLFVDCSGFAGLLIDKALETPYTDWSNWLPCDRAVALQTQSTGAPVPYTRSIAHQSGWQWRIPLQSRVGNGLVYSSKYMEDKEALDLLMANVDGEIISKPNFIKFKTGQRVQHWSKNCVAIGLSAGFLEPLESTSIHLIQRAIIRLMQMFPSSGFTDSDRDEFNKQMSDEYEYIRDFIIMHYHVTKRDDSAFWRYCRTMDIPATLQHKLDLFLEAGRVFHGEGDVFAENSWTQVMLGQGLTPEQYHPIVNMMSNKELESFLANLKAMVDHSVGQLPSHDVFLSKYCPAPNIA

SEQ ID NO: 83662 - protein, 522 aa, unidentified
  source 1..522: note = Porticoccaceae bacterium
  REGION 1..522: note = tr|A0A2D8GMU1|A0A2D8GMU1_9GAMM Tryptophan halogenase; OS = Porticoccaceae bacterium OX=2026782 GN=CMK27_06070 PE=4; SV = 1
  VARIANT 83..84: note = Xaa can be any naturally occurring amino acid
  VARIANT 301: note = Xaa can be any naturally occurring amino acid
  VARIANT 502: note = Xaa can be any naturally occurring amino acid
MNDPQITDLVIVGGGSAGWLTAGIIAAEHLKTEQSSSRVKVTLVEAPNINTIGVGEGTWPSMRSTLKRIGISETDFIRDCDVXXKQGTLFSGWTDGKDIYTHPFTVPHAYSQHNLSRDWQNKFSDLPFAEAVCPQSKLMLKNQAPKKISTPEYSFNVNYGYHLDAGKFAEKLRSHCTLELGVVHKKAEVIQVNSAENGDIRSLRLDTGESLTGDLFIDCSGSRCLLLGEHYGIPFKSIRDILFNDSAIASQVPYLSAGDSIASSTISTAQKHGWIWDIGLPSRRGIGHVYSSRYTDADNAXVTLFKHIEKLVGSKIAKKVKMRRISFSPGHRQKFWHHNCVAIGMAAGFIEPLEASALVLVELSASMIAEQLPQNRKVMDIVSKRFNEKFLYRWDTIIDFLKLHYVLTKREDSDYWRDNANKNSIPESLSEKVELWRWQGPYHKDTMHVDEMFPSASYQYILYGMGFKTNIGLSTKQSEVQTSKVAQELFDENLKYTNLLIXSMPSNRDFIEKVHQHGLQKI

SEQ ID NO: 83663 - protein, 525 aa, unidentified
  source 1..525: note = Porticoccaceae bacterium
  REGION 1..525: note = tr|A0A2D6ZDZ4|A0A2D6ZDZ4_9GAMM Uncharacterized protein OS=Porticoccaceae bacterium OX=2026782; GN = CMK29_06030 PE=4 SV=1
MKKIKNIVIVGGGTAGWTAACYLRDTTPPYIKITVIASEEIPIIGVGESTTGLFNHFLKQVGIPEGVFMKETGATHKIGIQHRDWYKKGEHFNSPIGEFLNTPNSYPSDDYDAMKMYAVAENLKNSSLQGFCMKHNKLPFVRADHPANNPYKKLMGYGGYKDLRKNNTALHLDTYKTGKFLKKFVLSKHNIEYIDDEVLGYEKNEDETIKSVWCKKRGHDKPISGDLFVDCSGFKRILLKSYNNYFKRYDDQLLNNRALAFHLPYTDKTIIRNYTHAWAQKYGWLWMIPLQERYGAGYCFNDSFTTADEAKLEIEKVLKTKIEVQKDIKFHSGRFTKLWIKNVISTGLSSAFIEPLEATSIHATLFQLKHWIQYYFTETTDFNNEALQTSYNDDMTNMWDAIKDFIVYHYITPRNDTEYWKEASSHKRWSPQLMEKLAMWQTRTPRLVDFARGNRNDFYHIDDNLWLNISQGMNILDRDMVKRELKEYNLYESSKHQTKHALEFFNYAQKNCVKTNDYYKHYVGQ

SEQ ID NO: 83664 - protein, 527 aa, unidentified
  source 1..527: note = Porticoccaceae bacterium
  REGION 1..527: note = tr|A0A2D5R6U5|A0A2D5R6U5_9GAMM Tryptophan halogenase; OS = Porticoccaceae bacterium OX=2026782 GN=CMK24_05525 PE=4; SV = 1
  VARIANT 309: note = Xaa can be any naturally occurring amino acid
  VARIANT 314: note = Xaa can be any naturally occurring amino acid
  VARIANT 319: note = Xaa can be any naturally occurring amino acid
  VARIANT 344: note = Xaa can be any naturally occurring amino acid
  VARIANT 386: note = Xaa can be any naturally occurring amino acid
  VARIANT 393: note = Xaa can be any naturally occurring amino acid
  VARIANT 395: note = Xaa can be any naturally occurring amino acid
  VARIANT 407: note = Xaa can be any naturally occurring amino acid
  VARIANT 506: note = Xaa can be any naturally occurring amino acid
  VARIANT 514: note = Xaa can be any naturally occurring amino acid
  VARIANT 517: note = Xaa can be any naturally occurring amino acid
  VARIANT 519: note = Xaa can be any naturally occurring amino acid
  VARIANT 524: note = Xaa can be any naturally occurring amino acid
MAPSENLKSIVIVGGGTAGWLTAGIIAAEHCANGSESDGLIDIKVTLVESPDISTIGVGEGTWPSMRSTLQKMGISETDLIRDCDASFKQGTLFKSWKTGGNDAYTHPFTPPHSYASTNLAPQWQKFSNEVSFAEAVSSQNALMFKDLAPKQISTPEYAFHTNYGYHLDAGKFAELLRKHCVGKLGVTHLKANVVSVKSTADGDIASLKTDSHGDISGDLFVDCSGSRALLLGEHFGVPFCSKGQFLFNDTALASQIPYVNADDPIASSTLSTAQTAGWIWDIGLPTRRGIGHVYSSGHTTEDRAAQEXLAYIXATVSXEAAASASIRKVPFSPGHRAKFWHKXCVAVGMSAGFIEPLEASALVLVELSAAMIAEQLPANRQIMDXVAKRFNXKXLYRWDRIIDFLXLHYILSQRQDSDYWKDNISSSSVPDNLSELVKLWRWQAPWHRDTGHIDEMFPSASYQYVLYGMGFVTQDSTTARRSDREAHSVAEGLFRENAERTKKLXASMPTNRXLIXKXTNYGXQKI

SEQ ID NO: 83665 - protein, 513 aa, unidentified
  source 1..513: note = Porticoccaceae bacterium
  REGION 1..513: note = tr|A0A351Q5T6|A0A351Q5T6_9GAMM Tryptophan halogenase; OS = Porticoccaceae bacterium OX=2026782 GN=DCW94_05620 PE=4; SV = 1
MTKTVVIVGGGSAGWLTAGIIAARHNPQNDAGQGTKVILLESPDVANLGVGEGTWPTMRDTLRQIGISEVDFLRSCDVGFKQGSQFINWQRGEGESYYHPFVPPAGYGSVNLAAHWLDRSTDSTFADAVSPQGKVCDLGLAPKTAQTPEYAFGLNYGYHLNAGKFVELLKRHCVDKLGVDYQLGHVDQVLSAENGDITALSLTKGENISGDLFVDCTGFSALLIGKHYQVPFVSQRDCLFNDTALAVQADHAGEDTPIASCTKSTAQSSGWIWDIALPTRRGIGHVFSSQHVSLETAEDELQRYLAADPALAKKQHSPRKITFQPGHRARFWHKNCVAVGVSAGFVEPLEASALVLIEKSAEFISNNLPQDRAAMKVVAKRFNDIIGKYWVDIIDFLKLHYVLTERTDSEYWRDHVRAESIPDSLQDALELWRAQVPWVSDSNNRAELFSAASVQYVLYGMGFATQINSSRLRGWDKDAVLADRLMRDNLGKTEIFMASQPTNRDLLNLVRRG

SEQ ID NO: 83666 - protein, 527 aa, unidentified
  source 1..527: note = Porticoccaceae bacterium
  REGION 1..527: note = tr|A0A351NZ12|A0A351NZ12_9GAMM Tryptophan halogenase; OS = Porticoccaceae bacterium OX=2026782 GN=DCX08_11415 PE=4; SV = 1
MSTSQTIRSVVIVGGGTAGWLTAAIVAAEHRGNSDQRKDTESLISVTLIESPEISTIGVGEGTWPSMRTTLKKIGISETELFRECDASFKQGTLFRRWRNGKDDIYTHPFTVPHGYENTNLAPHWQLFREKVDFAQAVSSQNSLMLAGLAPKQIVTPEYGFHVNYGYHLDAVKFAKLLQKHCVEKLGVIHHSAKVVQVNSDSDNYIVSLDTDVDTTVSGDLFVDASGSRSLLLGKHYGIAFHSKKQFLFNDTGLASQVPYVNEDDPIASSTLSTAQKNGWIWDIGLPSRRGIGHVYSSSHTTEERATEELLNYIADTISPQTAAKTSVRKVNFEPGHRAEFWHKNCVAVGMSAGFIEPLEASALVLVELSAAMISEQLPENRHVMKIIAKRFNQKFLYRWERIIDFLKLHYILTQRNDSDYWKDNQMTDSIPFSIAEALDLWKWQSPWHQDTMRADEMFPSASYQYILYGMNFETKQCTERSSSRNGSLASKRLFLENIQRTEMLVSSMPTNRILIDKIKAYGLQKI

SEQ ID NO: 83667 - protein, 493 aa, unidentified
  source 1..493: note = Porticoccaceae bacterium
  REGION 1..493: note = tr|A0A2D5U938|A0A2D5U938_9GAMM Tryptophan halogenase; OS = Porticoccaceae bacterium OX=2026782 GN=CMK25_09405 PE=4; SV = 1
MVKVVIAGGGTAGWMAACGLSTRLANLLDITLLESDAIGTVGVGEATIPPMRNFHRIMGIDEQEFMRETQATFKLGIEFNNWGDIGDSYIHSFGEIGQRSWMAEFHEFWMEAQAQGFGGSLEDYCLELKAAKAGKFATHLDDTRLNFAFHLDATRYAKYLRQKSEKAGVRRVEGLIKEIQKDDQSGDITALLLDSGELIEGDLFIDCTGFRSLLLGDALGVELDDWSHWLFSDSAIAVQTMSTEEPVPYTRATAHASGWQWRIPLQSRVGNGIVYSSRFMSDDEAKQTLLNNITGELITEPRQLKYRTGSRQKSWQNNCVALGLSSGFIEPLESTSIHLVMTAIIRLIRLFPFGASKQALADRFNQETRTEIETVRDFVILHYKQTNRTDSEFWNAYRTMDIPDTLAHRLEIFKNNAYVWPDDVALFRVDSWVQVMMGQGLMPANYHSAGKLTPTQSLQQSMTKIKSSIEQTVQKLPTHQQFIDHYCPAPQED

SEQ ID NO: 83668 - protein, 510 aa, unidentified
  source 1..510: note = Porticoccaceae bacterium
  REGION 1..510: note = tr|A0A2D6ZDY8|A0A2D6ZDY8_9GAMM Uncharacterized protein OS=Porticoccaceae bacterium OX=2026782; GN = CMK29_06025 PE=4 SV=1
MLKQTITTNIMSVNKITVLGGGTAGLVSALVLKARFEKLNIEVVKSDNIGIIGVGEGSTEHWKDFMEFIGVPLKELLLETDATFKYGIMFEDWTKEPYFHNITNELHKVALGQYYAGYAYATINKLKPDEYTSGHCFNNEVLPNYIPSQFHFNTHKLNTFLLKKCKDFGIEVHTDDITDVETDNHGIKRIRGDKGWYESDFYIDCTGFKKYLISKLGAKWVSYKDYLPMNEAIAFPTPDTDEYTPYTLAKAMSSGWMWRIPTYGRWGNGYVFDNRYINAEQAQKECEDYLGFKVNVAKNIKFDAGALDRPWIGNCVAMGLCASFIEPLEASSIGTSIQQSFLLMHTLINYKQTDIDQYNTKVGHIVENIRDFVLLHYIVKRNDSKFWKELKVNLPDSLKHNLDKWSDRMPIKEDFKTDYVLFNAQNFAVLLKELELANIDSLKREYDMLVEHNKNVVKKEVDHHIKTFKTDPMNKQCPIMGHKQYLMKLRSGKETLNQQIDYLQNENSNT

SEQ ID NO: 83669 - protein, 538 aa, Burkholderia cepacia
  REGION 1..538: note = tr|A0A103ZZW5|A0A103ZZW5_BURCE Tryptophan halogenase; OS = Burkholderia cepacia OX=292 GN=WS90_36700 PE=4 SV=1
MSNPIKNIVIVGGGTAGWMAASYLIRALQQHTSITLVESAAIPRIGVGEATIPSLQKVFFDFLGIPEREWMPQVNGAFKAAIKFVNWRKSPERSRDDHFYHLFGTVPNCDGVPLTHYWLRKREQGFQQPMEYACYPQAGALDAKLAPCLSDGTRQMSHAWHFDAHLVADFLKRWAIERGVKQVIDEVEQVHLNERGYIASLSTKEGRTLEADLFIDCSGMRGLLINQALKEPFIDMSDYLLCDSAVASAVPNADARVGVEPYTSAIAMNSGWTWKIPMLGRFGSGYVFSSKFTSRDQATADFLNLWGLSDKQPLNQIKFRVGRNGRAWVNNCVAIGLSSCFLEPLESTGIYFIYAALYQLVKHFPDTSFDPRLADAFNAEIVHMFDDCRDFVQAHYFTSSRDDTPFWLANRHDLRLSDAIKEKVQRYKAGLPLTTTSFDDSTYYETFDYEFRNFWLNGNYYCIFAGLGLLPDRSLPLLQHRPESIDKAEAMFARIRREAERLRTSLPTNYDYLRSLRDGGAGLSRSQPGPTLAAPEIL

SEQ ID NO: 83670 - protein, 538 aa, Burkholderia cepacia
  REGION 1..538: note = tr|A0A5E9QA06|A0A5E9QA06_BURCE Tryptophan 7-halogenase OS=Burkholderia cepacia OX=292 GN=E3D37_27770; PE = 4 SV=1
MSNPIKNIVIVGGGTAGWMAASYLVRALQQHTSITLVESAAIPRIGVGEATIPSLQKVFFDFLGIPEREWMPQVNGAFKAAIKFVNWRKSPERSRDDHFYHLFGTVPNCDGVPLTHYWMRKREQGFQQPMEYACYPQPGALDAKLAPCLSDGTRQMSHAWHFDAHLVADFLKRWAIERGVKQVIDEVEQVHLNERGYIASLSTKEGRTLEADLFIDCSGMRGLLINQALKEPFIDMSDYLLCDSAVASAVPNADARVGVEPYTSAIAMNSGWTWKIPMLGRFGSGYVFSSKFTSRDQATADFLNLWGLSDKQPLNQIKFRVGRNGRAWVNNCVAIGLSSCFLEPLESTGIYFIYAALYQLVKHFPDTSFDPRLADAFNAEIVHMFDDCRDFVQAHYFTSSRDDTPFWLANRHDLRLSDAIKEKVQRYKAGLPLTTTSFDDSTYYETFDYEFRNFWLNGNYYCIFAGLGLLPDRSLPLLQHRPESIDKAEAMFARIRREAERLRTSLPTNYDYLRSLRDGGAGLSRSQPGSTLAAPEIL

SEQ ID NO: 83671 - protein, 511 aa, unidentified
  source 1..511: note = Caulobacter rhizosphaerae
  REGION 1..511: note = tr|A0A561NPL7|A0A561NPL7_9CAUL Tryptophan halogenase; OS = Caulobacter rhizosphaerae OX=2010972 GN=FHW61_103216; PE = 4 SV=1
MTPPPLGAPIRKVLVLGGGTAGWMTAAALSKVLGGQVEVTLIESEQIGTVGVGEATIPPILTFNAMLGIDERAFMRATRATFKLGIEFRDWTRPGDRYMHPFGSFGLDIEAIKFHQVWRKVRDQVGPLEDFNLAAVAARRNRFALPDPDPAKVLSSLKYAFHFDAGLYARFLRGFAEARGATRIEGKVADVTLRGEDGFIQSVTLEDGRILEADLFIDCSGFRALLIGEALGGRYVDWSHWLPNDRAVAIPCDTGGDGLTPYTRATADKAGWRWRIPLQHRTGNGYVYSSAHLGDDEALAALTAGLDGPARADPNFLGFQAGRRDRAWIKNCVAIGLSSGFLEPLESTSIHLIQAGITKLLALFPDKSFDPLEIDEYNRLTAQQVELVRDFIILHFKATERSDTPYWNHVRTMEIPESLQRKIDLFAGRGRLFSSDYDLFAEPSWIAVLMGQGIVPRQYDALVDSLPEAALVQRLQRMSALIGQTAQAMPDHAAFIARYCAAEAVAAQSPA

SEQ ID NO: 83672 - protein, 513 aa, unidentified
  source 1..513: note = Porticoccaceae bacterium
  REGION 1..513: note = tr|A0A2D5U928|A0A2D5U928_9GAMM Tryptophan halogenase; OS = Porticoccaceae bacterium OX=2026782 GN=CMK25_09400 PE=4; SV = 1
MTKTVVIVGGGSAGWLTAGIIAARHNPLSDDGQGIKVILLESPDVANLGVGEGTWPTMRDTLRQIGLSEVDFLRSCDVSFKQGSQFINWQRGEGESYYHPFIAPGGYGSVNLAAHWLHRGTNSTFADVVCPQGKVCDLGLAPKTPQTPEYAFSLNYGYHLNAGKFVELLQRHCVEKLGVEYQLGHVDQVLSAENGDIAALSLTDGKKIHADLFVDCTGFAALLIGKHYNVPFVSQRDCLFNDTALAVQTNHASEDTPIASCTKSTAQSSGWVWDIALPTRRGIGHVFSSQHVSIGKAEDELQRYLDADPALAKDQPSPRKITFQPGHRESFWHKNCVAVGVSAGFVEPLEASALVLIEKSAEFISNNLPQDRSAMTVVAKRFNDIIGRYWIDIIDFLKLHYVLSERTDSEYWREHRESQTMPDSLRDSLDLWRSHVPWVSDSNNRVELFSAASIQYVLYGMGFVTDINSSRYRSWNKDAALADRLMQDNLGKTEALMASQPTNRDLLNLVRGG

SEQ ID NO: 83673 - protein, 515 aa, unidentified
  source 1..515: note = Rhizobiales bacterium
  REGION 1..515: note = tr|A0A4V1T8H0|A0A4V1T8H0_9RHIZ Tryptophan 7-halogenase OS=Rhizobiales bacterium OX=1909294; GN = EOP24_00420 PE=4 SV=1
MAEQPHFVIVGGGTAGWIAAFIIQDSIKRLKLDAKLSVVESSKIPTVGVGEATTAAFHVFLTHFGIDIFEFFRKTEATYKLGIRHEDWRRKGFTYYGPIDDPHAVVRPPPGAPSDYLNVYAVSVNEPVQDMHLFGPLLKQKKAPWAKKADGSLIPLGPFLPAYHFDQSLVGKFLKEKSQGVGVVDNVLTGVERHGETGDVTALVFEDGQKLEGDFFIDATGFRKRLIVGEMQAPWISYQHELPVNRALPFWLPVEPGEEIANYTRAWAQEAGWMWQIPTQYRYGCGYVYSDEFRTPDEAHAEVERVLGRKIEVRGDIQFKIGRLEKAWINNVVAVGLSSSFLEPLESTSIHGTIVQMMMFAGQYLRDPAQMGQPLRDDYNRRVGRQVDDFRTFVNTHYMTERDDTPFWREVRAHRIHPETRQRLERWKTEMPRREHFADYLFGLPHVETQLHYPVLDGLGLLDPAVAKAEMARDPKLRKFARETHAGLVKEYKQAASKALGHAEFLELVRGMDGA

SEQ ID NO: 83674 - protein, 511 aa, unidentified
  source 1..511: note = Caulobacter rhizosphaerae
  REGION 1..511: note = tr|A0A561MSL4|A0A561MSL4_9CAUL Tryptophan halogenase; OS = Caulobacter rhizosphaerae OX=2010972 GN=FHW61_11869; PE = 4 SV=1
MQDSARDRRIRDIVIVGGGTAGWMAAASLRRHFGAAPVTITLIESSEIGTIGVGEATIPTIRRFYQALGLSDIDVLRATGGTCKLGIRFNDWSGPGSSFIHPFGLYGQDLKGVAFHHYWMCLRALGEAAPIGDYSLGANLAAAGKFTTPSRNPPSTLSVFDWALHFDAGLFARLMRQVAEQNGVRRIDAKIVKVNLRGEDGFIESVSLDTGATVAGDLFIDCSGFRGLLIEEALHTGYEDWSQWLLCDSALAVQSEGQGSPPPYTDVTAHEAGWRWRIPLQHRWGNGYVYSSRHTTDEAARAVLTASLDERLLHEPRKIGFHPGRRLKAWNKNCIALGLASGFLEPLESTSIALIETGIEKIKALFPSRDFDPVVIDEFNAMSRLEMERVRDFIILHYKLNQRPDTTGFWTHCREMTVPETLQKKIDLWRAQGHFVRYRWEMFSPPSWLAIYAGLGLLPETYDLSVDGFDAGQLSAALGEMRKAVADTVAAARPHGDFIEQYARPRPVAAE

SEQ ID NO: 83675 - protein, 458 aa, Sphingomonas sp.
  REGION 1..458: note = tr|A0A0Q4JL69|A0A0Q4JL69_9SPHN Tryptophan halogenase (Fragment) OS=Sphingomonas sp. Leaf29 OX=1736212; GN = ASE81_17300 PE=4 SV=1
MAYQGTIGSKGKPTMPHEPVRSIVIVGGGTAGWMAATYLARRLTHLNLSITVVDSAAIGTVGVGEATVPAIRDFLSAIELGEPDVLRETGGTIKYGIRFDGWGGDDHRFFHPFGLYGVGAGGVAFHQYWLKLNAAGRAGPIGDYCLATQLARGGLFLPPADHPANDLGVFNFALHFDAAKFAALLRRLALANRVAHVDGRIEQVTTDPARGHVTHVTLDDGRQIAGDLWIDASGFRSLLLGEALGVPYVDWRHWLPCDRAVAIPCRAAPGDPVPYTVATARTAGWQWRIPLRHRIGNGSVYCSDFQSDGDAEDALLASIEGEPLAGPNRLRFVTGHRERFWSGNVVGLGLASGFLEPLESTSISLIQSGLERFVALFPDRDCDPRLAATYNRQSVLEFERLRDFLFLHYLANGRTEPFWQAIRAVEPPEPLQIKLDAWRSGGEFVRNEWDTFQDPSWL

SEQ ID NO: 83676 - protein, 511 aa, unidentified
  source 1..511: note = Caulobacter rhizosphaerae
  REGION 1..511: note = tr|A0A561NPL5|A0A561NPL5_9CAUL Tryptophan halogenase; OS = Caulobacter rhizosphaerae OX=2010972 GN=FHW61_103214; PE = 4 SV=1
MTDHAVRNILIVGGGTAGWMTAAALSAKLAGLPIAIRLVESAEIGTVGVGEATVPHIRHFNAALGLDEADFMRSTQATYKLGIEFRGWSKPGDSYIHPFGAYGAAIAGVGFHHHWLRARQGGDATPLEAYSLPVMAARQGRFAPPSPDPRALASTYAYAYQFDAGLYAAYLRAYAEARGVVRTEGKVADVALRGEDGFIAAVTMENGERIEADLFIDCSGFRGLLIEQALKAGYEDWTRWLPCDRAAAVPCETVEASTPYTRCTADAAGWRWRIPLQHRVGNGYVYSSQHIGDDAAAAALLAGLEGKAQADPRFLRFVAGHRRKQWSKNCVAVGLASGFLEPLESTSIHLIQVAVTTLLELFPDRGCDQADQDEYNRVMTLEFERIRDFLVLHYHANQRTGEPFWDDRRNLPIPDSLAYKMELFRDRGVVVKYKDGFFLEPSWLAVYLGQNIVPRIYDPVSDSVPDAVLAQRLTAIRGSIAETVRAMPTHDDWIARFCAAGSGTPAQTVTA

SEQ ID NO: 83677 - protein, 510 aa, Duganella sp.
  REGION 1..510: note = tr|A0A3D9KNY1|A0A3D9KNY1_9BURK Tryptophan halogenase; OS = Duganella sp. GV023 OX=2135490 GN=C7506_10273 PE=4 SV=1
MLQRIVIVGGGSAGWLTAGLLAAEHRAAHGGLHITLIESPDVPPIGVGEGTWPSMRDTLRRIGVSESDFFRECDAAFKQGSRFNRWTTGSDDDAYFHPFSLPQGHGEVNLPEQWLAQHPHIPFADLVSFQPHLCVAGRAPKQVVTPEYASVANYGYHLDAGKFGVFLRKHCLEKLGVHYVPDHVTAVNAHENGDIASLQTVQHGAVEGELFIDCTGMQSLLLGQHYGIPLISQKHVLYNDSALAVQIPYPTEDYPIASQTSSTAQSAGWIWDIGLPTRRGVGHVYASGYISDDQAEAELRAYIVQTGGPQDIPQPRKLSFNPGYRERFWHRNCVAIGLSAGFIEPLEASALAIVEMSAAMVSDDLPATREAMDIVASRFNEAFRYRWERVIDFLKLHYVLSQRRDWAYWRDNTAEVPQRLAELLTLWRHRAPSRSDFNRIEEVFPAASYQYILYGMGFRSDFSRAPKPHEAAQSDAYFQEAATLTKKMLHGLPDNRSLINHIKLHGLQKI

SEQ ID NO: 83678 - protein, 503 aa, Sphingopyxis alaskensis
  REGION 1..503: note = tr|Q1GUN6|Q1GUN6_SPHAL Tryptophan halogenase; OS = Sphingopyxis alaskensis (strain DSM 13593 / LMG 18877 / RB2256) OX=317655 GN=Sala_0918 PE=4 SV=1
MTGMDSSTARLKIVIAGGGTAGWMAAAALSGTLGAAIDLTLIESDAIGTIGVGESTIPPIVLFNRLMGINEAAFMRATQATFKLGIQFENWKHVGESYFHSFGTTGKDHWSAGFQHFWLHGLTCGHSRSYDDYCLELKAAHEGKFAHLPDDRMNYAYQLDSSLYAAFLRERAEGDGTRRIEGRIAAVELDGASGNIAALMLDGERRIEGDLFIDCTGFRALLIEGALHAGFDDWTHYLPCDSAIAVQTASVAPPVPYTRAIAHDAGWQWRIPLQHRQGNGIVYCSRYLAKDDALDRLLGSIEGDVLTEPNFIGYRTGARRKQWYRNCVAVGLSGGFMEPLESTSIHLIQRAVLRLIRMLPSGPVSERDIAEFNDQQFADMEQIRDFLILHYKVTERRDSPFWRQCAAMPIPASLEQKIELFRETGRVFRRNEELFVENSWVQVMMGQGIMPQRYHPIAAKLRPDELEAFLSMLRDGVERTVASLPAHGAYIARYCAVGGRNDA

SEQ ID NO: 83679 - protein, 539 aa, unidentified
  source 1..539: note = Porticoccaceae bacterium
  REGION 1..539: note = tr|A0A2D7RTP2|A0A2D7RTP2_9GAMM Tryptophan halogenase; OS = Porticoccaceae bacterium OX=2026782 GN=CMK28_03380 PE=4; SV = 1
MRKVVIVGGGSAGWMAAAYLNGALNKQGQDQKVKITLIESPNIPRISVGEATIPSMRHLLAVVGVDENDFMRATDATFKQSIKYVNWVSKNNSFYHHPFSRYTNYPLDNSGADWIKSDRSIPYMETVSAQPILCELGRSPLLLSNWDRETPLTYAYHMNAQKFADYLTSFSIARGVEHIQENLLNVNQRENGFISSVVTDGDSVINGDLFIDCTGFRAKLIGEAMEIGVEDCSEWLLCDRAVTMHIPYEENYPGTVRPYTTATALSNGWIWDIPMQSQRSIGYVHSSHFISEDEAESEMRAYQGHDSARLSSRQIKFSVERRQKLWEKNCIAIGLSGGFIEPLESTGLYLSDLGAVALAEHFPSEDRDIEAMSYRYNRVLSNRFYEILDFINMHYCLTKRTDTKFWRTIQRPEHVNDRLKAKLEYWRSKSPTAMDFEDQCFANLSTTSSNNLTFSHAPVDTAALWNHESYLCILLGMDFMATEFQQSENTFRPPPVVYDAVIDKLRKGHQQLPPHELWLQKNAGMSNYDFGTKPVGWVA

SEQ ID NO: 83680 - protein, 520 aa, unidentified
  source 1..520: note = Porticoccaceae bacterium
  REGION 1..520: note = tr|A0A2D6ZEH0|A0A2D6ZEH0_9GAMM Tryptophan halogenase; OS = Porticoccaceae bacterium OX=2026782 GN=CMK29_06880 PE=4; SV = 1
MQTEIRKIIILGGGTAGWLTASIIASEHMLDQESMVVNVTLIESPNVSTIGVGEGTWPSMRTTLKRIGVKETDFFRKCSASFKQGTQFFSWTNKHEQSYAHPFTLPNNFAKTNLVRPWQDLKTDIPFAEAVCPQLPIFARHLAPKQISTPEYAGHLNYGYHLDAGKFADLLRHHATEALGVVHISEHVISVNNKENGDIKSLTTSTNEITGDLFIDCSGMQSMLLGNHFGIPLLDKHQYLFNDSALAAQVSYEDENHPIESCTRSTAQKAGWIWDIGLQTRRGAGYVYSSSHTSDEKAYDELLEYIGETSTNINLDSISPKKITFQPGHRTVFWHRNCVAIGMSAGFIEPLEASALVLVELSASVIADQLPNDRNHMDIVAKRFNKNFRRRWDSIIDFLKLHYVLTDREDSIYWRENKDASTIPESLADSLAHWKFHPPWHEDNIYANEMFPAASYQYVLYGMGFNTQSLRSTKTAKQRWSGVASQCFENNNQQSRKLCSILPTNRELINKIYSQGMHTI

SEQ ID NO: 83681 - protein, 498 aa, unidentified
  source 1..498: note = Porticoccaceae bacterium
  REGION 1..498: note = tr|A0A2E8UG16|A0A2E8UG16_9GAMM Tryptophan halogenase; OS = Porticoccaceae bacterium OX=2026782 GN=CMK38_02235 PE=4; SV = 1
  VARIANT 341: note = Xaa can be any naturally occurring amino acid
  VARIANT 384: note = Xaa can be any naturally occurring amino acid
MKANKKSINQIVIVGGGTAGWMTAASISALIGKGLSVTLIESDQIGTVGVGEATIPTFFALHQLLKIDESEFLSAVQGTIKLGISFENWHTLGESYIHAFGHTGKSCWAAGFHHFWLKGKENGFSEDYGCYSPELTAAKSEKFGFLKQNPLNYAYHLNAGLYAKFLRKIAEQNGVIRKEGKIVQVSKTDDENISNVAIESGEIIGGDLFVDCSGFAGLLIDKALETPYTDWSNWLPCDRAVALQTQSTGAPVPYTRSIAHQSGWQWRIPLQSRVGNGLVYSSKYMEDKEALDVLMANVDGEIISKPNFIKFKTGQRVKHWSKNCVAIGLSAGFLEPLESTXIHLIQRAIIRLMQMFPSNGFTDSDRDEFNKQMSDEYEYIRDFXIMHYHVTERDDSAFWRYCRTMDIPATLQHKLDLFLEAGRVFHGEGDVFAENSWTQVMLGQGLTPEQYHPIVNMMSNKELESFLANLKAMVDHSVGQLPSHDVFLSKYCPAPNIA

SEQ ID NO: 83682 - protein, 500 aa, Streptomyces sp.
  REGION 1..500: note = tr|A0A0Q6YAH6|A0A0Q6YAH6_9ACTN Tryptophan halogenase; OS = Streptomyces sp. Root369 OX=1736523 GN=ASD08_03910 PE=4; SV = 1
MDPEYDLIVVGGGPAGSTAAAAVAMRGHRVLLLERETFPRYQIGESLLPATVHGLCGILGVAEEVAEAGFTLKRGGTLRWGRDPKPWQFSFSMTPRLPEPTATAFQVERSRFDEILLRNAARVGAEVREGSTVRRVVADDERVRGVEYTDGDGNARTVYGRYVIDASGNTSRVHSGVGGRRVYSDFFRNLAVFGYFAGGRRLPEPNRGNIFCAAFDAGWLWYIPLRDDLTSVGAVISPEHTAAVQRDPRAAWQDMIRACPEVAELLDGVPAATEPPYDQVRVRKDWSYWKTFFWTPGMALVGDAACFVDPVLSSGVHLATYGALLAARAVNSALDGSVPEERGFAEFEARYRREYGVFYEFLIAFYDMERNDASYFWSAKKVTKVDSTEVAAFAELAGGLVSGDSAVLRPDRLGDHWSAAAAELDGAVGRLATADDRVNPLLSTRVVGETFRTGNDLQEQALYGGPLDDTGPAGPGHLVASADGLGWDTARGTAAQPGGE

SEQ ID NO: 83683 - protein, 505 aa, unidentified
  source 1..505: note = Caulobacter rhizosphaerae
  REGION 1..505: note = tr|A0A561N2Q6|A0A561N2Q6_9CAUL Tryptophan halogenase; OS = Caulobacter rhizosphaerae OX=2010972 GN=FHW61_110118; PE = 4 SV=1
MDNRIRKIVIVGGGTAGWMAAAAFSKLLGKDFVETVLIESDQIATVGVGEATIPPIRYFNERLGLDEADFVRQTQATFKLGIDFQDWGTIGHRFFHGFGDFGADIQAIGAHHYWRRLQDQGERFSLEDLSMPTQAAYRNKFVPPNPDPRSVMHDYSYAFHFDASLYARYLRGYAQARGVTRIEGRIVDIQLRGTDGFIEAVVLEGGVRVEGDLFIDCSGFRGLLIEGALKTGYEDWSHWLPCDRAIAAGCGSGGDGLTPYTRTTARAAGWRWRIPLQHRTGNGYVHCSQFVSEDEAVSDLLSNLDGPLIGQPQTIRFTPGRRLKAWNRNCVAVGLASGFIEPLESTSINLIQTAVGRLLDFFPNKDFDPVLIDEFNRLSRQEMEHVRDFIILHYKLTDRTDSGLWDYCRAMAIPDALAHRLEVFQRAGRLVTHDDDGFAPPSWLAIFNGLKVVPQRYDPLVDRMGVEEIRALLAGRRAAILRAAEAMPDQRTFIDKVCRAEPPAA

SEQ ID NO: 83684 - protein, 525 aa, unidentified
  source 1..525: note = Porticoccaceae bacterium
  REGION 1..525: note = tr|A0A2E1SRI8|A0A2E1SRI8_9GAMM Tryptophan halogenase; OS = Porticoccaceae bacterium OX=2026782 GN=CMK31_03105 PE=4; SV = 1
  VARIANT 11: note = Xaa can be any naturally occurring amino acid
  VARIANT 22: note = Xaa can be any naturally occurring amino acid
  VARIANT 66: note = Xaa can be any naturally occurring amino acid
  VARIANT 81: note = Xaa can be any naturally occurring amino acid
  VARIANT 91: note = Xaa can be any naturally occurring amino acid
  VARIANT 99: note = Xaa can be any naturally occurring amino acid
  VARIANT 105: note = Xaa can be any naturally occurring amino acid
  VARIANT 109: note = Xaa can be any naturally occurring amino acid
  VARIANT 120: note = Xaa can be any naturally occurring amino acid
  VARIANT 136: note = Xaa can be any naturally occurring amino acid
  VARIANT 173: note = Xaa can be any naturally occurring amino acid
  VARIANT 175: note = Xaa can be any naturally occurring amino acid
  VARIANT 179..180: note = Xaa can be any naturally occurring amino acid
  VARIANT 184..185: note = Xaa can be any naturally occurring amino acid
  VARIANT 484: note = Xaa can be any naturally occurring amino acid
MKNTINRIVIXGGGTAGWLSAXIIAAEHYIDKNLSSGEHNFHLVLIESPDIPTIGVGEGTWPSMRXTLKKIGISETDFFRXCSASFKQGTXFHNWTYGXDDTYTXPFTXPHNFNETNLAXHWQQLREKINFANAVXPQSALFNNQLAPKNIATPEYAFHVNYGYHLDAGKFAXLXRQHXXDNLXXEYVSANMTAINSAENGDIASISTDTHGDITGDLFIDCSGSRALLLGEHYGIPLVSKSQYLFNNSALAAQVSYQNPEAPIQSATLSTAQTAGWIWDIGLPTRRGIGHIYSSDYTTEESARTELLNYIATTASEDAAANASIRKITFDPGHREKFWHKNCVAIGMSSGFIEPLEASALVLVELSAAMIAEQLPANRTIMDIVAKRFNDKFLYRWDRIVDFLKLHYVLTQRTDSKYWVDNCHPSSIPESLQELMEIWQYQPPWHQDTKHADEMFPSASFQYILYGMDFKTMLDPSLKRSDRXAGAKAMGLFTENAKRTEQLLSSMPSNRELINKIYKYGFQKI

SEQ ID NO: 83685 - protein, 506 aa, Xanthomonas hortorum
  REGION 1..506: note = tr|V7Z7P5|V7Z7P5_9XANT Tryptophan halogenase; OS = Xanthomonas hortorum pv. carotae str. M081 OX=863365; GN = XHC_4321 PE=4 SV=1
MIPAPLRNIVIVGGGTAGWMAAAAFARVLGPGFDVQLIESEQLGTVGVGEATVPHIKAFNNLLGIDEAEFVRQTQGSFKLGIEFVDWQRPGTSYIHGFGTQIGHPLGLLPFHQYWIKQHLRGKAQPLGAYTLNTVAAVRGKFMTSAGDVPANSPLANIAYAYHFDATQYARFLRGYAEQRGVTRIEGLVEQVQLHADTGHVQSLQLASGQVVSGDLFIDCSGFRGLLIEEALHTGYHDFTHWLPCDRALAVPSENVGPPNPYTRSTARAAGWQWRIPLQHRTGNGYVYSSAHISDDEAAATLLANLDGKALGDPRPLRFTTGRRKQFWNRNVVALGLASGFLEPLESTSIHLIQAGISRLLELFPREGISPVLVQRYNDRLAFEFDRIRDFLVLHYHATERDDSAFWRHCRTMPITPELQFTLDLFRDSGRFYRNAEEMFAEISWVQVMVGQGVLPQGYHPLVDQVPDHDAERFLASIAQTIGHCVDVMPTHQQFIDRYCKAAAPR

SEQ ID NO: 83686 - protein, 519 aa, unidentified
  source 1..519: note = Pleionea mediterranea
  REGION 1..519: note = tr|A0A316FZ11|A0A316FZ11_9GAMM Glycine/D-amino acid oxidase-like deaminating enzyme OS=Pleionea mediterranea; OX = 523701 GN=C8D97_111122 PE=4 SV=1
MTNSINRVLIVGGGTAGWLTAGILANQLNSNDPQAVQVTLVESPNIPILGVGEGTWPNLRATLQKLGVDETEFMRQCDATFKQGSEFINWMQPKEDKTHRYFHPLNAVYHAAYDINLAPYWLQGQAGDGVGYDQAVATQAAVCRAGLAPKKITTPAYEAIQNYAYHLNANKFASFLAEHCTSRLGVKHILANVTQVSVSETGWIESVSTDKDEVIHADFFIDCSGSKGLLIEQALQVSWHSISDCIFNDTAMAIQVPNESDNCPIATHTMATATDSGWIWDIGLQHRRGIGHVYSSHHCSDDMAETALRNYIGDKADELSVRKIKMKTGYRDTFWKNNCVAIGMSAAFIEPLEASAIFLTDAAATMLAEQFPRNIESVPLVCKKFNQTFQLRWEKTLDFIKLHYCISDRRDSRYWIDNCQQASIPESLQQKLAHWRYHPPSKYDFEYAFEPFVLDSYLFVLYGMNFPTDIRHNLSSYPDTESAKQHFSNIQTMGERLKRELPSQRELVSKVYQFGFQSL

SEQ ID NO: 83687 - protein, 503 aa, unidentified
  source 1..503: note = Caulobacter rhizosphaerae
  REGION 1..503: note = tr|A0A561NPK8|A0A561NPK8_9CAUL Tryptophan halogenase; OS = Caulobacter rhizosphaerae OX=2010972 GN=FHW61_103208; PE = 4 SV=1
MNRIERLVILGGGTAGWMTAVALAKAFGPRLTIELLESEAIGTVGVGEATIPTIHWFNELIGLDEAEFVRATKATFKLGIEFVDWARPGERYFHPFGRHGVDLDAVPFHQHWLKARSDGFDRPLSAFSLASRLAAANRFAKPVDDPRSILSTLGYAYHFDATLYAKYLRGLAEAAGVTRREGKLEAVERAPDTGFVTALTTDRGERIEGDLLVDCSGFRALLIDDVMQAGFEDWSHWLPCDRAVAAPCARIAETTPYTRSTLRPAGWQWRIPLQHRTGNGYVYSSAFLSDDEAAGTLLGGLDGEALDEPRFLRFKAGFRREAWRKNVVAIGLSSGFLEPLESTSIHLIQSGIVKLITLFPDRDCDPGLARQFNTLFGRDMDGIRDFLILHYHATQGHEAPLWRHTRHMALPDSLIDREAQYRRAGRLMLTSDDLFREASWLAVLEGQGVRAEGCSPLADTLDPAANRRQLEQIEAAIARAAPTLPKHDDAVAAMVGGAAPVRG

SEQ ID NO: 83688 - protein, 505 aa, Sphingomonas sp.; identical to SEQ ID NO: 83478
  REGION 1..505: note = tr|A0A0Q4J6K1|A0A0Q4J6K1_9SPHN Tryptophan halogenase; OS = Sphingomonas sp. Leaf29 OX=1736212 GN=ASE81_14820 PE=4; SV = 1

SEQ ID NO: 83689 - protein, 505 aa, Sphingomonas sp.
  REGION 1..505: note = tr|A0A0T0PYE7|A0A0T0PYE7_9SPHN Tryptophan halogenase; OS = Sphingomonas sp. Leaf412 OX=1736370 GN=ASG29_00895 PE=4; SV = 1
MQDLSAPRTIVIAGGGSAGWMTAAACAHLLPAHLYRVALIESDAIGTVGVGEATIPQIRNFNQALGLDEDAFLRATGGTFKLGIEFVGWGAPGERYLHAFGDVGRDSALHAFHHLWLRARAGGDVRPLGDYALNDLAARAARMQRGAARTARILPEMPYAFHFDAALYARMLRRFVEARGVMRHEGRIVRVERAGESGDVTALLLEGERRIAGDLFVDATGFRSLLLGETLGVGFEEWTRWLPCDRALAVPSARTGPLLPYTRATAHDAGWQWRIPLQHRTGNGVVYSSAHWSDDAAADHLLANLDGAAEADPRPIRFTTGKRARMWAHNVVALGLAAGFMEPLESTSLHLVQSTIARLLKLLPGAAAGDAVRDAFNAQADEEWTRIRDFLILHYHANARDGDFWRACRDAALPDTLAAKLALWREEAGVVRAGEELFTDVAWIQVLIGQGVIPRRWHPLADAPSQAEMAEYLDLIHQLSAREVAQMPDHAAFVAAHCAARAGAR

SEQ ID NO: 83690 - protein, 495 aa, unidentified
  source 1..495: note = Porticoccaceae bacterium
  REGION 1..495: note = tr|A0A2D5R6Y7|A0A2D5R6Y7_9GAMM Tryptophan halogenase; OS = Porticoccaceae bacterium OX=2026782 GN=CMK24_05535 PE=4; SV = 1
  VARIANT 122: note = Xaa can be any naturally occurring amino acid
  VARIANT 151: note = Xaa can be any naturally occurring amino acid
  VARIANT 160: note = Xaa can be any naturally occurring amino acid
  VARIANT 167: note = Xaa can be any naturally occurring amino acid
  VARIANT 244: note = Xaa can be any naturally occurring amino acid
  VARIANT 440: note = Xaa can be any naturally occurring amino acid
  VARIANT 447: note = Xaa can be any naturally occurring amino acid
  VARIANT 488: note = Xaa can be any naturally occurring amino acid
MAQQKIKKVVIVGGGTAGWMAAASLSKLIGRDLDISLIESDQIGTVGVGEATIPTFFALHQLLKINEAEFLSEVQGTIKLGISFENWKNKGEDYIHAFGYTGQSCWAAGFQHFWLKGKTLGXSEEYSCYSPELMAAKANKFGLLKQNALNXAYHIDASLXAKFLRRXAEKNNVTRIEGKIIAVNQADDGDIKSVQLESGLTIDGDLFIDCSGFAALLIDKTLGTEYEDWSHWLPCDRAVAVQTXSVSPPIPYTRSIARECGWQWRIPLQSRVGNGLVFSSEYMSEDEATSALLNNVEGETLTTPRVIKFRTGQRTVQWNKNCVALGLSGGFLEPLESTSIHLIQRGIIRLMQMFPLSGITEADRDEFNRQMSDEYNFIRDFIIMHYHVTERTDTEFWRHCKNMDIPDSLDHRLRLFKDSGRVFQGEGDVFGENSWTQVMXGQGLTPXQYHPIVNMMSDNELERFLKGNRASVDNTLKQLPTHQQFIAXYCPAKPI

SEQ ID NO: 83691 - protein, 505 aa, Xanthomonas hortorum
  REGION 1..505: note = tr|V7ZBV9|V7ZBV9_9XANT Tryptophan halogenase; OS = Xanthomonas hortorum pv. carotae str. M081 OX=863365; GN = XHC_3096 PE=4 SV=1
MTQAPIRKVVIVGGGTAGWIAACALSHQFRELLEITLVESEQIGTVGVGESTVPPIRTFHRFLQIDEQEFLRAVAGTFKLSISFEHWRRQGERYIHPFGITGQSTLVCAFHHLWLESQRRGMPGTFGDYCLETVASRVDRFALLREPAVNYAYHLDAALYAKFLRARSEAFGVKRIEGKVQQVTLQPDSGDVATLVLEDGQVLDGDLFIDCSGFRGLLIEQALHTGYEDWSHWLPCDRAVAVQTEAAGPPVPYTRAIAHEAGWRWHIPLQHRVGNGLVFSSRHLSDDEAYAKLLRDAAAPALKDPWLVPFRTGRRLKAWNKNVVSLGLASGFIEPLESTSIHLTIAAVVRLITLFPADGIAPSQVQLFNDISRAEMEHVRDFIILHYHATQRDEPLWRQCREMELPESLALRLRAWRERAHAWQGADELFRVDSWTHVLMGQGIIPAQHHPLARAVSDRDLHRLLDGIAQPIQRAVEQMPSQQAFIDAYCKAGASAWGLRSPVIA

SEQ ID NO: 83692 - protein, 501 aa, Duganella sp.
  REGION 1..501: note = tr|A0A3D9KQI6|A0A3D9KQI6_9BURK Tryptophan halogenase; OS = Duganella sp. GV023 OX=2135490 GN=C7506_102970 PE=4 SV=1
METIKKVVIVGGGTAGWMSAAALSRILGDKVQVTLIESEDIGTVGVGESTIPMIKLFNAVLGIDENEFVRETQATFKLAIEFRDWGRIGDSYMHGFGIFGQDLATLPFYQYWLRMHQQGKAPDLENYSINRMAANAGKFMRADRSHGNSPLGDIVSAFHFDAGLYARYLRRYAEQRGVRRIEGKVVDALTRASDGHVDAVRMENGDLIGGELFIDCSGFRGLLIEQALHTGFEDWSHWLPCDRAWAVPCELGGGLLPYTRATARPAGWQWRIGLQHRTGNGHVYASKFMGDDEARAQLMASLDGRPLAEPKLLRFTAGKRKQVWNKNVVAVGLSSGFLEPLESTSIHMIQSTIARLISFFPDKGFSQPDIAEFNRQCNFEIERIRDFIILHYHATERNDTPFWDYVRTMEIPDTLREKMDLWRTRGRIVRVDNELFAEVGWLQVLHGQRVPVAGHHPLADLMDEKEVADYLGDIASVISNCVDQMPSHAAFIAANCAARQL

SEQ ID NO: 83693 - protein, 521 aa, Acinetobacter lwoffii
  REGION 1..521: note = tr|A0A2K8UTE4|A0A2K8UTE4_ACILW Tryptophan 7-halogenase OS=Acinetobacter lwoffii OX=28090; GN = BVG18_16860 PE=4 SV=1
MDQSLIKNILIVGGGSAGWMTASYLSKAFGNKVNISLVESPEIPKIGVGEATIPNLQKVFFDFLGLKEEEWMPECNASFKAAIKFVNWNDPNDKNDYFYHMFGQVKNIDDIPLTHYWNYFRENNLTQLPMAYDCYDKARLLDKNLSPKTLTHEKVMSHAWHFDAHLVAKFLKKLSISWGVKHIEDEVINVSLNENGYVKSVTTNKNGEIEADLFIDCSGFKGLIINQALKEPFIGMSDQLFCNSAVAASIKHDDEENGIEPYTSAIAMKNGWTWKIPMLGRFGSGYVYSDEFSTREQATDEFLKLWNVKEDSISLNHIKFRTGRNKRAWVKNCVAIGLSSCFLEPLESTGLYFIYAAIYQLVKHFPKKEIDEKLVKAFNENIEKMFDDSRDFVQTHYFTTSRTDTAFWKANKNDLKLSDSLKSKLDIYKSGLVVCPPITTNEEDYYGDFDIEFSNFWTNSNYYCMFTGFKSYPNSVYPKILYDNKYDKAREYMQELKKREDNLLESLPSTYEYLKHLHSRK

SEQ ID NO: 83694 - protein, 538 aa, Burkholderia cepacia
  REGION 1..538: note = tr|A0A2X2PCP4|A0A2X2PCP4_BURCE Tryptophan halogenase; OS = Burkholderia cepacia OX=292 GN=NCTC10661_05117 PE=4 SV=1
MSNPIKNIVIVGGGTAGWMAASYLVRALQQHTSITLVESAAIPRIGVGEATIPSLQKVFFDFLGIPEREWMPQVNGAFKAAIKFVNWRKSPEHARDDHFYHLFGTVPNCDGVPLTHYWMRKREQGFQQPMEYACYPQPGALDAKLAPCLSDGTRQMSHAWHFDAHLVADFLKRWAIERGVKQVIDEVEQVHLNERGYIASLSTKEGRTLEADLFIDCSGMRGLLINQALKEPFIDMSDYLLCDSAVASAVPNADARVGVEPYTSAIAMNSGWTWKIPMLGRFGSGYVFSSKFTSRDQATADFLNLWGLSDKQPLNQIKFRVGRNGRAWVNNCVAIGLSSCFLEPLESTGIYFIYAALYQLVKHFPDTSFDPRLADAFNAEIVHMFDDCRDFVQAHYFTSSRDDTPFWLANRHDLRLSDAIKEKVQRYKAGLPLTTTSFDDSTYYETFDYEFRNFWLNGNYYCIFAGLGLLPDRSLPLLQHRPESIDKAEAMFARIRREAERLRTSLPTNYDYLRSLRDGGAGLSRSQPGPTLAAPEIL

SEQ ID NO: 83695 - protein, 538 aa, Burkholderia cepacia
  REGION 1..538: note = tr|A0A1B4PKT9|A0A1B4PKT9_BURCE Tryptophan halogenase; OS = Burkholderia cepacia OX=292 GN=WT26_00265 PE=4 SV=1
MSNPIKNIVIVGGGTAGWMAASYLVRALQQHTSITLVESAAIPRIGVGEATIPSLQKVFFDFLGIPEREWMPQVNGAFKAAIKFVNWRKSPERSRDDHFYHLFGTVPNCDGVPLTHYWLRKREQGFQQPMEYACYPQPGALDAKLAPCLSDGTRQMSHAWHFDAHLVADFLKRWAIERGVKQVIDEVEQVHLNERGYIASLSTKEGRTLEADLFIDCSGMRGLLINQALKEPFIDMSDYLLCDSAVASAVPNDDARVGVEPYTSAIAMNSGWTWKIPMLGRFGSGYVFSSKFTSRDQATADFLDLWGLSDKQPLNQIKFRVGRNGRAWVNNCVAIGLSSCFLEPLESTGIYFIYAALYQLVKHFPDTAFDPRLADAFNAEIVHMFDDCRDFVQAHYFTASRDDTPFWLANRHDLRLSDAIKEKVQRYKAGLPLTTTSFDDSTYYETFDYEFRNFWLNGNYYCIFAGLGLLPDRSLPLLRHRPESIDKAEAMFARIRREAERLRTSLPTNYDYLRSLRDGVAGLSRSRPGSTLAAPEVL

SEQ ID NO: 83696 - protein, 521 aa, Xanthomonas hortorum
  REGION 1..521: note = tr|V7Z8B5|V7Z8B5_9XANT Tryptophan halogenase; OS = Xanthomonas hortorum pv. carotae str. M081 OX=863365; GN = XHC_4137 PE=4 SV=1
MSDTHASDPRQRPVRRVVIAGGGTAGWMAAAALSKVLGKQLQITVVESDEIGTVGVGEATIPSLVTFHRLLEIDEAAFMAATQATIKLGIGFEHWRDVDRHYIHSFGHTGTDHWSAGFQHFWLKGRQRGVARDFGDYCLELRAAQEGRFAHLPNGGMNYAYHLDAGLYARFLRRFSEGFGVQRIEGRIGHVETDAHSGYLTALTLKNGTRVEGDLFLDCTGFAGLLIGKTLGVGADDWSHWLFADSALAVQTESVGAPVPYTRSRADLAGWMWRIPLQHRVGNGIVYSSRYMDQDSAAQVLQRNLTGRALTEPRALRFTPNQRHRVWEKNCVALGLASGFLEPLESTNIHLIQRGIIRLMQTFPQVINDSDIAEYNRQAAEEITHIRDFVILHYHVTDRRDTPFWRDCAAMEIPDTLRHRVELFRQSGRVFHQANELFAENSWVQVMLGQGITPKQHHPVADLMGDAELNHFLENIRTRVDAALVRLPAHADFLRRYCPAPPLPEPATRLPATPVLATPAA

SEQ ID NO: 83697 - protein, 506 aa, Sphingomonas sp.; identical to SEQ ID NO: 83479
  REGION 1..506: note = tr|A0A0Q4JVA3|A0A0Q4JVA3_9SPHN Tryptophan halogenase; OS = Sphingomonas sp. Leaf29 OX=1736212 GN=ASE81_01295 PE=4; SV = 1

SEQ ID NO: 83698 - protein, 519 aa, Colwellia sp.
  REGION 1..519: note = tr|A0A0S2JHN8|A0A0S2JHN8_9GAMM Tryptophan halogenase; OS = Colwellia sp. MT41 OX=58049 GN=CMT41_12895 PE=4 SV=1
MSKVIKNIVIVGGGTAGWLTAGVIAAEHNSKSASGLQVTLIESPEVNTVGVGEGTWPTMRETLDKIGISETELFRECEASFKQGAKFSKWVTGAEDDYYYHPLVLPQGYTKTDLVFPWQKHRGEISFADAVSYQGHLCEQGRAPKLISTPEYAGIANYAYHLNAVKLAQLLQKHCIEKLGVKHVVDHVTAINSADNGDIASVATKEHGDIAGDLFIDCSGFSSILLGKHFNVPFISKKHILFNDTALAVQVPYPDENSAIASHTISTAQSSGWIWDIGLPSRRGVGYVYSSEHTNDKDAESELRAYIESSIGKAETDKLKVRKISFNPGHREKFWHKNCVAIGMASGFLEPLEASALVLVELAAAKISREMPATRETMDIVAKRYNKQFLYRWQRIIEFLKLHYILTKRTDSAYWRDNCNAETIPESLQELLTLWKHQPPGPQDFHHVEEVFPSSSWQYVLYGMGFETQENEVSRKFVNEEMAHQFFSENVQLTKKYLSALPSNRELIDKIKQYGLQKI

SEQ ID NO: 83699 - protein, 502 aa, unidentified
  source 1..502: note = Porticoccaceae bacterium
  REGION 1..502: note = tr|A0A2E8HTE9|A0A2E8HTE9_9GAMM Tryptophan halogenase; OS = Porticoccaceae bacterium OX=2026782 GN=CMK37_05940 PE=4; SV = 1
MTKQNVKKVVIVGGGTAGWMTAASLTKLIGKDLDVTLVESDEIGTVGVGEATIPTFFALHQLLKIDEAEFLSEVQGTIKLGISFENWKDKGEDYIHAFGYTGKSCWAAGFQHFWLKGKELGFSDQYSSYSPELMAAKANKFGLLKQNPLNYAYHIDASLYAKFLRRIAEKSGVTRQEGKIIAVNQSSDGSIKSVDLESGITVRGDLFIDCSGFAGLLIDKTLGTEFEDWSHWLPCDSAVAVQTASVAPPIPYTRSIARDFGWQWRIPLQSRVGNGFVFSSQYLSDENAKKVLLDNVEGKILTEPRVIKFRTGQRVKQWNKNCVSLGLAAGFLEPLESTSIHLIQRGIIRLMQMFPLAGITDADRDEFNRQMSDEYYFIRDFIIMHYHVTERRDTEFWKHCGEMEIPDSLDHRLRLFKQSGRVFQGEGDVFGENSWTQVMLGQGLMPEQYHPIVNMMSDSELQGFLQSNRALVDHVINQLPSHQQFLSQYCPSKLVSISTEIP

SEQ ID NO: 83700 - protein, 894 aa, Nostoc sp.
  REGION 1..894: note = tr|A0A2L2N166|A0A2L2N166_9NOSO Tryptophan halogenase; OS = Nostoc sp. 'Peltigera membranacea cyanobiont' N6; OX = 1261031 GN=NPM_0701 PE=4 SV=1
MADFIDPIPQVPRINPNAHLILNEADEVCSWVGGEAFVLEGIQPSIIRKLLALIDGVRPLERIYAELADSGDRNYLNEIVLALSKLDIIEEVVTEAAPQNHRWDLPIVSKQVGQKAIALLGNHQLLNTLAKTFAAAGFDNRRTFYLKNFASCQTPEFRALGQERILVNGTSKYLSSLAPTVYQDSLDSVSISGLSQLFKEFDFVVCALEGVPFQALLDVNKSALASGTPCLFVTASQETALIGPTVIRGATACFGCRVITLEGLPPVFEDIWPQLSTPIVAKADSGILSSVAQACLEEAISLLGPTLTPIRATSVLKITEEGDAYGGLCLRTIKRLLPSSECQECTPRLDEPLGVIERSAIAAAAEEIGRIWPNSPKAAIPPASDAYQTVGILGGGTAGYLAALAFRAFRPDIKVTLLESSAIPVIGVGEATTPELVKFLHSPRFLGLDIVDFYERVRPTWKLGIKFQWGLPDDYEFTFPFQRGRLLESLLYDSTLNNQSLGAMLMSADRAPIFDRGDGTPLSLLHQIRWAYHLDNRRFVRYLREEAIAAGIEHIDVKISDAQISADGETITHLITEDGRQLTYDLYIDCSGFRSLLLEQKLGSKFVSYQDTLSTDRAIAATVPHNGTVKPYTLAETMNNGWCWNIPFEDADHRGYVFSSAFCSDDQALEEMRAKNPGMGDPWVVKFRSGRHEDFWKGNVVAIGNSYAFVEPLESTAIHTIVLELELLLTNFPASKRDEGVKSVLNRKMSDRWDALRWFLGIHYKFNHRLSTPFWQAANRDTDISGAIERLALFTERAPLSYRNSLFYPLHPPDFFSDDHSYDTLLAGQQVPARFMEPVEDPATWQRQMAILKGLASTAMPQHEALSCLREKRQDLLYDFANRRDSWLHTWLPA

SEQ ID NO: 83701 - protein, 504 aa, Pseudoalteromonas piscicida
  REGION 1..504: note = tr|A0A2A5JRZ4|A0A2A5JRZ4_PSEO7 Tryptophan halogenase; OS = Pseudoalteromonas piscicida OX=43662 GN=CEX98_08435; PE = 4 SV=1
MKNQKIVILGGGTAGWMAATMMAKSWADKAIEITVVESSSIGIIGVGEGSTPQFKGFMDYLGISESEWMPACNATYKNGIRFIDWSTKPGFSSYFHPFPAQPDDYSAPAFFHNSFVRRKAIDVEGHPDHFFLATHLANANKSPIAAENFPFEINYGYHFDSTLLGELLARKAAKLNVKRIDATISDVRKQVNGDIAALITSEGLEITGDIFVDCSGFKSLLLQQALGVGFESFGDNLFNDAAVVLPTEQVDIISSETKSVARKYGWSWHIPLTNRIGNGYVYSQRYCDQDQAETELRAALGLLDSDVEARHIKMKVGQVKTHWQNNCIAIGLSQGFIEPLEATALHIVQETVQSFIECYQEAGFTDGKRDKHNHSINARYQAIRDYIVAHYRVNSRTDTKYWLDNANNNNLSRSLFQVLQTWVAGNNLSDELARQNIDQYYPSVSWHCLLAGYGIYPDQAQLKPGNARALQHDVGKIENYLSRCGLNFKTHRAELDALASTMNK

SEQ ID NO: 83702 - protein, 551 aa, unidentified
  source 1..551: note = Chloroflexi bacterium
  REGION 1..551: note = tr|A0A2E5NWC8|A0A2E5NWC8_9CHLR Tryptophan halogenase; OS = Chloroflexi bacterium OX=2026724 GN=CL783_02260 PE=4; SV = 1
MSLPNSSGRLDVIVIGGGPAGSTAATMLAKHGCSVLLLERSEFPRDHVGESLLPASIPVLEELGVIDEVQQAGFLPKWGATMIWGIDKEPWSWYFRETNEQYPHSYQVWRPQFDKILLDNSRKHGVDVREKHRVVHVVFEGSKAVGVKYVDDFGNSKIANAEYIVDASGQQNVLGSQLNTKKEDRFFRNLAVYGYYTGVPKLPEPAHNNIFIESYENGWCWNIPLHNGHNSIGIVVDGTSNQNSIQELGAETFYIGELSKASYISRLLETAELQSVPSVIKDWSYSCSPMVGDGYILVGDAACFIDPLFSSGVHLALMSGVLSSTYINTSKRDETLGLASRSVYEDLYMKEYGHFRELARLFYSSNRSVESYFWEARRVLDADISLSPRNAFIQAVAGQSARGYERVVLQHGDLPKNFLGSVNQIESEVQRRSEEFTQLSVDGGSSFLKSLSVIPKLSEGVVLERKPVLGEGIFNWGYVLNTKNRNNGLECSELVAVLISKMDGQSTLSELLDLFKELTPEGDWPNLRQALMNSLRLLYIDGVIERFSSEA

SEQ ID NO: 83703 - protein, 505 aa, Sphingopyxis alaskensis
  REGION 1..505: note = tr|Q1GV62|Q1GV62_SPHAL Tryptophan halogenase; OS = Sphingopyxis alaskensis (strain DSM 13593 / LMG 18877 / RB2256) OX=317655 GN=Sala_0740 PE=4 SV=1
MSDHAIRKIVIVGGGTAGWMAASAFSALLERSIEIILVESDEIGTVGVGEATIPPLIAFNSMLGINEDEFLSATRDTFKLGIEFVDWGAVGERYFHPFGPHGQDFRGVAFHQLYLRETARQPLPDIRHWSMSATAAELGRFARPGPTARPPLSQLAYAFHFDAGLYARFLRSYAEKNGVIRIEGKLVDASLNPESGHVRSVKLANGNDIAGDLFIDCSGFRGLLIEEQLGTGYEDWSHWLPCDRAVAVPCGLASPPEPFTRSTARSAGWQWRIPLQHRMGNGLVYSSAHLERRAAEDLLVANLEGKGLADPKHLSFTAGRRRKAWNANVVSLGLSSGFVEPLESTSIHFIQSGIAKLLALFPDRRFDPVERNEYNRQMADVFEDARDFIILHYKATRRDDSDFWNDCRTMDVPDGLAAKFGLWQSKGRLFREGRELFGTASWVAVLLGQGIRPAETDPAVNAIDPDIARDMLDKMRSSYRQMAEHMPPHWDFISRACLAPEAISG

SEQ ID NO: 83704 - protein, 504 aa, Hyphomonas sp.
  REGION 1..504: note = tr|A0A350ZUD7|A0A350ZUD7_9RHOB Tryptophan halogenase; OS = Hyphomonas sp. OX=87 GN=DCY26_12205 PE=4 SV=1
  VARIANT 212: note = Xaa can be any naturally occurring amino acid
MQGHNAPIERIVILGGGSAGWMAAAALANGSQGSCKITLIESEEIGTIGVGEATIPPVRHFNARLGIDEATFLRETSGTFKLGIEFINWTREGHAYFHPFGQYGAEFDDLPFYQYWIREKVAGRAGPPDEFSMAWAVAKAGRFEHPSKDRRQIQSTFDYAYHFDAGLYAKYLRGYSEARGVSRVEGRVVSATQDPATGFIRSVALSDGYTFXGDLFIDCTGFFGFLIEKTLQTGYEDWSHWLPCNRAVAAPCKSDQPLHPYTKSTAKAAGWQWRIPLQHRVGNGYVYCSSFLSAEDAEAELRRSLDNEPLAEPRHIHFVTGRRKKFWNKNCVAIGLSAGFMEPLESTSLHLIQYGILRLLALFPDKQMSPLLIDEYNALTAAEYERIRDFLILHYKATERRSDEFWRYCATMEIPDRLQYKIDHFRSHGIIVSDERELFSNPSWIAVLIGQGIIPERAPALSGLRKDVPVAERMAQIRAAMTEAVAAMPGHRDFLNAYSRSDLQ

SEQ ID NO: 83705 - protein, 522 aa, unidentified
  source 1..522: note = Cellvibrionales bacterium
  REGION 1..522: note = tr|A0A1Z8YMW5|A0A1Z8YMW5_9GAMM Tryptophan halogenase; OS = Cellvibrionales bacterium TMED79 OX=1986768; GN = CBC39_09690 PE=4 SV=1
MAQHDIKDIVIVGGGTAGWLTANIIAARFCPEKGRGLHVTLVESPNVPTVGVGEGTWPSMRTTLKDIGIAEADFIRSCDASLKQGTWFKDWITTGDTPYYHPFSLPEGFDSVNLAEHWLAGAAGNVPFAEAVTPQYAVCELGRAPKQIGIPNYAYTVNYGYHLDAGKFAALLTKNATEKLGVKHLHADVVSVNTDENGYITGVVTEQVGEICGDLFIDCSGFQSLLLGQHYGTEQVSVESILFNNAAVAVQVPYPDETTPIATTTHSTAQKNGWVWDIGLQHRRGVGHVFSKAFQSHEETLQVLDQYLKETGRSKGLEDLNPRLLSFDPGYRKKFWVKNCLGIGLSAGFIEPLEASALVLVELSATALANQMPRDLSDMTVIADRFNREFEARWSQIIDFLKLHYVLSKRDDSAYWTHNRAASSIPDTLQENLIVWANRAPWYHDDLRRDEMFPAASYQYVLYGMGFESRLTFDALRSSEDKQSMAKQLFAETQKKAQKYGQFLPPTRFLMNQIREQDFARI

SEQ ID NO: 83706 - protein, 491 aa, unidentified
  source 1..491: note = Massilia phosphatilytica
  REGION 1..491: note = tr|A0A2S8HBB1|A0A2S8HBB1_9BURK Tryptophan halogenase; OS = Massilia phosphatilytica OX=2026176 GN=C5614_06825 PE=4; SV = 1
MTYERIVVLGGGTAGWMAATALATGMKGATVELVESEDIGTVGVGEATFPSIRNYHQILGIPEADFLRATNGTYKLGIRFRDWRVKGEDYYHTFGDFGMLNGPESLWGQYRRHPRANLPKFGEQCLPTVMAMNDRFCAPGKDAANFNYAYHFDAILYARFLRDVALKRGVRRTEGKVVDVARRPDGGVASLKLDDGRTVAADLFVDCSGFASLLLGRTLGEPFVDFSRWLPVDRAWAVPSARVGDNLTPYTRATALDAGWAWRIPLQDRTGNGHVFSTRFIDEDKAREQLLQQLDGEALAEPRMLRFTTGHRAKFWSHNVVGVGLATGFLEPLESTSIYLVQVGVGRLMTLLQRGGPVAPDLVDAYNTGLTRQFERIRDFILMHYCLTARRDTPFWQHMAAVELPETLAYKLHAWRQTGVLHQYDEEGFDGHSWLAIHAGMHNWPERSDPTLKLIPEEQSLEWVRERATQLAAAVATVPTHQEFLDRVLGR

SEQ ID NO: 83707 - protein, 535 aa, unidentified
  source 1..535: note = Chloroflexi bacterium
  REGION 1..535: note = tr|A0A2E5F3G6|A0A2E5F3G6_9CHLR Tryptophan halogenase; OS = Chloroflexi bacterium OX=2026724 GN=CL792_05935 PE=4; SV = 1
MENFDAIVIGGGPAGSTAATLIARQGKSVVLIEKEYFPRHHIGESLLPASLPILESLGVNEEIQSAGFLKKYGATMVWGTSPDPWSWYFAETNRKYTHSYQVVRSTFDHILLNNSIKSGVDVRQGHQVTKIHHREDYVSGVEIHTPDNKIIDLEAPITIDASGQSAILARNMNLLEWDDFFQNLAVYGYFENAEKLEAPDENNIFIEAHPEGWNWLIPLHNGTVSVGVVVDSNIASKQLHSSDLEEFLCHYISYSSHISNLLGNATLTSPPQAVRDWSYAANSFVGDGYILVGDAACFIDPLFSSGVHLAMNAGLLASAYVNTLFTDSTLALESRVIYTKLYKQQYEHFRELAKLFYSSNHTSDSYFWETRKLTPDAFDLPARTAFINAVAGQPAQGYERVVIEQGEAPSFIIDAIKNVEDTREQRKIKIDTSTEYFPDSIPKLAANVELKNEPILENNEFVRSYVIYKENRMVGYPVSNLIAASLPFINGKASIASISQEISNEYGIDANTILPIIINAFKIMYIDGIIETFIL

SEQ ID NO: 83708 - protein, 529 aa, Streptomyces sp.
  REGION 1..529: note = tr|A0A4Q6INX1|A0A4Q6INX1_9ACTN Tryptophan 7-halogenase OS=Streptomyces sp. F001 OX=1510026; GN = StrepF001_11575 PE=4 SV=1
MTHTALPGHGGTSAVRDVVIVGGGTAGWMTAAYLAAAFGDRVAVTLVESADVGTIGVGEATFSDIRHFFEFLGLAERDWMPACNATYKLAVRFENWREPGHHFYHPFEQLRSVKGFPLTDWWLRHPTTDRFDVDCFVMASLCDAGRSPRHLDGALLKQDFVEADELPSTIAEYQGAQFPYAYHFEAHLLAKYLTQYATSRGVRHIVDTVEDVGLDERGWVSHVQTAEHGRLEGGLFVDCTGFRALLLGKALGEPFVSYRDTLPNDSAVALQVPMDMDKDPIRPCTTATAQDAGWIWTIPLIRRIGTGYVYARDYLEPEEAERTLREFVGPAAADVPANHIRMRIGRSNRAWVNNCVAVGLSSGFVEPLESTGIFFIHYAIEQLVKYYPAADWDASLRDRYNSSMANVMDGVREFLVLHYRGAKRADNQYWRDTKTRTVPDALAERLELWRSKVPDADTVHPRYHGLPPYSYNCILLGTGGIEPRPSPALDLVDEKDALAEFQAIRDKARILVGSLPTQNEYFKKMREGL

SEQ ID NO: 83709 - protein, 499 aa, Sphingomonas desiccabilis
  REGION 1..499: note = tr|A0A4Q2IV00|A0A4Q2IV00_9SPHN Tryptophan 7-halogenase OS=Sphingomonas desiccabilis OX=429134; GN = EO081_09665 PE=4 SV=1
MEGRRMRRIVVAGGGTAGWMAAAALARTMGRAVEVTLVESDAIGTVGVGESTIPPLINFNRLLGVDEAEFMAATQATFKLGIQFENWKMPGHRYFHSFGYTGKDHWSAGFQHFWLYGRTKGHLASYDAYCIELLAALEGKFGHLPGDRANYAYQLDATLYARFLRRMAEGDGTRRVEGKIAQVELDGQTGNIAALVLESGTRVEGDLFLDCTGFRALLVEQTLHAGFDDWSHYLPCDSAIAIQTESIAPAVPYTRAIAHDAGWQWRIPLQHRTGNGLVFCSRYLERDAALERLLGNLEGPTRTEPNHLRFTTGVRRQQWVRNCVAIGLAGGFAEPLESTSIHLIQRAVLRLIRMLPLSEVSPRDVAEFNEQQLQDMTHVRDFLILHYKATERRDSAFWRHCADMAIPDSLAQKIELFRETGRVFRKNEELFAENSWVQVMMGQGIEPRAWHPIAEKLRDEELARLLTTLRENVARTVAAMPRHADYVASYCEAAREQAA

SEQ ID NO: 83710 - protein, 286 aa, unidentified
  source 1..286: note = Planctomycetes bacterium
  REGION 1..286: note = tr|A0A5C5ZYA3|A0A5C5ZYA3_9BACT Flavin-dependent tryptophan halogenase RebH OS=Planctomycetes bacterium Pla52n OX=2528005 GN=rebH_2 PE=4 SV=1
MTSYTGTFEPIDRIVIVGGGTAGWLSAAYLNQALKGSVHITVVESDAIGPIGVGEATIPSLRLTMGFLGFRDSDWMPEVGATYKSAIKFVNWCTCGPGGATHEYWHPFISRPEPSVLPYHCPFAMGIGQRVSLLHYALKHRLDGESRAIQQMLLPTQSLCEQHKAPINPLMPELSQEYAYHLDVTRLGEFLRQVATKRGVKRVVGHVTNVEHGGNGFITAVETKQENRLSADLFIDCTGFRGLLLNDALGEGIPIFGMQLLTRPTSQIHSIANSSSSRATFRFLTT

SEQ ID NO: 83711 - protein, 501 aa, Sphingomonas desiccabilis
  REGION 1..501: note = tr|A0A4Q2IQW7|A0A4Q2IQW7_9SPHN Tryptophan 7-halogenase OS=Sphingomonas desiccabilis OX=429134; GN = EO081_15120 PE=4 SV=1
MASIDVPQRRRVVIAGGGTSGWLAAAALAQQLGALLDITLVESEEIGTIGVGESTIPTARAFHRLIGLDEQRFMSETGATFKLGIAFENWARDGDRYIHAFGETGQSTWMGAFHHFWLQAREQGFGGDFGAYCLELQAADAGRFAIGDKVPELSYAYHLDAGRYARHLRGIAEQAGARRIEGMIERVEQQGDGGDITALVLRSGQRVEGDLFLDCTGFRALLIGQTLGSPFEDWGHWLPTDRAVAVQTRAVEPARPYTRAIAHGAGWRWRIPLQHRVGNGLVYDSRHLSDDEARDRLLGEVEGGTVTEPRLIRFRAGRRAEAWRGNCVALGLAGGFVEPLESTAIHLVMIAITRLLQLFPFAGDCAAAARRFNAQAAVELDGIRDFIILHYVLTERDDTQFWRDMRAIEIPQSLRERIASFRDGAIAYQDGADLFRVDSWAQVMIGQRLLPHQHHRMGEIMGAPRLRQVLADMKARVAQQVSLLPTHAAFLRDYCPAQEAG

SEQ ID NO: 83712 - protein, 522 aa, unidentified
  source 1..522: note = Porticoccaceae bacterium
  REGION 1..522: note = tr|A0A2D5YGJ7|A0A2D5YGJ7_9GAMM Tryptophan halogenase; OS = Porticoccaceae bacterium OX=2026782 GN=CMK23_08665 PE=4; SV = 1
MNDPQITDLVIVGGGSAGWLTAGIIAAEHLKTEQSSSRVKVTLVEAPNINTIGVGEGTWPSMRSTLKRIGLSETDFIRDCDVSLKQGTLFSGWTDGKDIYTHPFTVPHAYSQHNLSRDWQNKFSDLPFAEAVCPQSKLMLKNQAPKKISTPEYSFNVNYGYHLDAGKFAEKLRSHCTLELGVVHKKAEVIQVNSAENGDIRSLRLDTGESLTGDLFIDCSGSRCLLLGEHYGIPFKSIRDILFNDSAIASQVPYLSAGDSIASSTISTAQKHGWIWDIGLPSRRGIGHVYSSRYTDADNAEVTLFKHIEKLVGSKIAKKVKMRRISFSPGHRQKFWHHNCVAIGMAAGFIEPLEASALVLVELSASMIAEQLPQNRKVMDIVSKRFNEKFLYRWDTIIDFLKLHYVLTKREDSDYWRDNANKNSIPESLSEKVELWRWQGPYHKDTMHVDEMFPSASYQYILYGMGFKTNIGLSTKQSEVQTSKVAQELFDENLKYTNLLLNSMPSNRDFIEKVHQHGLQKI

SEQ ID NO: 83713 - protein, 322 aa, Nitrosomonas marina
  REGION 1..322: note = tr|A0A1I0B634|A0A1I0B634_9PROT Tryptophan halogenase; OS = Nitrosomonas marina OX=917 GN=SAMN05216326_10980 PE=4; SV = 1
MPLLQQLGISENFVARCDLVALGTRSIWGSEQINEYPFWYSSYGHGWHIDRASFDDWLVRQAENAGATTLFGVTVSGTPEYHHGWHLTANHATAPAFTIQSSLVVDASGSSSSFCRRMGIRADKLDQLTGSFCFFQAEANDTVHGVDSFTLVESTEIGWWYSAPLPQGLWVAALMTDSDLARDENVFDEAGWSKALAHTRLTRTRFDNKKPSMPLRVKPARSQRQQQFCGQGWYAVGDAASVFDPLSSLGIFKALRHGLLVSYAIRDELQDKPNATQKYQWLLESEFRRYQHMHQQYYQLEKRFMQAPFWLRRQRQEFARHA

SEQ ID NO: 83714 - protein, 240 aa, unidentified
  source 1..240: note = Chitinophagaceae bacterium
  REGION 1..240: note = tr|A0A4Q3SLD4|A0A4Q3SLD4_9BACT Tryptophan 7-halogenase (Fragment) OS=Chitinophagaceae bacterium; OX = 1869212 GN=EOO07_36480 PE=4 SV=1
MDTPIKKVVIAGGGTAGWMAAATISHHLGSVLDIRLIESEEIGTVGVGEATVPPIQSFHKLLNIDEQEFLRATQGTFKLGINFENWARKGDQYIHSFGITGKVFWMADWVQFWTKARGMGLQNDYGDFCLELQAAKMGKFAITENPRINYAYHFNASLYAKFLRKYSEARGVKRTEGKIVEVTTHSDNGFIKSITLASGEVVEGDLFIDCTGFRGLLIEQTLHTGYEDWSQWLLNDSAIA

SEQ ID NO: 83715 - protein, 526 aa, Sphingomonas sp.
  REGION 1..526: note = tr|A0A0Q4JVV9|A0A0Q4JVV9_9SPHN Tryptophan halogenase; OS = Sphingomonas sp. Leaf32 OX=1736214 GN=ASE83_12755 PE=4; SV = 1
MKDGNIRSITIVGGGTAGWMAAAAFSRVLSGSGMAIRVVESEAIGTVGVGEATIPHIQYFNRLLGIDEDEFVRRTCATFKLGIEFVDWGAIGERYIHPFGSYGQEMEGLHFHHFWYRQAQMGGALPLDRFSIGVGAARAGKFQRPDHSRPGSPLGGISYAFQFDAALYARYLRERAEAAGVERIEGRIVDVALNGANGHVDHVVLDDGRSVDGDLFIDCSGFRGLLIEGALQAGYDDWRAWLPCDRAVARPCARVADPTPYTRATATSVGWRWRIPLQSRTGNGHVYCSDYADDATALAMLDAGLDGEALAGPNFLRFTAGVRRKAWDRNVVALGLASGFLEPLESTSIHLIQSGIARLLTNFPDRSFNQPDIDYYNRRTRAEYEQIRDFLILHYKATVRDDSPFWRRCRDMAIPDSLAERIAIFRENARLYRHDNELFSETSWLAVLHGQNIAPKRYHPIADLLSDAELDHRMTRIAAAMDSGVRAMPDHMAFIDRFGRSPDDGTLRQGGSSMAGLVDDRITQKQ

SEQ ID NO: 83716 - protein, 505 aa, Sphingomonas sp.
  REGION 1..505: note = tr|A0A0Q4K864|A0A0Q4K864_9SPHN Tryptophan halogenase; OS = Sphingomonas sp. Leaf32 OX=1736214 GN=ASE83_17620 PE=4; SV = 1
MTPLKRILIAGGGSAGWMTAAMFARLFKGRYAITLVESDAIGTVGVGEATIPAIKKFNDLLGLDEDEFLRRTQGSFKLGIRFDDWSRIGSSYVHGFGVIGRDLEWLRCHQYWTKLHREGRGGPLDDYSINTVAAVADRFMRPRADMPDSPIGQIAYAFHFDAGLYAAYLADYARTRGVERREGEIVAVGQDADSGFLRSVTLADGSVIEADLFVDCSGFRGLLIEQALAAGYEAWSHWLPCDRAVAVPSARAADFPPYTRSTARPAGWQWRIPLQHRTGNGHVYASRHMDDATAEALLLDHLEEPAIGTPRRLSFVPGKRRRAWVRNCVAIGLSAGFLEPLESTGLHLIQSAILRLVRLMPDAAFDPATIAEYNRQTDFEMERIRDFIILHYKATQRDDTPFWRHVRTMDVPDTLARKMALFAANGRIFREDDELFAEESWIQVLIGQGIVPMAPDPLVDVTPAAEIDRHLADVRGVIAKCVARMPAHDAFVAHHCAAPPPDAAR

SEQ ID NO: 83717 - protein, 516 aa, Brevundimonas sp.
  REGION 1..516: note = tr|A0A0P0CUH2|A0A0P0CUH2_9CAUL Tryptophan halogenase; OS = Brevundimonas sp. DS20 OX=1532555 GN=JL11_06740 PE=4; SV = 1
MDQPRRPLKKICIVGGGTAGWIAAALMAEHFKGRMAQVELVESDDIGTIGVGESTVPPFLEMLKKLGINEQDFIQQTQASFKLGIQFDDWTEKGESYFHPFGAIGVPVDVSDFYPVWLKARMNGYQRPLMDFASAARMAAHERFMLPFKAQRSPIGGASYAVHVDAKRVARYLRDFAEARGVKRTEGIVEDVMTRPDGFVTGVKLKSGQTVEADFFIDCTGFRALLIGKTLGVGYTDWSEWLMCDRAIAVQTENVGAPKPYTLAQAQDCGWRWRIPLQHRTGNGHVFCSRYMSDDEATARLLAQVEGRPVVNPMVVPFKTGVREKIWDRNVLSLGLASGFIEPLESTAIHLIYRGMDFFFRLMPDLDCDPKLAAEYNRRMTVDYEEIRDFIILHYALTRRDDTPFWRACRDMALPEGLQHKLDVFRANGSLVEALDPLFRNVSWYAVMDGMGVTPRSYPPLVDRIDFAGLTAEMDRAADILNAFVKDLPSHQQFLQDNCPAPPVDLAPVAPAAVPA

SEQ ID NO: 83718 - protein, 425 aa, unidentified
  source 1..425: note = Planctomycetes bacterium
  REGION 1..425: note = tr|A0A5C9BAK6|A0A5C9BAK6_9BACT Tryptophan halogenase; OS = Planctomycetes bacterium OX=2026780 GN=FD138_3373 PE=4; SV = 1
MSVTETDVIVIGGGPAGATASTLIAQKGYRVQLFEREKFPRFHIGESLIPETYWVLERLNMLPKMRASQFVHKHSVQFVNAAGKLSAPFYFWDNKPHECSQTWQVVRSEFDLMMLNNAREHGVEAHEGVRVLDVIFEGDRAVGVKIQEADGTQREVRAKVVVDASGQSGLLQNKFKLRVWDPILNKGAIWTYWEGAYRDTGRDEGATIVIQTPNKQGWFWNIPLHDNRLSLGVVGPFDYLFKGRESHEQTYHEEVEKCPDVQRRIANAKRITGYFATKDYSYRATQGAGDGWVTIGDAFGFLDPLYSSGVLLALKSGEMAADAIVEGLPLGDTSAAQLGKWTPLLNQGIDRMRRLVCEYYDGFSFGNFVKNYPRPADRRLVHRQGRCRLGADGVAVLVREDRSEELGFGNTSGDCGDEAQRTLPA

SEQ ID NO: 83719 - protein, 497 aa, Sphingomonas sp.; identical to SEQ ID NO: 83460
  REGION 1..497: note = tr|A0A0Q4KH58|A0A0Q4KH58_9SPHN Tryptophan halogenase; OS = Sphingomonas sp. Leaf32 OX=1736214 GN=ASE83_16475 PE=4; SV = 1

SEQ ID NO: 83720 - protein, 508 aa, Sphingomonas sp.; identical to SEQ ID NO: 83448
  REGION 1..508: note = tr|A0A0Q4JT65|A0A0Q4JT65_9SPHN Tryptophan halogenase; OS = Sphingomonas sp. Leaf32 OX=1736214 GN=ASE83_14645 PE=4; SV = 1

SEQ ID NO: 83721 - protein, 562 aa, Alteromonas sp.
  REGION 1..562: note = tr|A0A433F4K0|A0A433F4K0_9ALTE Tryptophan halogenase; OS = Alteromonas sp. KS69 OX=2109917 GN=C7Y69_01150 PE=4 SV=1
MSNQPIKHVVIVGGGTAGWLCAGVLAARLGKRISNRTNTNSNNPNHAQHIREESAIHITLVESPNVPSIGVGEGSWPSLRDTLQEIGIKEADFLTCCHASFKQGSTFAGWRNGHQGDKYQHPFTTPTGYTELDIHRCWQQFFSNESFEQSFCLQPDICDAGLAPKQSTTPEYAYVLNYGYHFDASALATLLTNHCKTSLGVKHTQAHIANVVTQDNGDIESLVTENGDTIKGDLFIDCSGQQGLLIDKHYHVPWHSVSSVLLNNRAVAVQVPYGSSDLSASADTIASTTIATAQTCGWTWDIGLQHRRGVGLVYASEYASEEDAESILREHLAKQLPKTEIENLNYRHLQFDPGYRKQFWVNNCIGMGMSSGFIEPLEASAIAMVELGIRMLCDQFPQNRKHMSHVATRYNQRFTYRWERVIDFLKLHYVLSERTEPYWKAQRSENSIPDSLNALLDLWQYQAPSRYDLIENEEIFPSASYQYILYGMGFHTNGRQLDKNSDMVNKAFAVKQSLQQGKRQLLAGLPTNRDLLTAISHCVEKETTTNDNDKKEGPRHDVIGFR

SEQ ID NO: 83722 - protein, 322 aa, Nitrosomonas marina
  REGION 1..322: note = tr|A0A1H8F759|A0A1H8F759_9PROT Tryptophan halogenase; OS = Nitrosomonas marina OX=917 GN=SAMN05216325_11216 PE=4; SV = 1
MPLLQQLGISENFLARGDLVALGTRSIWGSEQINEYPFWYSSYGHGWHIDRASFDDWLVRQAENAGATALFGVTVSGTPKYRHGWHLTANHATASAFTIQSSLVVDASGSSSSFSRRMGISTDKLDQLTGSFCFFQVQANDTVHGVDSFTLVESSDIGWWYSAPLPQGLWVAALMTDSDLARDVNVFDETGWFKALAHTRLTRTRFDIKKPLTPLRVKPARSQRQQQFCGRGWYAVGDAASVFDPLSSLGIFKALRHGLLVSYAIRDELQDKPNAAQKFQWLLESEFRHYLHMHRQYYQLEKRFMQAPFWLRRQRPAFARNV

SEQ ID NO: 83723 - protein, 205 aa, unidentified
  source 1..205: note = Comamonadaceae bacterium
  REGION 1..205: note = tr|A0A4Q3PTP0|A0A4Q3PTP0_9BURK Tryptophan halogenase (Fragment) OS=Comamonadaceae bacterium OX=1871071; GN = EOO22_28200 PE=4 SV=1
MNHALRSIVIVGGGTAGWMTAAALSKVMGQSDCTITLVESEQIGTVGVGEATIPQILTFNRLLGIDEDDFVRSTQATFKLGIRFDDWARVGDSYLHPFGVFGVPIDAIPFHHYFLKLRGLGRLERIDEFSLACLAAPQNRFTRPLDIPNSPLAQIAYAFQFDASLYARFLRSYAEARRVQRIEGRITHVHQHAESGFVESVELDN

SEQ ID NO: 83724 - protein, 516 aa, unidentified
  source 1..516: note = Verrucomicrobiales bacterium
  REGION 1..516: note = tr|A0A2E0QVV6|A0A2E0QVV6_9BACT Uncharacterized protein OS=Verrucomicrobiales bacterium OX=2026801; GN = CMO55_14150 PE=4 SV=1
MSEKESGKRKGIWLNNSVIVVGGGSAGFLAALTVKSQMPRFNVTVVHSSDIPIIGVGEGTTVSMPTFLHGHIGVDPKRFHREVKPTYKRGIRFLWGPREQFFYTFTFQLDRFLEGMPRPNGFYAFEDFEYGDLSGALAAHEKGFVKGANGFPRVGIDLAYHVENVPFVDFLSRYAQEIGIDVRDEKILSVEHDESGVTGLMLASGETITGDLYVDCSGFESLLLGKTLGEPLESFCSSLFCDRALIGGWDRGLDEPIPAYTTAETMDSGWAWQIEHDDLVNRGYVYCSDFISDEEADAEFRRKNPKLGETRVVNFASGARRRTWVKNVVALGNAAGFVEPLEATALALICEHAAKLVHCLGDSYFEVEEKSKEYYNQFCHRGWEGVRRFLALHYKFNTRLDTDFWKTCQNETDLAGAKEIVEYYRECGPSVLWGEAVVGLNDPFSWEGYLIMMVGQKVPFRRHSEPSAAEMEVWRQHLSDISIAAKGGMTMREGLDMIRSDEWRWKPNFYSGASRW

SEQ ID NO: 83725 - protein, 527 aa, unidentified
  source 1..527: note = Limimonas halophila
  REGION 1..527: note = tr|A0A1G7PB32|A0A1G7PB32_9PROT Tryptophan halogenase; OS = Limimonas halophila OX=1082479 GN=SAMN05216241_102480; PE = 4 SV=1
MTEPIRDITIVGGGTAGWLAAAMLNRYLNRNASAPVRVSLIESGKLPPIGVGEATVPPMRQVLHDLGVDENEFFKRCNATIKLGVRFTNWDVDDEGRPVEYLNSLTEGPVVNGHNPGAPFMAFAPESWDFPRTVLPTDHLIDQGRAPRGIGDPQYDAKLGYAYHFEAGLFAEFMRDHATGQGVHHIIDDVEHVEMGSDGNVAALHLSENGRRPVQLVIDCTGFKGLIINKAMGEPFEPYSDTMMNDRAVVGQIPRGAEDTIYPYTGAWALSSGWVWRIPLYSRISSGYVFSSAHLSDDEARAELLNHWGVDEETFQPRVVPMRVGKTRRTWVNNCVSIGLASGFIEPLESTGIYMTDRAIRFLIDYFPDQGYDQRLQDRYNELMGQVFDEVRDFIVLHYYQSNRDDTPYWRAARHETAVPQSLLDNLEVWKRAMPSPLDLPEHRLFSAWTYQHVLFGKGFYKGANVAESRHVSRADWEHFRQIVENAKTQLAQNLPDQRAFLASLRGSNTSAGEPDAARRVSADVTT

SEQ ID NO: 83726 - protein, 458 aa, Sphingomonas sp.; identical to SEQ ID NO: 83675
  REGION 1..458: note = tr|A0A0Q4KD50|A0A0Q4KD50_9SPHN Tryptophan halogenase (Fragment) OS=Sphingomonas sp. Leaf32 OX=1736214; GN = ASE83_17270 PE=4 SV=1

SEQ ID NO: 83727 - protein, 513 aa, Alteromonas sp.
  REGION 1..513: note = tr|A0A433EXG4|A0A433EXG4_9ALTE Tryptophan halogenase; OS = Alteromonas sp. KS69 OX=2109917 GN=C7Y69_09765 PE=4 SV=1
MTPVNSVVIVGGGTAGWLTAGLLAATHSKQGSTGARLSVKVIESDSIHPIGVGEGTWPTMRSTLAKIGIEEAALVQQASATFKQASKFVHWHTEGQRTGYYHPFSAPQGSASVDITPYWLHNDSLNEYASDVCFQPSLCEQGLAPKLKADSKQSFSANYGYHLDAGKFINVIREHCKKVLGVEHIIDDVTDVATDDAGIKHVVTKNNDHIRGDIFVDCTGFSARLIEKALDVPMEDASSVLFSDSALVHQIAYSDEHQPIACHTLSTAQEAGWIWDIGLQNRRGTGYVYSSEFQSDDEATQTFMAYLKSINPNEELPSTFRKINYKTGYRKRFWEKNCVAIGLSSGFLEPLEASSLMLIEQSAIQLAEQLPAYTQVMPHVASRFNRALTNKWQSTIEFLKLHYVLSNRNEDFWLANRSPQSIPQRLASLLEEWQYRPILDSDFTDTDEVFSAQSYRYILYGMSHKTNLSQYVRSMSKYEGADKQLQLNKALIAQLKARLPSHRGLIDTMLNKH

SEQ ID NO: 83728 - protein, 511 aa, Sphingomonas sp.
  REGION 1..511: note = tr|A0A0Q4K8P3|A0A0Q4K8P3_9SPHN Tryptophan halogenase; OS = Sphingomonas sp. Leaf32 OX=1736214 GN=ASE83_02950 PE=4; SV = 1
MTQRVRRIVVVGGGTAGWLAACRIAAAADPNADTPLSVTLVESPDVATIGVGEGTWPTMRGTLARIGIDEATFLRAADASFKQGSRFDGWRSGAPDDRYYHPFTAPADLPAADLVRAWQDGRFAEQVCAQPAVCAEDLAPRQPAMPPYAGALNYGYHLDAGKFAALLRATACNRLGVTHVRDHVTAVEAAENGDIAAVVTRQAGRIAGDLFLDCTGHAALLIGGHYGVETIDRTPILFNDRALAVQVPVASDSPIASQTNATAHDAGWIWDIGLPSRRGIGCVYASDFLSDDAAAAALRDYLSRTAPGVDPDSLSFRQLRFRSAHRERFWQGNCVAIGLSAGFLEPLEASAIVLIELSIDALLDGFPAERGAMPLLARRFNALFRYRWDRIVDFLKVHYVLSERDTPYWRAHRDPGSWTGSLHDQLELWRTQPPSPADFAQANEIFPAASHQYVLYGMGMTPPPPGPLRADPGAAAALHQVRQRARTLGASLPTNRAYLRALAPPAGIAHV

SEQ ID NO: 83729 - protein, 503 aa, Pseudoalteromonas espejiana
  REGION 1..503: note = tr|A0A510XSJ8|A0A510XSJ8_9GAMM Tryptophan halogenase; OS = Pseudoalteromonas espejiana OX=28107 GN=PES01_08510; PE = 4 SV=1
MSDSRIKSIVIVGGGSAGWMSASALAKVIGCDNYSITLVESSEIGTVSVGEATIPQIQLFNTILDIDESEFIRSTNATFKLGIEFIDWKEKGHRYFHPFGNYGTNMEALPFHHFWLKMQGDPKFKKTSNLSNYSLASVGAYANKFMHPSTQQNTPLAGINYAYHFDATLYAKFLSKYAINKGVKRIEGQVDEVKTNPVTGMIESLVLNDNTVLSGDLFIDCSGFKGLLIEQALKTGYEDWTHLLPCNKAVAAPCLSTKSLNPYTQSTAQSVGWTWRIPLQNRVGNGFVYSSEFMDDDKAQSLLLNTLESSPLNDINGLQWVTGMRKKSWNKNCIAIGLSAGFVEPLESTGLHLIQSAIAKLMTLFPSKAFTQCDIDLFNQQTETEYHRIRDFIILHYKLTNRDDSEFWRYCKNIEMPDSLKQKIDMFSENGRIFRHDNELFNETSWLAVMHGQGIKPKSYHPLVDRLSHDEIERRLKNIELVISRSANVMPDHQAYILKNYTP

SEQ ID NO: 83730 - protein, 495 aa, Pseudoalteromonas espejiana
  REGION 1..495: note = tr|A0A510XS85|A0A510XS85_9GAMM Tryptophan halogenase; OS = Pseudoalteromonas espejiana OX=28107 GN=PES01_07390; PE = 4 SV=1
MTKTNAVKNVVIAGGGTAGWMAAAALTKLIGKNIHVTLVESDDIGTVGVGEATIPPIRTFHKLLGINEQSFMKATQASFKLGISFENWGDENTRYIHSFGVTGKECWAGEFHHFWLQGKNLGINNPFGDYCYELQAAKAGKFAFNQQNPINYAYHMDATRYAQFLRDFSEPLGVKRVEGKIQKVVKNAKTGHIESLLLNSGEQINGDFFIDCTGFRGLLIEQALHTGYEDWSHLLPCNSAIAVQTKSTSDTVLPLTRSIAHKSGWQWRIPLQNRVGNGLVYCSQYMDDEQAKALLLNNIEGEAVTEPRVIKFKTGRRLKGWNKNCLALGLASGFVEPLESTSIHLIMSGIIRFMRLFPFNGITNPAIDEYNKQLKSEIENIRDFIVLHYKVTNRYDSEFWQHCSAMEVPKTLKHKIDLFKQTGRVFLDDGDIFRVDSWVQVMLGQGIGPEQHHLIASMMNNEELTRFLHGIKQQIEQRVSQLPPHHEFLKQYCPA

SEQ ID NO: 83731 - protein, 511 aa, unidentified
  source 1..511: note = Planctomycetes bacterium
  REGION 1..511: note = tr|A0A3L7RIT6|A0A3L7RIT6_9BACT Tryptophan 7-halogenase OS=Planctomycetes bacterium OX=2026780; GN = DWI00_16430 PE=4 SV=1
MSSKVAESNKRIVIVGGGTSGWMTAALMSQVMRSSGQSITVIEPPGPRGIGVGEASVISMVQLLKKLGADEVEMMQRCEATYKLGIRFCDWYEKGHDNWHPFGVCGARIDGRDLFPFWLADSKRFGTPEPYEAYSLQWAASNAGKAPHAFHCPSPIAQTQSYAFHFNAEALAGWLRDIALRNGVKEIVGAVQDAEFADSGDVTAVTLFAGERVEGDFFVDCSGFQSVLMHKALGDPFESWNSQLLCDRAVAFKISAEGSVPPYTKSHALSAGWAWHIPLASHLGLGYVYSSQFISDEAAWEELRQHAKLNPGAGQEPRFLKMRVGRQQSFWKQNVVAIGLSAGFLEPLESSGIHLSQVGIELLLKNFPSGRNVDSLRDYYNQRMALIYDEVRDFVQMHYRLSRRTDSAFWIAAREAEISGDLKRRLNLYDEVGMLDNLQAEAFTETSYFHLLTGNKRLPRRAPALAASADPHMVHSILASIKAQNDQALSDLPPHEELLGRIHRIHLARAS

SEQ ID NO: 83732 - protein, 503 aa, unidentified
  source 1..503: note = Planctomycetes bacterium
  REGION 1..503: note = tr|A0A3A0D780|A0A3A0D780_9BACT Uncharacterized protein OS=Planctomycetes bacterium OX=2026780; GN = DCC68_24725 PE=4 SV=1
MPFALSRTVVLGSGTAGCLSALKLRRDFPTMTVELVRSKKVPIIGVGESTTAGVPRFLHNQLGLDRGEFWRRVRPSWKLGIRFDWGDPDVSHFHYPFDVSLDGQHRALARSNAFYCLGDLTDSSLFRTLMDRGKSPCFLDLAAGHVVDERGGYHIENKAFVAYLESKIREPGVEIIDGDVADVRRRENGDIAELCLEDGRCIAGDFFVDCSGFASILLDKVLGEPFVSYGDRLFCDRAVIGRWTRTTEPIYPYTTCETMDHGWCWRIEFADEIARGYVFASAFCSDDEARAEFKRTNPYVEDERRIIRFRSGRHENFWVKNVAAIGNAAAFVEPLESTAIHNMAEQLRFLAWALRDSDGRPTDAMRRLENRRYRQLWDDTRDFITIHYKFNRWRDTPFWRHCRETIDLGGAAEAVAYYQEAGPSILVKSLLSPGSPFGYEGYYNLLLGQRVPTRYRGECSEEDRQTWNALRATNRERAAAALPMPDALDLIHSENWTWPEQGW

SEQ ID NO: 83733 - protein, 506 aa, unidentified
  source 1..506: note = Massilia violaceinigra
  REGION 1..506: note = tr|A0A2D2DNK1|A0A2D2DNK1_9BURK Tryptophan halogenase; OS = Massilia violaceinigra OX=2045208 GN=CR152_20130 PE=4; SV = 1
MTDQRIKQIVIVGGGTAGWMSAAALSQLLPVGHHYRLIESDQISTIGVGEATIPSIRNFNLHLGIDENDFIRATQGTFKLGIEFVNWGQQGSNYIHGFGSVGRDQPTANFFHYWLKMHQAGQADSLEPYSINTMAARLGKFSRGRPDLPNSPLADLSYAFHFDAGLYARYLRSYSEARGVQRTEGRIVETVLHPDGSIAALMMENGERIAGDFFIDCSGMVGLLIEQALHTGYEDWSHWLPCDRAIAVPCESHGPMAALTRSTAHTAGWQWRIPLQHRTGNGHVFSSKFMSADEAQAILMNNLDGQPLAEPRLLKFTTGKRKRAWNKNCVAIGLSGGFMEPLESTSIHMVKTALMRLISFFPDRGFDQVDIDTFNRLCDKEYEQIRDFLILHYKVSTRDDSPFWRYCRDMEVPASLRRRLDLYASHGRILRENEELFPEDSWLQVMHGQGLRARGYNPVVDQRAPDEIADFLQGTQAVIRKCVDAMTSHEAFIKANCQAAALRRAA

SEQ ID NO: 83734 - protein, 508 aa, Pseudoalteromonas espejiana
  REGION 1..508: note = tr|A0A510XWQ0|A0A510XWQ0_9GAMM Tryptophan halogenase; OS = Pseudoalteromonas espejiana OX=28107 GN=PES01_23190; PE = 4 SV=1
MNKAVKTIAVIGGGTAGWLSAAIIASYHQGKNGDGLKVMLVESSDIPTIGVGEGTWPTMKNTLQQIGLREVDVFKACNATFKQGGKFVNWTHGNKDFYYHPFTVPLGYGRIDLAPYLNNVEDFAQQTNFQHDICEASLAPRGIAQGEYQGNCNYAYHLDAGAFAELLKQHCKSKLGIEHVIGTVEQVKLDDTGAIDSLTLKEQTRTINADLYIDCTGFSSLLLGQTLNVPFKKMDHVLFNDSALAMQVPYDESDDSLASHTIATAQNAGWIWDIGLTHRRGVGHVYSSKFLSDEEAEQNLRNYLGDAAKGLTARKISFESGYREKLWHKNCVAVGMSAGFVEPLEATAIMLVEISSRFVAEHMPADTQVMPIVAKRFNEQMDYRWQRIIDFLKLHYMLTKRPEPYWQAHVQPESIPQSLQEDLLLWGTRGPLIQDFHGALELFPAASYQYVLYGMGFKPDFTKQAYLYSQDAQANQIIERNSQLTQQMLQTLPPHRAYIEQWLAANPV

SEQ ID NO: 83735 - protein, 528 aa, Alteromonas sp.
  REGION 1..528: note = tr|A0A433EZ08|A0A433EZ08_9ALTE Tryptophan halogenase; OS = Alteromonas sp. KS69 OX=2109917 GN=C7Y69_07880 PE=4 SV=1
MAIANKTPASQQATDQQTTDHHEAKQAPVKRVVVAGGGTAGWLTAALLKKVIGDAVNITLVESEAIGTVGVGEATIPPIRLVNQVLGIDEATFLRDTKATIKLAIRFENWKQQGQQYYHTFGAPGKSMAFCHFHHFWLKARQQGLKHDLWEYDLNYLAAEAGKFARINAKDPVLELPFAYHFDASLYAKYLRKLSEGLGVKRVEGKISYVSRHKHSGNVKALHLENGHAIEGDLFIDCTGFRGLLINETLGAGYDDWSHLLPCDSAIAVPSERHENTAPFTRSIAHSAGWQWRIPLQHRNGNGHVYSSRYISDSQAHDTLMANLDTKPLGDPKLIKFTTGRRRQQWCKNVVAVGLSSGFLEPLESTSIHLIQSAIVRLIKLFPHQGISDSAVEEYNAQSKVEFEQIRDFLVLHYCLNEREDSDFWRDMRHLTLPDSLTHKMALFKQNGNLVREQNDLFLESSWLQVMYGQGLVPEDYHGLANSLSDEKTQAMLSSLYNIKREPIASLPTHDAYIQSMIDSANKTSVSF

SEQ ID NO: 83736 - protein, 505 aa, Sphingomonas sp.; identical to SEQ ID NO: 83478
  REGION 1..505: note = tr|A0A0Q4JT80|A0A0Q4JT80_9SPHN Tryptophan halogenase; OS = Sphingomonas sp. Leaf32 OX=1736214 GN=ASE83_14755 PE=4; SV = 1

SEQ ID NO: 83737 - protein, 506 aa, Sphingomonas sp.; identical to SEQ ID NO: 83479
  REGION 1..506: note = tr|A0A0Q4KPR3|A0A0Q4KPR3_9SPHN Tryptophan halogenase; OS = Sphingomonas sp. Leaf32 OX=1736214 GN=ASE83_04175 PE=4; SV = 1

SEQ ID NO: 83738 - protein, 506 aa, unidentified
  source 1..506: note = Luteibacter pinisoli
  REGION 1..506: note = tr|A0A4Y5Z7F0|A0A4Y5Z7F0_9GAMM Tryptophan 7-halogenase OS=Luteibacter pinisoli OX=2589080; GN = FIV34_20610 PE=4 SV=1
MSNGTTKIVIVGGGTAGWMAASAFSRTLGQHASIRLVESEEIGIVGVGEATVPHIKAFNQLLGLNEAQFVARTQGTFKLGIEFRDWRRKGDTYVHGFGSMGHDIGLVPFHQYWIKGRLRGEAADLLDYSVNTVAAMRGKFMPAPVDVPPSNPLGSIAYAYHFDAALYARFLRQFAEERGVRRTEGKVREVETNPENGYVTAVRLENGDRVEGDLFIDCTGFRGLLIEGTCQSGYEDWSHWLPCDRAMAVPCAKVGPPTPYTRSTAREAGWQWRIPLQHRTGNGYVYSSQYLSDDEAAATVLGNLDGVALADPKPLRFTTGIRRKAWMRNVVALGLSSGFMEPLESTSIHMIQSGISRLLQLFPATGDIDPVLVDRYNEQSRFEAERIRDFLILHYKATERDDSAFWNHCRTMPIPESLQANIDLFRHSGRFFRNAEEMFGLVSWVQVMVGQGIMPTGYHPLVDQMPDADLVKFLASVREVVSKNVDLMPAHEQFIARECPAPQVAA

SEQ ID NO: 83739 - protein, 509 aa, Stenotrophomonas rhizophila
  REGION 1..509: note = tr|A0A023Y3Q4|A0A023Y3Q4_9GAMM Tryptophan halogenase; OS = Stenotrophomonas rhizophila OX=216778 GN=DX03_09920; PE = 4 SV=1
MNVADTTQARIRKVVIAGGGTAGWLAGCALSHQFRDQLDITLVESEQIGTVGVGESTVPPIRTFHRFLQIDEQEFLRAVAGTFKLSISFENWRRPGDRFIHPFGTIGQGTWATPFHHFWLDSLRRGMPSDLGDFCLESVASRGDQFSLETQPALNYAYHFDAGLYARFLRRKAEGHGLRRVEGKIREVRQHAHDGSVAALVLEDGQVIEGDLFIDCTGFRGLLTEQTLHTGYEDWHEWLPSDRAVAVQTEAVAPPVPYTRAIAHEAGWRWHIALQHRVGCGLVFSSRHMSDDEAQAKLLRDVDGPPLRDPWLVPFRSGRRLKAWNKNVVALGLASGFIEPLESTSIHLTISAVVRLIQLFPIDGISPALVALYNDVSRQEMEHVRDFIILHYHATQRDEPMWKACREMALPESLAVRLRAWRERAHAWQDPGELFRVDSWTSVLMGQGIQPGPPHPLAAAINDADLRTLLARIRQPVQQAVATMPSQAAFIERYCKAAADVWPRRSAVA

SEQ ID NO: 83740 - protein, 498 aa, unidentified
  source 1..498: note = Verrucomicrobiales bacterium
  REGION 1..498: note = tr|A0A3C1HAP8|A0A3C1HAP8_9BACT Uncharacterized protein OS=Verrucomicrobiales bacterium OX=2026801; GN = DCM86_08475 PE=4 SV=1
MSTSPHPIRSVIVLGGGSAGFMAALTLKRKLPDLRVTVLRSPDIGVIGVGEGTTPAFSKHFFDYLRLKPQQFYAEAEPTWKLGIRFLWGPGREFFYSFAFEFEKRQPELSRNNGFFFNPERPACGPVSWFMAQEKAFPRKPDGSPLLHDRHAFHIENVKLVGWLERRARDFEIQVVDATVRPELGEEGVRALVAEDGTRHTADLYVDASGFRSELLGKGLQVPFRSYADSLFCDRAVIGGWSRGEEPIHPYTTAETMDSGWCWQIEHENWINRGYVYSSAWISDEEALAEFLRKNPRVSNTPRVVRFRAGRHERLWVGNVVGIGNAAGFVEPLEATALQVICIEASTLADSLVDSQCMPTPTLIELYNRYNAQAWDDIRDFLAIHYKFNTRLDTPFWRACRNETRLHDAEFLVDFYRENGPSVVAGAQLLHPSNAFGMDGYLALLAGQQVPHQKPHLASAPEQKLWRDRQSTWETQARHGLSVKECLQAIRKPGWRWS

SEQ ID NO: 83741 - protein, 510 aa, Sphingomonas sp.
  REGION 1..510: note = tr|A0A0W1QJ10|A0A0W1QJ10_9SPHN Tryptophan halogenase; OS = Sphingomonas sp. WG OX=1592629 GN=ATB93_13440 PE=4 SV=1
MRQDLIQRVVIVGGGTAGWMAAAALGKLLGRMPEMRIELVESAEIGTIGVGEATIPHIALFNTMLGIDEAEFVRATQATYKLGIEFVDWRRIGHRYVHPFGVYGLDMLGVEFHHFWLKARSLGATVPLDAYSIGASAGMRGRFTHPRPELPNSPLAKLGYAFQFDAALYATYLRNLAETLGVIRTEGRIVNVLRDANTGHVSAVRLEDGTDIAGDLFIDCSGFRGLLIEQAMGATFQDWTDWLPCDRAVAVPCALGGDRMPLTRSIARAAGWQWRIPLQHRIGNGYVYAGAFLSDDEAAATLLAHLDGPPLAEPRQLAFRAGHRDRAWIGNVVAIGLAGGFLEPLESTSIHLVQSGIGRLMALFPSKNFDAAEIDRFNRETAREYADIRDFLILHYKATERDDSAFWRRCRDLTPPDGLREKIAMFRANGRIFRDQHELFPEASWLAVMNGQGIEPQGYHPIADLLSDEETLKRLNHIAQVIDETANTMPLQDAYLRELGCQPAPLRRVS

SEQ ID NO: 83742 - protein, 504 aa, Caulobacter sp.
  REGION 1..504: note = tr|A0A258IJQ7|A0A258IJQ7_9CAUL Tryptophan halogenase; OS = Caulobacter sp. 32-67-35 OX=1970330 GN=B7Y81_14225 PE=4; SV = 1
MTRVNRLRKVVIVGGGTAGWMTAAALGRFLTKDGQTSVTLVESDSIGTVGVGESTIPQINIFNRMLGVDENDFIRKTRATFKLGIDFVDWKQIGHSYHHPFGPYGVDMEAVSFHAYWLKAHAMGEDDDLSAYSLNALAARQHKFMRPNGQPNSPLGSIAYAFQFDAGLYAKFLRDYAEARGIVRQEGKIASVQQNGETGFVTSVTLESGQVVEGDLFIDCSGFRGLLIEGTLQTGYEDWSQWLLNDRAVAVPCALGGSMAPVTRATARPAGWQWRIPLQHRLGNGYAYSSAHISEDEATAYLLAHLDGEPLAAPNHIRFTAGRRKKSWNRNVVAIGLAAGFMEPLESQSIHLIQVGIARLLAMFPDREFRQPDIDRYNRVMAFEYEKIRDFIILHFKATQRSDTPYWDYLREMSVPDYLADKMAVFESYGRIFRENEELFNDTSWFAVMVGQGIVPKGYDPMVDVMSDDELRRRMAEIRSVIAKSAEVMPGHMAFIRANCDAMA

SEQ ID NO: 83743 - protein, 530 aa, Sphingomonas sp.
  REGION 1..530: note = tr|A0A0W1QJ45|A0A0W1QJ45_9SPHN Tryptophan halogenase; OS = Sphingomonas sp. WG OX=1592629 GN=ATB93_13445 PE=4 SV=1
MNEHSIREVVIVGGGTAGWMAAAAFSRFLNNGYTRVTVVESEEIGTVGVGEATIPPILNFNAMIGLDENTFIAETKGTFKLGIEFVDWGALGDSYFHPFGNYAQDLQGVHFHQLYLRERARRPIADIAAWSMSAVAASLGKFGRPAANAQTPVRELFYAFHFDAGLYAQLLRRLSEARGIHRIEGRITDVTLRPEDGFVQSLTLADGRSVAGDLFIDCSGFRGLLIEQALETGYDDWRHWLPCDRAVAVPCANVREPTPFTRSTARDAGWQWRIPLQHRVGNGLVYSSDFLDDDTAEQQLLASLEGAPLAEPRRISFVTGRRREMWRKNVVALGLSGGFIEPLESTSIHFIQSGIARLIALFPDKRFAAIERDEYNRQMRELYEDVRDFIVLHYKATHRNDTPFWDRCRTMDVPDSLNRKIELFRTKGRLFREGMELFANPSWIAVCLGQHIVPEEHEPAADALDENLVAQALEQMRQGYWETAQKMPSHAEFLAAIAPKQSASPAAQAESLPVFSFAQESPFASPGSPV

SEQ ID NO: 83744 - protein, 513 aa, Pseudoalteromonas rubra
  REGION 1..513: note = tr|A0A4Q7ELC7|A0A4Q7ELC7_9GAMM Tryptophan 7-halogenase OS=Pseudoalteromonas rubra OX=43658; GN = C3B51_05330 PE=4 SV=1
MHNAEAKIKRIVIVGGGTAGWLAANHLAADAPEDVVITLVESPNIPTIGVGEGTVPFIVDSLKKFGIKESDVFRLCDATFKNGIHFVGWNKPVNGQPHCYFHPFDDPNVNGVNLLPYWLHQLPEARARFDQSVSIQTHIALENRAPKLITNAEYERLINYAFHLDAGKFSALLAKHAIDNRQVKHIHDDVESVELALDGSISGLQLKQGPLLEGDLFIDCSGFQSLLLGKALNTPFIDKSDVLFANHAVVTQVPYEREQEVPPYTISTAQQAGWIWDIGLQTRKGVGHVYSDQFTSHEQAHRDLSAYLGKSEDVVESRLIKMQVGYRAQAWVKNCIGIGLSQGFVEPLEATGLLVFDLAARMLSKRLPEQRQDMPAIALQFNQHMSHAWQSIVDFIKLHYCISNRDDSEFWRMNRAPETIPDSLQHKLALWRSDIPNEYDFVSSLDVFRLENHLYVLYGMNYPSRCKYPSPQKVSQQEAMLKLVSQQQQKAVAMLETHSKLVAKAARYGFQRI

SEQ ID NO: 83745 - protein, 476 aa, Sphingomonas sp.
  REGION 1..476: note = tr|A0A0W1QJ16|A0A0W1QJ16_9SPHN Tryptophan halogenase; OS = Sphingomonas sp. WG OX=1592629 GN=ATB93_13450 PE=4 SV=1
MSAPRRVLVVGGGVTGWSAAAALKRHVPLLDVAILPLDPPAHALADRIACTLPSILGFHEDLGIGVDDAVLRTRSFYRLGTRFLGWSGPDGDFIHSYARHGEAMGSAPFHLLWARAAMRGDVPPFEAFSPAAVMARAGRMMLPTGDDVLADHGFGLALDLQRYSKMIVAFARHVGVRIHAGGLKAVIPGADGGITALTLDDGSLLAADLFVDCTGPDALLHGTLGATREDWRRWLPCDRLVLSDAPTAEPAPNDTIIAEEAGWRWTSPTQTGRVFASSHTEDDALAIRLEAGATLEPWRGNVIAVGDAAVVIEPLVWANLHLAHSAIDRLIAMLPAGAPHPLETAEYNRQALAEARRVRDFVLLHYCTSRRDELFWRDIASAALPESLAHSLRLFRARGRLPFYEEETFDRDSWLAVLFGQGVLPRSVDPLADAVSSIEAERAMQAFRARIDRAIQPLPTPAALLAAQSRHLHERA

SEQ ID NO: 83746 - protein, 494 aa, Pseudoalteromonas espejiana
  REGION 1..494: note = tr|A0A510XSH2|A0A510XSH2_9GAMM Tryptophan halogenase; OS = Pseudoalteromonas espejiana OX=28107 GN=PES01_08230; PE = 4 SV=1
MNQNAIKKIVIAGGGTAGWMCSAAIAKLLGKNIEVCLVESDLIPTVGVGESTIPTLHIFHDLLKISEPEFMAATNATFKLGISFEGWKQNQQSYFHSFGYIGQGCWAAGFQHFWLKGIQQGVAADIGDYCTEHVASRLGKFAVVPNQDRNHAYQLDAGLYAKFLRNFAQQNGAKRIEGMISKVNLEPTNGFIKSLTLGDGQIIEGDLFIDCTGFKGLLIEQALHTGYEDWNHWLPCDSAVAVQTELVSPIVPYTRAMAHKWGWQWQIPLQSRRGNGLVFCSKYMSDDEAKAALLNNVEGKPINEPRVIKYRTGTRRKHWNKNCVAIGLASGFIEPLESTSIHLIQQSIIRLMQNMPTKAIESCYQDDFNNKMRFEAENIRDFIVLHYYVTQRTDSDFWRYCKNMPIPASLAKRIELFKQSGHVYKAEQELFGEASWLQVMLGQGLIPQNYHPIVDSMSDDELKRFLDSIKNHVAKKANSLPSHIDFINHYCKAN

SEQ ID NO: 83747 - protein, 519 aa, Caulobacter sp.
  REGION 1..519: note = tr|A0A258IM29|A0A258IM29_9CAUL Tryptophan halogenase; OS = Caulobacter sp. 32-67-35 OX=1970330 GN=B7Y81_13635 PE=4; SV = 1
MDHRRRILIVGGGAAGWLTAAYLARSLRIAEQTHLEITLLESPDVGIIGVGEATFPTIRATLQFLGIDEGRFIRETSATFKQGIRFNDWAWAPRADGQRHRYFHPFEAPFSTDGTSLTPYWLLQDEATRAPFAEAMTIQARVAEAQRAPKRPHEGNFSGPLNYAYHFDAAKLANVLAERARELGVRHLQGLLTGVALDETGAIASVSCQQHGTLEADLYIDCTGFRAELIGQALNSPFKSVRSTLFADRALACKIVQDGPETPIQSFTVATAHQAGWIWDIGLNGARGVGCVYSSDHMADDQAEAALRGYVGDGVEITPRSLAFDAGYRQKPWIKNCVAVGLSAGFLEPLESTGVVLIEAAVAIIAELFPHNGPIAAPARRFNELMTARYDNIITFLKLHYCLSQRTEPFWRDNVDEASIPERLIDLLEQWRYRPPTRYDFTLDLETFAFFNYQYILYGMGFKTDLSPGRAEFPDVAGAEKLFAKIRGFGERATHDLPSHRDLIAQINQFGFDRSLEPA

SEQ ID NO: 83748 - protein, 510 aa, Pseudoalteromonas rubra
  REGION 1..510: note = tr|A0A0F4QYT9|A0A0F4QYT9_9GAMM Tryptophan halogenase; OS = Pseudoalteromonas rubra OX=43658 GN=TW77_04205 PE=4 SV=1
MKEIKKYVVVGGGTAGWLSANLLAAQLKDMPTHSVTLIESPTIPIIGVGEGTVPSIRKTLQKIGLPETTLFQECDATFKQSIKFVNWLDKHRHGQNNAYHHLFDYPFPFGENLADYWLAEGKGEHFADMVSFQGMCCDEHKAPKLITHPEYQGVSDYAYHFDAHKFAGVLAKHAKETFGVEHIRANVTNLKQSVCGNIEQLVLDNGAVVDLDMVIDCSGFSSYILGQQLAVPFISKSDQLFINRALTVQVPYTSEVSLPPYTISTAHQYGWIWDIGLTTRRGVGLVYDDSLINKEIAYAKLARYLGCDPEQYTVRDIPMPVGVREKVWVNNCVAIGLSQGFVEPLEATAILLADFSANLLCNKLPRFADELPAIATQFNERVAHAWLRVLDFVKLHYCISDRQDSEFWRKNRSADSIPDSLKQRLELWRYAPPGGDDFMTKFEVFDVENYLYVLYGMKYGTRSKALSEAEIMRLSQQVAQVREVALQQCQSLPSHNQLLALIQRHGMHKV

SEQ ID NO: 83749 - protein, 538 aa, unidentified
  source 1..538: note = Verrucomicrobiales bacterium
  REGION 1..538: note = tr|A0A2D4ZBI6|A0A2D4ZBI6_9BACT Uncharacterized protein OS=Verrucomicrobiales bacterium OX=2026801; GN = CMO46_06965 PE=4 SV=1
MKYKTVTIVGGGSSGWMTAAALAKCCPHLEVTLIESKAIGTVGVGESTLGHINRFMQLLDLKDEDWMAACNATYKNSIQFTNFRENKGEVFQYPFSNGLDFTDKPSGEDNWKHLAALKPEEYGPEEYARFFCTGNTLLAEYNKETKNEQGLLRHFNWTYDTAYHMDAQLFGQYLKDNIAIPLGVKHIYGEVHSHMKDPTNNYITQVLCHDGTILNSDLYIDCTGFASVLLEQWMGSHFRSFEQTLANDRAWACRLPYTDREKQMHNVTDCHALGNGWVWNIPLWNRIGTGYVYSTRFTTPEAAQAEFRKHLAEAHTPEIAEAAEMFEVKIRHGRRHRAWKGNVVGVGLSYGFVEPLESTGLLTTHENIIKLVDTLNRREGFVTRSEREGFNFSAEYDVNKFRDFVAAHYAMSMREDTPYWRWCSELNEYDPTMHSDEMQKQGQWPNLFGNLAGAHSYTADLVGHNFIAAGMGLRPTGTPALLYKTDVQQAQLEEEVGSVDRMYKQYKNFVIDHIKDLPSHYQYLLDNIYGGVDEHKLD

SEQ ID NO: 83750 - protein, 507 aa, Ideonella sp.
  REGION 1..507: note = tr|A0A523Q5P9|A0A523Q5P9_9BURK Tryptophan halogenase; OS = Ideonella sp. MAG2 OX=2083017 GN=C4K60_12880 PE=4 SV=1
MPEIKNIVIAGGGTAGWMAAAAFSKVLGERWNVVLVESEEIDTVGVGEATIPVINVYNQALEIDENEFMRETSASFKLGIEFVNWGRQGDSYVHGFGPLGPDIGITRFHHYWLKMRARGKASSLEDYSVNIAAARANKFLRARKDLSPSPMAEIAHAYHFDAGLYAAYLRRYAEKRGVRRIEGKIRSVSTRVQDGFIDALTLEDGQRIEGDLFIDCTGFRGLLIEQTLKTGYEDWSHWLPCDRAWAVPCTSVEPLTPYTRSTAHGAGWQWRIPLQHRTGNGHVFCSSHISEQAALDVLMGKLDGEVLADPRLLKFVTGKRKKIWNKNCIAVGLSSGFLEPLESTSIHLIQSTISRLTDLFPSQGIDEADVAEFNRQADFEFERIRDFIILHYKATERDDTAFWRYCRDMSIPDTLARKIDLFKSNGRVFRENAELFSEISWVEVLLGQHITPRHYHPLVDALPEQKIIDFLDNVRSTIRRCVEVMPTHAQYIASECATHIPPMKPRR

SEQ ID NO: 83751 - protein, 494 aa, unidentified
  source 1..494: note = Colwellia marinimaniae
  REGION 1..494: note = tr|A0A1Z5I0W0|A0A1Z5I0W0_9GAMM Tryptophan halogenase; OS = Colwellia marinimaniae OX=1513592 GN=MTCD1_01031 PE=4; SV = 1
MNNHKITKIVIAGGGTAGWMAAASLSKLLGKSFDITLVESDEIGTVGVGEAAIPTLTAFHRLLGINEQAFMKATHATFKLGISFENWKKGDDEYMHGFGRVGKECWAGEFQHFWLHGKQNNIDFGFEHYSPEIQAAKAEKFALAKGGLNYSYHLDASLYAKFLRTFAEAHGVKRIEGKIIDVAKDSKTGDIKSLQLANGNVIEGQLFIDCTGFVGLLIEKALHTGYEDWSHWLPCDSAVAVQTKSVSAPLPYTRSIARESGWQWRIPLQHRVGNGLVFCSKYLADDDAKTLLMNNIEGEPIKQPRVIKFKTGRRRKGWNKNCVALGLSSGFLEPLESTSIHLIMSGILRLIRLFPFEGISPSAVNEYNQQLTTELEHIRDFIILHYHATERADTPFWQYCKNMEIPDSLKQRLALFKETGRIFTSEGELFRVDSWAQVMLGQGVYPEQYHQIAAIMKPHELDKFLSDIRQTIDKAVANLPSHQSFLEQYCRSSR

SEQ ID NO: 83752 - protein, 505 aa, Caulobacter sp.
  REGION 1..505: note = tr|A0A258IKI9|A0A258IKI9_9CAUL Tryptophan halogenase; OS = Caulobacter sp. 32-67-35 OX=1970330 GN=B7Y81_14220 PE=4; SV = 1
MNTNPVRKVLIVGGGTAGWMTAAALSKVLKGVEITLIESDQIATVGVGEATIPPINTFNQILGIDEADFMRSTKASFKLAIEFVDWTAPGSRYLHPFGGFGLDIEAIKFHQFWLKAQSQGSTQPLDDFNLSATAAKLGKFMLPSKDPGQVLSSLKYAFHFDAGLYARYLRDYAEKRGVIRREGKVVDVCLRGEDGFIASVTTDGGEVIEADLFIDCSGFRGLLIEQALDTGFEDWGHWLPNDRAVAMPCDTGGDGLTPYTRATADKAGWRWRIPLQHRTGNGYVYSSQHLSDEDAVARLRATLDGPARAEPNFIKFRAGRRKQIWVKNCVAIGLASGFLEPLESTSIHMIQAGITKLLALFPDKGFDPIEIAEYNRLTILQTELIRDFIILHFKANERPEPYWQRAREMAIPESLQRKIDLFAARGRLFQSDYDLFAEPSWIAVMLGQNIRPRNYDPLVDTLDETLVRGQMQRLAALVRQTADALPSHEAFIARYCAAPEFEKTR

SEQ ID NO: 83753 - protein, 530 aa, unidentified
  source 1..530: note = Sphingomonas elodea
  REGION 1..530: note = tr|A0A495ER79|A0A495ER79_SPHEL Tryptophan halogenase; OS = Sphingomonas elodea OX=179878 GN=C8E52_4339 PE=4 SV=1
MNEHSIRDVVIVGGGTAGWMAAAAFSRFLNNGYTRITLIESDEIGTVGVGEATIPPILRFNQMVGLDENEFLAATGGTFKLGIEFVDWGGLGERYFHPFGNYAQDLQGVHFHQLYLRERARRAVPDIAEWSMSAVAASMGKFGRPSPTAQTPVRELFYAFHFDAGLYAQLLRRLSESRGITRIEGKITDVTLRPDDGFVQSVTLEDGRTVAGDLFIDCSGFRGLLIEEALQAGYEDWQHWLPCDRAVAVPCANVRDPDPFTRSTARAAGWQWRIPLQHRMGNGHVYCSEFIDDDTAERQLMASLEGPALADPRRLRFTTGRRRESWSRNVVALGLSSGFLEPLESTSIHLIQSGIARLIALFPDKRFDPIERQEYNRQMRDLYEDIRDFIILHYKATTRTDTPFWNRVRTMDIPESLANRIALFQSKGRLFREGTELFTNTSWVAVCLGQHIVPREHEPAADALDENLVAKALEQMRQGYWETAQKMPTHAAFLARIAPQPASQPPPAAEPLPVFSFAQDAPFAAPGSPV

SEQ ID NO: 83754 - protein, 493 aa, Sphingomonas sp.
  REGION 1..493: note = tr|A0A0W1QJV8|A0A0W1QJV8_9SPHN Tryptophan halogenase; OS = Sphingomonas sp. WG OX=1592629 GN=ATB93_12090 PE=4 SV=1
MRAPRRIVIAGGGTAGWMAAAALARTLGRAVSVTLVESDAIGTIGVGESTIPPIITFNRLLGINEAEFMAATQATFKLGIQFDGWKGPQDSYFHSFGLTGKDHWAAGFQHFWLDGRTRGNDAPYDDYCLELVAAREGRFAHLPDDRMNYAYQLDSTLYGRFLRRMAEGDGAVRIEGRIERVELDGKSGDIAALVLDDGQRIEGDLFIDCTGFRALLIERALHVGFDDWSHYLPCDAAVAVQTESVRPPVPFTRAIAHESGWQWRIPLQHRAGNGIVYCSRYLDHDVARERLLANVEGTVLTEPNMLRFTTGARRKQWHRNCIAIGLSGGFLEPLESTSIHLIQRAILRLIRLLPGDPVSPHDIAEFNDQQMTDMLQIRDFLILHYKVTERRDTPFWRQCADMEIPESLAHKIALFRETARVFRRNDELFAENSWVQVMLGQGIVPESYHPITARLSDGELAQLLSSVRQNVATTVRGLPPHADYVARFCGAVA

SEQ ID NO: 83755 - protein, 519 aa, Caulobacter vibrioides
  REGION 1..519: note = tr|A0A290MP10|A0A290MP10_CAUVI Tryptophan 7-halogenase OS=Caulobacter vibrioides OX=155892; GN = CA606_03710 PE=4 SV=1
MQRRRSILIVGGGTAGWLTAAYLAKALRVAEQSHLEITLLESPDIGIVGVGEATFPTIRNTLRFLGIEEAHFIRETSATFKQGIRFVDWAEAPRDGRRHSYFHPFEAPFATEGTSLAPYWLLQSEQTRAPFAEAVTIQARVADAARAPKRPHESDFAGPLNYAYHFDAAKLAQVLADRARALGVRHLQGAVSEVALDESGAIAHVASPGHGALSADLFIDCTGFRAELIGKALGSPFKSAKPVLFADRAVACRAPYERPDAPIQSYTVATAHEAGWIWDIALAGGRGVGCVYASDYMDDDRAEAVLRDYLGKAAGEIETRKIAFDAGYREQQWIKNCVAVGLAAGFLEPLESTGVVLIEAAVAMIAELFPHSGPVSAPARRFNDLMAARFDNIIVFLKLHYALSRRTEPFWRDNVDPASIPERLTELLEQWRHRPPARFDFILDLETFAFFNYQYILYGMGFETDLADGAGEFPDVAGAAKLFAKIRGFADRATQDLPSHRDLITQINRFGFDKALEGV

SEQ ID NO: 83756 - protein, 444 aa, Caulobacter vibrioides
  REGION 1..444: note = tr|A0A258CU58|A0A258CU58_CAUVI Tryptophan halogenase (Fragment) OS=Caulobacter vibrioides OX=155892; GN = B7Z12_18555 PE=4 SV=1
MKPLKKILIAGGGSAGWMTAALCSRLFQGLYEIVLVESEEIGTVGVGEATIPAIKKFNELLGLEEDDFLRKTQGSFKLGIQFRNWWRQGESYLHGFGVIGQDLGWLRCHQYWLRMRALGRAGDFDNLSINNAMALSNKFMRARADMADSPIGHIAHAFHFDAGLYAKHLSTYAQARGVKRREGKIVDVILRAEDGFVQSVTMHDGEVIAADLFVDCSGFRGLIIEQALKTGYEDWTQWLPCDRAVAVPCDRSEHFTPYTRSTAHSAGWQWRIPLQHRTGNGHVYSSQYIDDDEAERVLLANLDGAQRADPLRIRFKTGKRKKIWNKNCVAIGLASGFLEPLESTSLHLIQSAVIRMVRLLPDAGFDQATIDEFNRQSDFEYERIRDFIILHYKATERDDSPFWRYCRDMEIPATLQRKMDLFRANGRVFREDDELFTEESWIQV

SEQ ID NO: 83757 - protein, 514 aa, Brevundimonas sp.
  REGION 1..514: note = tr|A0A258JIY8|A0A258JIY8_9CAUL Tryptophan halogenase; OS = Brevundimonas sp. 32-68-21 OX=1970328 GN=B7Y85_02740; PE = 4 SV=1
MDQPRRPLKKICIVGGGTAGWVAAALMAEHFKGRMAEIELVESDDIGTIGVGESTVPPFLEMLKRLGIDERDFIQKTQASFKLGIQFEDWTQKGESYFHPFGAVGVPVDISDFYPVWLKARMNGYDRPLMDFAAAARMASQGRFMLPFKAQRTPIGGASYAVHVDAKRVARYLRDFAEARGVKRTEGIVEDVMTRPDGFVSGLKLKSGQTVEADFFIDCTGFRALLIGKTLGVGYTDWSEWLMCDRAIAVQTENVGPPTPYTLAQAQDCGWRWRIPLQHRTGNGHVFCSRYMSDDEATARLLAQVEGRPVVNPMVVPFKTGVREKIWDKNVLSLGLASGFIEPLESTAIHLIYRGMDFLFRLMPDLDCDPNLAAEYNRRMTVDYEEIRDFIILHYALTRRDDTAFWRQCRDMVLPEGLQHKLEVFRANGSLVEALDPLFRNVSWYAVMDGMGVRPRSYPPLVDRIDSTGLTDEMDRAANILNAFVADLPTHQAFIDTHCPAPSVDLPAPLAVPA

SEQ ID NO: 83758 - protein, 504 aa, Caulobacter vibrioides
  REGION 1..504: note = tr|A0A0V2F6H1|A0A0V2F6H1_CAUVI Tryptophan halogenase; OS = Caulobacter vibrioides OX=155892 GN=AS593_00740 PE=4; SV = 1
MTNDRIRHVVIVGGGTAGWMTAAALGRFLKDGVTKVTVIESEAIGTVGVGESTIPQINIFNRMLGLDEDEFLRKTKATYKLAIEFRDWKQIGHTYHHPFGPYGVDMEGVSFHAYWLRYQAMGEAADLCEYSLQSLAAAQAKFQRPTGQKNSPLGDIAYAFHFDAGLYARFLRDYAEARNVTRIEGRIIDVIQRGTDGFIEAVTLENGTRVEGDLFIDCSGFRGLLIEQTLKSGFEDWSHWLLNDRAVAVPCASGGSTDPVTRATARPAGWQWRIPLQHRIGNGYAFSSEHISEDEATAYLLANLDGEALATPWTLKFKAGRRKKSWNKNVVAIGLAAGFMEPLESQSIHLIQVGISRLLAMFPDRRFQQPDIDRYNRVMTFEYEKIRDFLILHYKATQRSDTPYWDYLREMPIPDYLADKIAVFESHGRIFRENEELFNDTSWFAVMIGQGLKPKGWDPMADVMSEDLLRARMNEIRAVIARSAEAMPDHMTFVADRVAGARAA

SEQ ID NO: 83759 - protein, 503 aa, unidentified
  source 1..503: note = Alphaproteobacteria bacterium
  REGION 1..503: note = tr|A0A257EMN3|A0A257EMN3_9PROT Tryptophan halogenase; OS = Alphaproteobacteria bacterium PA4 OX=2015572; GN = CFE37_07550 PE=4 SV=1
MTGKPLRVVVAGGGTAGWMTAAALAHALGPVIDLTLVESDAIGTIGVGESTIPPIVLFNRLLGINEAEFMRATQATFKLGILFENWKDVGTRYFHSFGATGKDHWTAGFQHFWMHGQTQGHTHPYDDYALELQAALQGKFAHLPEDRLNYAYQLDSALYAAFLRKRAEAGGATRIEGRITAVELNGESGDIAALTLDGDRRIEGDLFIDCTGFRALLIEGALHAGFDDWSHWLPCDSAIAIQTASVRPAVPYTRAIAHDAGWQWRIPLQHRQGNGIVYCSRYLDKDAALDRLFGSIEGEKLVQPNFIRFTTGVRRRQWHRNCVAVGLSGGFMEPLESTSIHLIQRAVLRIARMLPAGRISARDIAEFNDQQFTDMEQIRDFLILHYKVTQRRDSPFWRQCAAMAIPDSLAHKIELFRETGRVFRKNEELFIENSWVQVMLGQGIVPESYHPVAARLRPEELSALLGGLRESVAKTVASLPEHHAYVARYCGASDAAAAVHRAA

SEQ ID NO: 83760 - protein, 493 aa, Colwellia sp.
  REGION 1..493: note = tr|A0A2N1C985|A0A2N1C985_9GAMM Tryptophan halogenase; OS = Colwellia sp. 75C3 OX=888425 GN=CXF85_03735 PE=4 SV=1
MNTNKVKKVVIAGGGTAGWMAAAAISKLLGKNLDITLVESDDIATIGVGEATIPTLQYFHQLLNINEAEFLKETHGTFKLGISFEGWRDVNQDYLHAFGLTGKDCWAAGFQHFWTKGRQQGIASEFGDYCLEKVTASNEKFAHLPNNGLNYAYHIDATRYGQFLRKMSEKHGTKRIEGKINQVNIDQNSGDISSLTLESGLVIEGDLFLDCTGQRALLIEGALHTGFEDWSHWLPCDSAIAVQTKSTEAAKPYTRSIAHDFGWQWRIPLQNRVGNGMVFCSKYVSDEKALAVLESNLVGEKITEPRVIKYRTGTRRKHWNKNCIAIGLSSGFLEPLESTSIHLIQQSIVRLLRMFPQDGIKQTDIDEFNLQTKFDTATTRDFIILHYSVTNRNDSEFWRHCRNMPIPEGLAHRIKLFKETGRVFRKNNELFDDSWMQVMIGQGLIPESYHPIVDNMSDDELQRFLDHIKTNVNNTVKQLPPHNAFIDRFCKAQ

SEQ ID NO: 83761 - protein, 503 aa, Caulobacter vibrioides
  REGION 1..503: note = tr|A0A290MRF8|A0A290MRF8_CAUVI Tryptophan 7-halogenase OS=Caulobacter vibrioides OX=155892; GN = CA606_19450 PE=4 SV=1
MNDRRIRKVVIVGGGTAGWMTAAALARFLEHQPAAIELVESEAIGTVGVGEATIPPIRNFNAVLGIDEIDFIKATQATFKLGIAFEDWRVQGSRWFHGFGDYGPKIDGVSPHHHWRRLRAAGDPTSHEAYSLTTQMAALNRFRPPVPDPRSVYSNYAYAFQFDAGLYARYLRGYAEARGVTRTEGKIAKVELRGGDGFVEAVVLEDGRRLEGDLFIDCSGFRGLLIEEALGTGYEDWSHWLPVNRALAVPSSRVGELTPYTTASADAAGWRWRIPLQHRTGNGYVFCDAFTSEDEAAATLLSKLDGKALDTPRPLRFVTGRRRKIWNRNVVAVGLSSGFIEPLESTSIHLIQNAIGRLIEHFPDRDFDPRRAEVFNALSAAEIDHIRDFIVLHYVTAQRDDTPFWRHVRSIDPPDALKEQLQRFRRTGEALLKTDESFLEPSWLAIYLGQDIVPEAHDPRADAISLAELADGMRRRREAVRQAAEALPSHAAFIDRFCRAPPP

SEQ ID NO: 83762 - protein, 512 aa, Caulobacter vibrioides
  REGION 1..512: note = tr|A0A0V2FCP0|A0A0V2FCP0_CAUVI Tryptophan halogenase; OS = Caulobacter vibrioides OX=155892 GN=AS593_22395 PE=4; SV = 1
MEQDVRNGRIRSIVIVGGGTAGWMAAASLRRHFGKAPIDITLVESSEIGTIGVGEATIPTIRNFYQSLGLDDLEVLRATQGTCKLGIRFKDWMAPGSAFIHPFSLYGQDLNGVPFQHYWLKARSAADVGELGEYSLGASLAAAGKFTVPAANPPSSLSVFDWALHFDAALFAQLMRRVAEANGVRRIDAKVVKVNLRAEDGFVASLGLHTGASIEGDLFIDCSGFRGLLIEEALQTGYEDWSQWLFCDRALAVQSQPPEGAEPPPYTDVTAHSAGWRWRIPLQHRYGNGYVYSSRHIDDEAAKAELVAAVPDRLLHEPRLIRFTPGRRKKVWNRNVVALGLSSGFLEPLESTSIALIETGIEKLKALFPDRGFDPAVIDEFNDWSRREMERVRDFVVLHYKAAQRGDTPFWRTTRDADIPETLARKVELFRARGHIARYRWEMFQPPSWLAIFAGFDILPDSWDPALDGIDGQALAASLNQMRAGVARAVAQAPTHGEFLRRYVGQAPAAAE

SEQ ID NO: 83763 - protein, 566 aa, Burkholderia pseudomallei
  REGION 1..566: note = tr|A0A0E1TVP0|A0A0E1TVP0_BURPE Tryptophan halogenase family protein OS=Burkholderia pseudomallei 576 OX=557724; GN = BUC_7020 PE=4 SV=1
MTQKSPANGRDSHHFDVIILGSGMSGTQMGAILAKQQFRVLIIEESSHPRFTIGESSIPETSLMNRIIADRYGIPELDHITSFYATQRYVASSTGIKRNFGFVFHKPGQEHDPKEFTQCVIPELPWGPESHYYRQDVDAYLLQAAIKYGCTVRQKTNVTEYHADKNGVAVTTAQGERFTGRYMIDCGGPRAPLAIQFKLREEPCRFKTHSRSLYTHMLGVKPFDDIFKVKGQRWRWHEGTLHHMFAGGWLWVIPFNNHPRSTNNLVSVGLQLDTRVHPKTDIPAQQEFDEFLARFPSIGAQFRDAVPVRDWVKTDRLQFSSRACVGDRYCLMLHANGFIDPLFSRGLENTAVTIHALAARLIRALRDDDFSPERFEYIERLQQKLLDHNDDFVSCCYTAFTDFRLWDAFHRLWAVGTILGQFRLVQAHARFRASRDESALDHLDNNPPYLGYLCADMEEYYQLFNDAKAEVEAVSAGRKPAEEAAARIHALIDERDFARPMFSFGYCITGAKPQLNNSKYSLLPAMKLLHWTQTSAPAEVKKYFDYNPMFALLKAYVTTRIGLALK

SEQ ID NO: 83764 - protein, 530 aa, unidentified
  source 1..530: note = Chloroflexi bacterium
  REGION 1..530: note = tr|A0A2W1AHC3|A0A2W1AHC3_9CHLR Tryptophan halogenase; OS = Chloroflexi bacterium OX=2026724 GN=DK306_002102 PE=4; SV = 1
MTEPIRSIVVVGGGSAGFLAALTLRRMLPAIPLTVVHSPDIPVIGVGESTTSAIAVHLHQHLGIDQSEFHREVRPSWKLGLRFEWGAADVPHFNYTFDRYLDKNAPGLSKWLGYYCLTDTKDASTFYALMDRDKAPATLKGSKFSLDPRTTYHLPNKRFIAYMQRKSEDAGATVIADEVLEVVQDESGNVANLKLKSGREIAGDLFVDCSGFRSLLLGETLEEPSVSYGDALFCDRAVVGSWERDDAVKPYTTISTMEHGWAWRIEFAEAVTRGYVYSSQFVSDEDAAQELKEKNPELGEDPDLRVLRFPSGRRERSVVRNVVAVGNASGFVEPLEATALHLIVEQLHNLVLGLIDTNHRLTPSLRTLLNAHFVGQWDDVRDFLALHYKYNFQSDSPFWRHCREETPLGRGEDLVAMYRELGPSRLLGRVMHPGGIFGLGGYLAMLVGMQLPTDARVGLTPAEAKAWRAVQDGHRKEAAQTLAMRPALERAYGISAGGGAAAASVPVVGRNEACPCGSGKKYKFCHAAVR

SEQ ID NO: 83765 - protein, 498 aa, Xanthomonas campestris
  REGION 1..498: note = tr|G0CAP1|G0CAP1_XANCA Tryptophan halogenase; OS = Xanthomonas campestris pv. raphani 756C OX=990315; GN = XCR_3200 PE=4 SV=1
MTQARIRKVVIAGGGTAGWVAAAALAHQFRGLLEIVLVESEQIGTIGVGESTVPPIRAFHRFLQIDEQEFLRAVAGTFKLAISFEDWQGQGDRYIHPFGSTGQGTLVCAFHHFWLEAQRRGMHSGFDEYCLEAQAARAGRFAVLQQPAVNYAYHLDAGLYARFLRTHAQRYGATRIEGKIQQVRQHADSGFVEALVLQDGQVVEGDLFIDCTGFRGLLIEQTLHTGYEDWSHWLPCDRAVAVQTESVEPPVPYTRAIAHAAGWRWQIPLQHRAGNGLVYARAHLSDDEASAMLLAAVQGTPRRDPMLVPFVTGRRLQTWNKNVVALGLASGFVEPLESTSIHLAIVAVMRLITLFPADGIAQPQVDLFNRISRAEAEHVRDFVILHYHATQREEALWRQCRAMELPESLQLRLRAWREGAHAWQDGDELFRVDSWTHVLLGQRVAPAQHHPLTRALPDQHLQQLLDGIRQPLQHVVTQLPTQQAFIDSYCKVDQSTWG

SEQ ID NO: 83766 - protein, 494 aa, unidentified
  source 1..494: note = Chloroflexi bacterium
  REGION 1..494: note = tr|A0A3D5E3R4|A0A3D5E3R4_9CHLR Uncharacterized protein OS=Chloroflexi bacterium OX=2026724 GN=DGM69_05045; PE = 4 SV=1
MKVVKRLIIAGGGTAGWIAASWFSRRWGNRMEVVVIDKSEPERVGVGEATLLSFPKVMRDMGYQEKEWMNEIDATFKAGILFPGWGKEDNSIWHPFGYAILGDEDDPSIVRVPIWDAWSNYQDELEIKKISALYSTAMLNKIEPDEIGSSYAYQIDCGKLVQFLQKNTSELVKYIKSGIKSIVKVDDNIEKIILDDGSEVTGDLYFDCTGWKQLLMGSDNNIDLSDRLFIDSALAGRVTYVDKDKEMHPYTDCQAMEHGWRWRIPTQSRMGTGYCFNRSITSPDTVAKDFVKHWDNRISEDDLKLLDWKPQRCKQFWKGNVVSIGLSGGFIEPLESTGLALMIRGCEYLEESMYNCVYNPETDIDIYNVRMISSFENAVDYVNMHYCYSERKGKFWDYVRLSHEKSGMQKYMEDQINDPTMNTDQSGRSGGFFGGANWHVWLAQLMPYGVPKKTYWYEQVKEVVPALNSYLNRLDNNVKNSIPQKIILKEWYGN

SEQ ID NO: 83767 - protein, 516 aa, unidentified
  source 1..516: note = Porticoccaceae bacterium
  REGION 1..516: note = tr|A0A2E9XK11|A0A2E9XK11_9GAMM Tryptophan halogenase; OS = Porticoccaceae bacterium OX=2026782 GN=CMK36_03840 PE=4; SV = 1
MTISTSANESQISSIMIVGGGSAGWLTAGILAARYGQTMSVTLVESPDVKIIGVGEGTWPTMKGTLKEMGISETDFFRECDASFKHGAKFAKWVSGDEADYYYHPLMLPQDFTKTNLAPCWLKNNGDRSFSESVCFQEALCERALAPKTVTMPEYNSAANYAYHLNAGKFTKFLTRHCTSKLNVKHKLATISEVLKSEDGGIRYVKTTDGQELVADLFVDCTGMASLLLGKTLGVEFIDKNDSLFIDRALAAQKPYESEEEPILPYTVSTAQKAGWIWDIGLTSRRGIGHVYSSKHTSEAEAEKALSDYIGPVFKGLSVKKISIRSGHREIFWKHNCVAIGLSAGFLEPLEASALMLIEISAKFVRDQLPETRNTMPIIARRFNKTMTYHWERIIDFLKLHYVLSKRDDSDFWIDNRCPNTIPDSLAELLELWKYHTPYRQDFSHKEEVFPAASYQYVLYGMGFQTEVSNRHVESTDDAYRAAVAENERMVSKAVELLPDNRQLLQKINRFGMTAF

SEQ ID NO: 83768 - protein, 524 aa, unidentified
  source 1..524: note = Porticoccaceae bacterium
  REGION 1..524: note = tr|A0A2D5U7Z3|A0A2D5U7Z3_9GAMM Tryptophan halogenase; OS = Porticoccaceae bacterium OX=2026782 GN=CMK25_07300 PE=4; SV = 1
  VARIANT 67: note = Xaa can be any naturally occurring amino acid
  VARIANT 219: note = Xaa can be any naturally occurring amino acid
  VARIANT 235: note = Xaa can be any naturally occurring amino acid
  VARIANT 240: note = Xaa can be any naturally occurring amino acid
  VARIANT 316: note = Xaa can be any naturally occurring amino acid
  VARIANT 323: note = Xaa can be any naturally occurring amino acid
  VARIANT 477: note = Xaa can be any naturally occurring amino acid
MNNAINKIVIVGGGTAGWLSAGIIAAEHACASREEQSNFQLCLIESPDIATIGVGEGTWPSMRSTLXKMGISETDFFRECSASFKQGTQFNGWQTGAGDDIYTHPFTVPHAYAETNLAPHWQAHRDNINFADAVSPQSALFSSKLAPKQISTPEYAFHVNYGYHLDAAKFAEFLRKHCVEKLGIEHIKANVTGINSADNGDIASIDTDSHGTIAGDLFXDCSGSRALLLGQHFGXAICDXNDILFNNTALAAQIAYNDDNDPIESCTLSTAQSAGWIWDIGLPTRRGIGHVYSSDHNTEEHASEELLNYIAATVGXKAAASAXLRKVQFSPGHRSKFWHKNCVAIGMSAGFIEPLEASALVLVELSAAMVAEQLPASREMMDLVAKRFNRKFLYRWDRIIDFLKLHYILTQRRDSDYWRDNCRQQSIPESLQELITLWRYQSPWHRDSHHVDEMFPSASFQYVLYGMGFETQASQTXRRSDREAQKVAGRLFQENAARTKQLTAAMPTNRDLINKVYRHGFQNI

SEQ ID NO: 83769 - protein, 508 aa, Sphingomonas desiccabilis
  REGION 1..508: note = tr|A0A4Q2INZ3|A0A4Q2INZ3_9SPHN Tryptophan 7-halogenase OS=Sphingomonas desiccabilis OX=429134; GN = EO081_16465 PE=4 SV=1
MDPIRSIVIVGGGTAGWMAAAYLARRLDHLRLSITVVESSGIGTVGVGEATVPAIRDFFAAVGLSNAEVLRETEGTIKYGIRFDGWKAPGHRFFHPFGLYGAPARGVAFHHYWLKLRQSGDPTPLGAYSLATQLAEQGRFLMPAQNPANDLGVFDFAVHFDASKFAGLLRRRATAAGVVHVDGRIDRIERDGEAGHVAAVLLEDGRRLAGDLWIDCSGFRSLLLGEALEVPYVDWRRWLPVDRAIAIPCRPRDAAPEPLTVATARRAGWQWRIPLRHRIGNGHVYCSDFLDDASAETMLLEQLEGEPLGQPNHLRFTTGHRARFWERNVVGLGLASGFLEPLESTSISLIQTGLERLVRFFPDRACDPRLAAIYNYQSVLEFERLRDFLLLHYFANGRHGEPFWDHMRTMSPTEGLQLKLDTWRVSGEFVRREWETFQDPSWLSLYAGFEDLPEHPSPLADRFSIAELTDTFARMRAAIAATVAQAEPHAAFLARTVGDGGAKRAATR

SEQ ID NO: 83770 - protein, 502 aa, Hyphomonas sp.
  REGION 1..502: note = tr|A0A350ZUD6|A0A350ZUD6_9RHOB Tryptophan halogenase; OS = Hyphomonas sp. OX=87 GN=DCY26_12200 PE=4 SV=1
MQHEQIRSIVIVGGGTAGWIASAALSKFLPKTIRITLVESEAIGTVGVGEATIPQIRRLNASLGLDEDAFIRATQASFKLGVEFVNWGRVGDRYIHTFGDPGINLANLHFHHYWLRARAEGSTASLWDYSLHHKVAYANKFGRLDRVGNSSMTGLAYAFHFDAGLYAAFLRKFAEAGGVTRIEGKIEKVSLNSETGFVESISLDRGDVIAGDLFIDCSGFRGMLIGEALGVGYQDWSKWLPCNRALAVACERVEPLLPYTRATARDAGWQWRIPLQHRTGNGHVFCDSFLSEEAAQRTLVENLDGAMIGELRPLRFTTGRREKFWHKNCVSIGLASGFLEPLESTSIHLIQSNISRLIELFPTRAFERTAIAEYNRRVGHEFELIRDFLILHYHQTSREDSEFWRYCANMDIPDSLSAKMELFCGNGLLHKDAEDLFRESSWVQVMVGQELEPAGYHAMADRLSAEQLTSFLKDVRRLIDRAEASLPGHSEFIEAHCRSDRL

SEQ ID NO: 83771 - protein, 557 aa, Alteromonas sp.
  REGION 1..557: note = tr|A0A4U0ZHT8|A0A4U0ZHT8_9ALTE Tryptophan 7-halogenase OS=Alteromonas sp. HB161718 OX=2565549; GN = E5672_12075 PE=4 SV=1
MSINENHGSMHKVVIVGGGTAGWLAAGVLGAKLSTKHSVTLVESPTVSSIGVGEGSWPSLRDTLLDIGISESEFLTLCQGAFKQGSSFVNWRKNAHSYYHPFTVPAAYNELDIHTCWKALAPNTPYQDAFSLQAAMCVAGKAPKQIATPDYAHVLNYGYHFDATKLADLLKQHCVDKLDVDYVSGHIGSIKSSSDGYIEKLVTECGKEIIGDLFIDCSGSSGLLIDKHFSVPWMPVKRTMLNDRAVALQVPYSGTDTEIKSTTVATAQTCGWTWDIALQHRRGTGLVYSSQFTNEEQAKQVLIDYVCERYPGAKEHELAFRTLSFEPGYRSQFWVKNCLSLGISSGFVEPLEASAIAMVELGLRMLCEAFPHNKEHMEIVSKRYNRRFAYRWQRVIDFLKLHYALSDREEPYWIAQRDKASIPDSLTELLELWKYQSPSRLDLIENEEIFPSASYQYVLYGMGYSTSVPPLRLSEANKRKALHILENLQQTKSAYLQGLPSNRVLLNDIAKRYNNEKQHVPLHAQREKNEHASASSCSDIKNTSDKKDTSYDRIGFR

SEQ ID NO: 83772 - protein, 474 aa, Caulobacter vibrioides
  REGION 1..474: note = tr|A0A258D8V1|A0A258D8V1_CAUVI Tryptophan halogenase; OS = Caulobacter vibrioides OX=155892 GN=B7Z12_09210 PE=4; SV = 1
MQDHRIRKLVIVGGGTAGWMAAAALRRHFHGGPLEITLVESEAIGTVGVGEATIPTIRGFYQQLGLSDIEVMRATQATCKLGIRFNGWLREGQSFIHPFGHFGQDLRGVPFHHYWRKLAQAGEPTDIADYSLGASLAAAGKFMAPPRNPTSTLSIFDWALHFDAGLFAQLMRRVAEDNGVRRIEGKITKVKLRPEDGFVAGLDLESGETVEGDLFIDCSGFRGLLIEEALHTGYESWSDLLFCDRAWAVQSEGLDNPPPYTDVTAHSAGWRWRIPLQHRYGNGYVFSSRHIRDEDALAELKAAVPDPLLHEPRLIHFNPGRRKQVWNKNVIALGLASGFLEPLESTSIALIETGIEKIKALFPDRDFAPELADEFNDWSRREMERVRDFIILHHFVRYRWEMFAPPSWMAIYAGFEMLPEAVDPSLDGVDPKALSAPLAEMRKAVREVVASAPPHQAFLDQYCRPAAAASSAAE

SEQ ID NO: 83773 - protein, 506 aa, unidentified
  source 1..506: note = Massilia phosphatilytica
  REGION 1..506: note = tr|A0A2S8H7C3|A0A2S8H7C3_9BURK Tryptophan halogenase; OS = Massilia phosphatilytica OX=2026176 GN=C5614_13170 PE=4; SV = 1
MVKDRWIAKVVILGGGTAGWMTAAALTHTFGRAVEVVLVESDAIGTVGVGEATIPPIRTFHQMIGIDEAEFIRATGATFKLGIEFRGWLNERSTYFHPFGAYGVERDIGYFFQYWLRLKEKGQVSDFSEFSLCTLAARSNVFAPASERPGDPLQHLQSAYHFDAGRYVKFLKGVCIARGVSHKIGDMLAAERDPENGFITGLKLKSGEVVSGDLFIDCSGMRAMLLGQELGVEYEDWSRWLPMNRACAVPCEQKLALTPYTISTARPFGWQWRIPLQHRVGNGVVYSSEFATDEAAERCLLESLEGEPLAPVNRIRFTAGRRRTPWTRNVVAIGLASGFLEPLESTSIHFIQSSIQRLIRYFPDAGFSPVCAQAFNKEAIREIENVRDFLILHYHATEREDSALWCYVKAMRIPDSLQERIELFRERGQLNLAAEELFQSTSWHAVLLGQGIRPKTYMPTMALQDDAMLANAYSNLERNFKKIVSRLPDHAAYIKEHKLTSAMENR

SEQ ID NO: 83774 - protein, 552 aa, unidentified
  source 1..552: note = Chloroflexi bacterium
  REGION 1..552: note = tr|A0A2D6F9R9|A0A2D6F9R9_9CHLR Tryptophan halogenase; OS = Chloroflexi bacterium OX=2026724 GN=CL696_11235 PE=4; SV = 1
MTTDSNADPNLDLSADVVVIGGGPAGSAAATMLARKGWQVTVLEREQFPRDHVGESLLPASIPILEELGALPAVETASFLPKHGATMVWGSGDAPWSWYFKETSQRYPHSYQVWRPQFDQILLDNAKAQGVTVLEGHQVTEVIFDGDEAIGVEFTNAQGESGEAQCRFVVDASGQSTLLARHLGSKQWDPFFRNLAVYAYFKGAKLLPEPDQNNIFIESYRYGWLWSIPLHTGSTSVGAVVDSTIGQEGIQQNGAKAFLEAQLAQSGHTRAMLENAEMDSEPTVVMDWSYTAEKLYGPGYILAGDAACFVDPLFSSGVHLALMSGVLAAAYVTTALNNASMADEAGQVYQELYLKEYNQFREMARLFYSSNLSAESYFWEARRITDAGAYSPRQSFIQAVAGQPPRGYERVVLDRGQAPEEFVKSVRAVESARQSRTQWLAALASDPQRNQILNAVPRLAEGIQVQRKPVLAEGEFVEGYVLNTVSQPEGTPCSPLVAAVIEEIDGQKSVSDIVDGMGAHLDQAGHAQLEEAVSRTIEILYVDGTVARLITD

SEQ ID NO: 83775 - protein, 493 aa, Sphingomonas sp.
  REGION 1..493: note = tr|A0A196N7F3|A0A196N7F3_9SPHN Tryptophan halogenase; OS = Sphingomonas sp. TDK1 OX=453247 GN=A7X12_01360 PE=4 SV=1
MTDNRIRRIVILGGGTAGWMSAAALSRALAGQRVAITLVESDTIGTIGVGEATIPTIHWFNQIIGLDERQFMAETKATVKLGIEFVGWNGEGSRYFHPFGTFGPPGDGTMFLHRLIRGRADGDTAPTEAYSLTAQAARSGRFARPVPDRRSLLSTLGYAYHFDAGLYARYLRGLAERAGVTRMEGMVGSVQQDGEGGFVRSLTLDDGRVVEGELFLDCSGMRGLLIEETLGVGYDDWSHWLPCDCAWAAPSAAETRLTPFTRATAAEAGWRWRIPLQHRVGNGYVFASRFQDEAAARASLLAALEGPPLADPRLIRFTPGMRREAWRANVVAIGLSSGFLEPLESTSIHLIQSGIAKLLSLFPAADCSPLLARQFNRIFGQEMLDIRDFLIFHYHATAGREEPMWRERQAMAIPQTLTERLAHFRNSGRIVLSSDELFRDASWFAVLDGQGECPGDYNPLIEGVHVQDNLRQLGALRSDIGRAVEALPALSRP

SEQ ID NO: 83776 - protein, 502 aa, unidentified
  source 1..502: note = Thalassotalea sp.
  REGION 1..502: note = tr|A0A099LB97|A0A099LB97_9GAMM Uncharacterized protein OS=Thalassotalea sp. ND16A OX=1535422; GN = ND16A_3631 PE=4 SV=1
MSTEHRPLKSYVIVGGGTAGWISAAVLSHTLQNTGVSITLVESPDIPTVGVGEATIPSFVDLLSFLNISKQDFITKTNATFKLAIKFVDWHQQGQDYWHPFGKIGSKIDGKEFYQHWLKSNIHGGKFALTDFSPAIAMAKENRFFIPDPKNPNNLSSSAYALHFDAGLAAKFLAEYAQAKGVKLIKAHVHDVEQHEDGRIKSLNLNNVQQITSDFFIDCSGQRSLLMQKTLRVGFDDWQHYLPVNSAAVMQTEKMSILAPYTESTAHENGWRWRIPLQNRTGNGFVFSQDFCSDQQAIDLLTSTVTEKPINDPKIMRFTTGKSKRFWYKNCLSVGLSSGFLEPLESTGIHLIMKGILNFVQMLPDHNLADVTQNEYNRLMDAEYDSIRDFIVLHYCVSKRNDSAFWKMWQHTAIPDSLQNKLALFKSQGRLMRNDLDLFASDSWYAVLEGMGVTPNSYDPTVDASNFKLIQKILTESETALRNNVQQLMTHDEYITRLLTST

SEQ ID NO: 83777 - protein, 496 aa, Hyphomonas sp.
  REGION 1..496: note = tr|A0A2D8W0W4|A0A2D8W0W4_9RHOB Tryptophan halogenase; OS = Hyphomonas sp. OX=87 GN=CMF04_01495 PE=4 SV=1
MQKVRKVVIAGGGTAGWITAAALSRMLGPLLDITLVESDDIGTVGVGEATIPTHRTFHHLMGIDEREFMRATKATFKLGIAFENWGGIGDAYIHSFGQVGKPSWMGEFYNIWMAAREKGIGEELDAYCFELQAAKHNKFYTDEKFNINYAYHLDASLYAKFLRTFSEGKGVKRVEGLIGEVEQDGESGFITALKLKSGERIEGDFFVDCTGFRGLLIEQTLKSGFEDWGHWLPTDSALAVQTRSVGPALPYTRSIAHQSGWQWHIPLQHRVGNGLVFCSQYMQPDEAEQVLRNNLQGELLGEPRLIRYKTGRRQKVWSKNCVALGLSSGFLEPLESTSIHLIQIGASRLVQQFPFSGVSEAIANHYNEQSTRELERIRDFIILHYKVTERDDSAFWRDRRDMDIPDSLAQRLDVFRENGLAYQATDDLFRVDSWLQVMMGQRLMPKGYHHMGHMMTEDQMQRALGGLSSGIANTVAKMPTHQEFIDRYCAIEAEPA

SEQ ID NO: 83778 - protein, 526 aa, unidentified
  source 1..526: note = Thalassotalea sp.
  REGION 1..526: note = tr|A0A099KPL3|A0A099KPL3_9GAMM Uncharacterized protein OS=Thalassotalea sp. ND16A OX=1535422; GN = ND16A_1751 PE=4 SV=1
MTDIHKDDLVKEVVIIGGGTAGWLTACHLAKKHGSNTPQGLRVTLIESPNIPTIGVGEGTVPSILESLRYFGISETDIIRECDATFKQSIKFVNWMKPKGNSHNNYYHHPFDYIDSNQFDLTPYWLNGQFEGHSYTDTIGIQSYVSDLHLAPKLMTHEEYAGINGYAYHLDAAKFSQLLTRHAVEKLGVKHVLAEVKDIRLTDCGAIDSVVTDNQGEFFADLFVDCTGFSSLLLGQTLGVNFISKNDVLFADHALAIQVPYTDPNQTIPSYTISTAQEAGWIWDIGLSERRGTGYVYSEKYSSHARAEQVFRDYLRQSIGDKVDELPCRRIEMNVGYREKFWVKNCVAIGLSQGFVEPLEATGLLIFDDTAKMLAELLPSKMSTMPIIAERFNKSGRYQWDRVIDFIKLHYYLSDRDDTPFWRDNRSQESTPQKLLDNLALWRERPPSDYDFITKQEVFYRTNYLYVLYGMAFNTDISAIAYRYTEQGKAEQKHSLILQQKAKVQGMLLPHRELLQRIKQYGLQKI

SEQ ID NO: 83779 - protein, 498 aa, Alteromonas sp.
  REGION 1..498: note = tr|A0A4V6WLX7|A0A4V6WLX7_9ALTE Tryptophan 7-halogenase OS=Alteromonas sp. HB161718 OX=2565549; GN = E5672_06670 PE=4 SV=1
MNSPIHIVIAGGGTAGWMAANYFAHKWPSGKVNITLVESSDIGIIGVGEGSTPTLKRFFDELNIQENDWMPKCNATYKVSIQFKDWSPGSGINQYRHPFISQTDTFTQRAFEVNCRTRRLGLDTHVTPEDFLINGVLAQQNKAPLTPDNFPFRMEYGYHFDSALLGNYLREVAVGKGVTHINAIISNVALYPRGDISHLVTDKGIIKGDFFVDCTGFSSTLLQQSLGVKFNSYSENLFNDSAVVLPTRVQENIKVETQSTALSNGWCWTIPLQNRTGNGYVYSAAHLSKDQAEEELRRHLGLESTDVEARHLKMKVGQVGQHWHKNCLALGLSQGFIEPLEATALHLVQICIEYFSDMFEKSGFSTKESSNYNSFAKERFDRVRDYIVAHYKLNTRDDSDYWRDNRNNMVMSDSLKSIISTWFSREDLATEIKRQNIGMHWDSVSWHCLFAGYGAFPPLEKNQPGRGDLYKEQNIERFIQGCALNFKHNNSVLEELMR

SEQ ID NO: 83780 - protein, 483 aa, Sphingomonas sp.
  REGION 1..483: note = tr|A0A196MSH8|A0A196MSH8_9SPHN Tryptophan halogenase; OS = Sphingomonas sp. TDK1 OX=453247 GN=A7X12_04750 PE=4 SV=1
MRDGGGRMSLRRILVVGGGMVGWSAAAALKRRLPHLDITILPIAPPADALADRIASTLPSILGFHSDLGIGLGDAVLRTGGQYRLGTLFRDWVAGAPDYVHAYGRTGTPIGGAPFHQLWARAALASAAPPFDTLSVAAMMARSGSFVTPQADGLLSEHSFGLTLDIPRYTAMLMAFARHVGVQGHLGEVAHVEQDVRGDIAAVVLEDGARITADLYCDCTGPAARLHGAIAVPREDWQAWLPCDRVVLEEVAGEDEAAPMERVTATDHGWRWVGTRQRGTVYCAAFGATDASAVAFRSGATLAPWRGNVVAIGDAAVSVEPLEWSNLHLAHSAIDRLIAMLPAGRPHPLEAAEYNRQALAEARRVRDFLVLHYATARRDTPFWQARAQTGLPDSLAHTLRLFRERGRLPYYEEETFDRESWLAVLFGQHVLPRRIDPLTDAVPPAEAAAAMTSLQQRIAQEIERVPAAARFRALQLERLHERA

SEQ ID NO: 83781 - protein, 507 aa, Hyphomonas sp.
  REGION 1..507: note = tr|A0A350ZRD0|A0A350ZRD0_9RHOB Tryptophan halogenase; OS = Hyphomonas sp. OX=87 GN=DCY26_06800 PE=4 SV=1
MTDKRVRKILIVGGGTAGWMTAAVLAKLLKNDYADIHLVESEEIGTVGVGEATIPQIGTFNRTLGIDETDFVKATQGSFKLGIEFVNWGALGERYIHPFGAYGLDMDGVSFHAFFLKHHAARYGPETMDQYNLQALAARQNRFMRPVNAGNSPLSKIAYAFHFDASLYARYLRKYSEARGVTRHEGKITSVSLHPETGYVQHVQLTDGRILDADLFVDCTGFRGLLIEQALKAGYNDWSHWLPCDRAVAVPCENAERLTPYTRSTAREAGWQWRIPLQHRIGNGHVWSSAFTTEERATEILMSNLDGKALDAPRHLRFLAGHRKKFWEKNCVAIGLSAGFIEPLESTSIHLIQSGVAKLMQMFPSGGFNQPDIDRYNRVTTFEYERIRDFIILHYHLNRRDDSELWKYTQNMPVPDYLTDKMALFESHGRIFRENEELFNDTSWFAVMIGQGLKPRDYDPVADVQSAEETAARLTNIRDTIATSATYMPTHEQFIEENCDARTYVPA

SEQ ID NO: 83782 - protein, 509 aa, Caulobacter vibrioides
  REGION 1..509: note = tr|A0A290MGA8|A0A290MGA8_CAUVI Tryptophan 7-halogenase OS=Caulobacter vibrioides OX=155892; GN = CA606_01210 PE=4 SV=1
MTPSPIRNVLIVGGGTAGWMTAAALAKALPKTIAVTLVESETIGTVGVGEATIPPINTFNQILGLDEAAFMRATKGSFKLAIEFVDWMGPGHRYLHPFGGFGLDIEAVKFHQVWLRAHHEGWAPPIDAFNLSAQAAHLNRFAPPSKDPGQVLSSLKYAFHFDAGLYAKFLRDYAEPRGVTRVEGKIASVQQHGETGFVTGVTLEDGRALEADLFVDCSGFRGLLIEQTLQAGYDDWSHWLPNDRAVAMPCVTGGDGLTPYTRATADAAGWRWRIPLQHRTGNGYVYSSRDISDEDAVARLRATLDGEPLAEPNFLRFQAGRRKAAWVKNVVAIGLSSGFLEPLESTSIHLIQAGITKLLALFPDQGFDPVEIAEYNRLTALQVELIRDFIILHFKANARSEPYWVRAREMEIPETLQRKIDLFAASGRLFPSDLDLFAEPSWIAVLLGQGVTPRRHDPLVDAFDEAFLKNQLSRLAGLIRQTAEALPTHEQFIARYCAAPHASRPEFRA

SEQ ID NO: 83783 - protein, 504 aa, unidentified
  source 1..504: note = Sinorhizobium saheli
  REGION 1..504: note = tr|A0A178XWY0|A0A178XWY0_SINSA Uncharacterized protein OS=Sinorhizobium saheli OX=36856 GN=ATB98_04815; PE = 4 SV=1
MIDLTNAKRVGIIGGGIVGWLAAITLARVFGSDVDVTVIEAPAVFPLGLGEGGSPNLIDTLCRNDLDLDVFIGEAGANYKHGVLYDNWLGRGVPDRYYHLFGGRGIPGLEYRVNGFFPRLSARIAMGQDLHTCIPGFKAIARNASQQEIDELVATGESGLYLSYHFDDADFERYLKRVGLARGVTSYAAKECWIRLDDRGHVCALQLQGEQFKVDFAVDASGLARMGLGSAFKPGWRSFASVLPTDRAITFDLQPKESSLRSLTRSTAMTAGWTWEVPLNRTTSAGCVFSSRHADDSMVMAEVQHRFGYGVQRKHELSFDQGYFETVWVNNLVALGTATGFVEPLGAALAAHTFEQLRNLERTLTNGGGIVPAHAIEAFNSANAKSWTGVRDFLRLHYDSKRNDTPFWRDLSEADLPKSYAELRACFQKRTPRHIDIEPYVGSGWQSLFHQIDWISVAAPLGVVPAAAARAELSQLPLEWQCEDHPDLLEGAMSTIRPRSGWVH

SEQ ID NO: 83784 - protein, 795 aa, Methylobacterium sp.
  REGION 1..795: note = tr|A0A2U8HTD1|A0A2U8HTD1_9RHIZ Tryptophan halogenase; OS = Methylobacterium sp. DM1 OX=2067957 GN=C0214_13460 PE=4; SV = 1
MFRSERSAPPRLVVAGGGPAGWMAAFYLKRVLRRAGWSVTLVGAAPAAGTPVALATRPSFTRFLNGFDIDEAIFMRRCAATYRLASRYDDWFAEGEGHWHPFGACGPSIAGRDLFHYWMKLRGAGAEDEAGSYSDYAPQALMAAAGRGPRPEAERSSLTESGEYGYHLDRAALVRFLRELALAEGVRAVSGRVSGIERDLYGDVAALVLDAGQTVEGDIFLDCTGAASQLIGTALGEAWNAGSGPGDRLVRLSRPRLPEAPPFTAYRGRAEGWTASLPLADRTEHHFVYDSRVTSPDAATEILQRAFDGKGGLAHAELRYGRRAAPWQRNVVALGAAAGAVEPLVGFDLDLVLAGLEAFLAYLPRQGEGGDVLRRAYNARANRFHDDAAEAMAAHYVLGRRPDRFWANARAMTIPDRLADRLDLYELAGHVAPGEDTLFGEGDHYLLFSGAEFLPRRPFAPVDVTDGREVARLLASIRAQSGRVAQAMAPHARLIEALHGPAPAAAAAIHVMAAEAPAGPASLRGTPAGARLADLVAGLGQPFGYERSVKATPAGLQTERFLVSLHRTSLGLAPGKTLDDLVMRLGMPEQERAEAADLIADADILHLGYEDGPSGALYKLYVEWSSRTDAAWSGADETGVEPMLVHRAYKWRPEGGHPPIVTLYHWPQVRSPEDIEARLSRIADAWGAAGTPVLDTARAILRLARERGRGSVHYLEAREEPGQRLSYDLNLYACGLSVAEAEPLLGQAFVDLGIPPQAAAAVLGERLQETLGHVAGGVGRDGQPFLTVYSGKAGA

SEQ ID NO: 83785 - protein, 496 aa, Colwellia sp.
  REGION 1..496: note = tr|A0A2N1BZK2|A0A2N1BZK2_9GAMM Tryptophan halogenase; OS = Colwellia sp. 75C3 OX=888425 GN=CXF85_13460 PE=4 SV=1
MNNLSEVKNVVIAGGGTAGWMAATALAKLIGNNLNITLVESDAISTVGVGEATIPPLLTFHKMLKIDEAEFMSSVNATFKLGINFENWKDTSSEYFHSFGTTGRDCWATTFLQFYHRSKKEGYQAKYEEYCLELQAGLNEKFAHLPNSGLKYAYHMDATLYAKFLRNISEKHGVNRVEGKIEQVNIDENSGFIKSLTLLSGQTIAGDLFIDCTGFRGVLIEQALHTGYDDWSHWLPCDRAVAVQTESTEEPKPYTRSIAHESGWQWKIPLQNRTGNGLVYCSKYLNDENAEKLLLENVEGKLLKKPLFIKFTPGQRRKHWNKNCVALGLSSGFIEPLESTSIHLIQRGIIRLMQMFPKTGITDSVINEYNYQSEEEIRYIRDFIILHYHVTNRNDSNFWRYCSKMDVPSSLSHRIELFKEHGYVFKAPWDLFAENSWIQVMLGQGLSPQSHHPIADMLSVDEQELFLGGIKNSIEKTVKSLPTHKQYLDQYCKSKI

SEQ ID NO: 83786 - protein, 538 aa, Burkholderia pseudomallei; identical to SEQ ID NO: 82926
  REGION 1..538: note = tr|A0A0E1TX10|A0A0E1TX10_BURPE Tryptophan halogenase PrnA OS=Burkholderia pseudomallei 576 OX=557724; GN = BUC_7018 PE=4 SV=1

SEQ ID NO: 83787 - protein, 520 aa, Pseudoalteromonas piscicida
  REGION 1..520: note = tr|A0A0F4NRU8|A0A0F4NRU8_PSEO7 Uncharacterized protein OS=Pseudoalteromonas piscicida OX=43662; GN = TW75_18895 PE=4 SV=1
MNLKEISKVVIVGGGTAGWIAACHIAKKLNPNENDNISITLLDSPDIPTIGVGEGTVPVIKDTLKYFGIKESDFISQCDVTFKHSIKFVNWCHNPSAVEEDFYHHLFDFPNIRPFDVTPHWLLNKDLASKKYADLVSVQSYICAKALPPKRLSDKEFSGLFNYAYHLDAGKFTELLRQHAIHKLGVKNLKCNVTKANLNEEHFIESLELGNGERMKGDFFVDCSGFQSLLIEQSLGGKFIDKGSELLADTALAVQVDYDTPNATIKPYTTSTAQKYGWIWDIGLTTRRGIGYVYSSKYQTEESARSTLLNYIDDSKMLSQVRKLPMKVGYQQTPWINNCVAMGLSQGFVEPLEATGLLMFDVTARMFAEAFPSDVENITLRQKRFNEDVTQMWESTTDFIKLHYYLSKRDDSAFWIDNRNENSLSNELKEKLQLWRAKIPSQFDFRSNLDLFRVSNYLYVLYGMNYYTHLSIQPPSGEASALSKLLEDIQKGVSYCSNNLRGHRETLEHIKRSVAHVGQK

SEQ ID NO: 83788 - protein, 552 aa, unidentified
  source 1..552: note = Chloroflexi bacterium
  REGION 1..552: note = tr|A0A2E6PJN8|A0A2E6PJN8_9CHLR Tryptophan halogenase; OS = Chloroflexi bacterium OX=2026724 GN=CL767_00750 PE=4; SV = 1
MTTDSNADPNLDLSADVVVIGGGPAGSAAATMLARKGWQVTVLEREQFPRDHVGESLLPASIPILEELGALPAVETASFLPKHGATMVWGSGDAPWSWYFKETSQRYPHSYQVWRPQFDQILLDNAKAQGVTVLEGHQVTEVIFDGDEAIGVEFTNTQGESGEAQCRFVVDASGQSTLLARHLGSKQWDPFFRNLAVYAYFTGAKLLPEPDQNNIFIESYRYGWLWSIPLHTGRTSVGAVVDSAIGQEGIQQNGAKAFLEAQLAQSGHTRAMLENAEMDSEPTVVMDWSYTAEKLYGPGYILAGDAACFVDPLFSSGVHLALMSGVLAAAYVTTALNNASMADEAGQVYQELYLKEYNQFREMARLFYSSNLSAESYFWEARRITDAGAYSPRQSFIQAVAGQPPRGYERVVLDRGQAPEEFVKSVRAVESERQSRTQWLAALASDPQRNQILNAVPRLAEGIQVQRKPVLAEGEFVEGYVLNTVSQPEGTPCSPLVAAVIEEIDGQKSVSDIVDGMGAHLDQAGHAQLEEAVSRTIEILYVDGTVARLITD

SEQ ID NO: 83789 - protein, 503 aa, unidentified
  source 1..503: note = Massilia phosphatilytica
  REGION 1..503: note = tr|A0A2S8HF84|A0A2S8HF84_9BURK Tryptophan halogenase; OS = Massilia phosphatilytica OX=2026176 GN=C5614_04655 PE=4; SV = 1
MQVPHLNTIVIVGGGTAGWMTATALATALRGRYRIRLVESDEIGIVGVGEATIPMIQRFNTVAGIDEAEFLKATNGTFKLGVEFVNWGRVGDRYTHGFGRLGQDLWMVGFEQYWHKMRAQGQARDLADYSITRAAARANKFMLPRTDLGNSPLGEITYAYHFDAGLYARHLRKLSESRGVERTEGKIVRVTQRAHDGHVDAVVMENGERIEGDLFIDCSGFRGLLIEQTLEAGFEDWSHWLPCDRALAVPCESVAPLTPYTRATAHKSGWQWRIPLQNRIGNGHVYCSRYISDDEAAHVLLSNLDGKPLADPRPIRFTTGMRKKAWDKNVVAIGLSSGFLEPIESTSIHMIQDAIQRLLDYFPDQGFSATDVDAFNRLSRFHYERIRDFIILHYHANQRDDAAFWQECARMEIPATLREKIDLFRTHGRLRRVDSELFTEVGWLQVLVGQNIHPHAYHPLVDVQSEEGIRDYMEGVADVIRQCVDFMPDHARFIAEYCKAPPM

SEQ ID NO: 83790 - protein, 504 aa, Pseudoalteromonas piscicida
  REGION 1..504: note = tr|A0A3B6Y2I2|A0A3B6Y2I2_PSEO7 Tryptophan 7-halogenase OS=Pseudoalteromonas piscicida OX=43662; GN = D0N37_11165 PE=4 SV=1
MKSQKIVILGGGTAGWMAANMMAKSWADKAIEITVVESSSIGTIGVGEGSTPQFKGFMDYLGISEAEWMPACNATYKNGIRFIDWSTKPGFSRYFHPFPAQPDDYSAPAFFHNSFVRRKAIDVEGHPDHFFLATHLADLNKSPIAAESFPFEINYGYHFDSALLGQLLARKAAEFNVKHIDATITDVRKHVDGDIAALITSDGTEISGDIFIDCSGFKSLLLQHTLGVGFESFESNLFNDAAVVIPTKQLDTIRSETQSVARQFGWSWHIPLTNRIGNGYVYSQRYCDADQAETELRAALGLLESEVEARHIKMKVGQVKAHWSKNCIAIGLSQGFIEPLEATALHIVQETVQSFIECYQNADFTDADRDKHNRALSERYQAIRDYIVAHYRVNSRTDTNYWLDNAHNNNLSRSLYQILQTWVSGNNLSDELVRQNVEQYYPSVSWHCLLAGYGIYPDQAQLKSGNALANQHSIEKVNDFIRRCGLNFRDHRMELESFAANVHK

SEQ ID NO: 83791 - protein, 503 aa, unidentified
  source 1..503: note = Alphaproteobacteria bacterium
  REGION 1..503: note = tr|A0A257EQ99|A0A257EQ99_9PROT Tryptophan halogenase; OS = Alphaproteobacteria bacterium PA4 OX=2015572; GN = CFE37_02680 PE=4 SV=1
MTAPAGDRAIRTIAIVGGGSAGWMAAAALSRALGAAIRIDLIESDEIGTVGVGEATIPPIKLFNQQLGIDEAEFMRATQASFKLGIEFVNWGQQGQRYFHPFGTYGAEFDTVPLHQHWLRQRALGQAPPLDDLSMAWAAARRNRFAPPARDPRLVQSTFDYAYHFDAGLYAAFLRRQSEARGVVRHEGRIASVSRHPETGHVAGVTLGDGRTLAADFWVDCSGFRGLLIAGALGTPDEDWSHWLPCDRALAVPSERGDFTPYTRSTAHSAGWQWRIPLQHRTGNGYVYCSRHISDDEAAATLLANLDGRPLADPRPLRFVTGRRAQAWRGNVVAIGLAAGFMEPLESTSLHLVQSGLQRLIALFPDRDCDPLVSAEFNSLTRTEWERIRDFLILHYHLNSRTDAALWRDCAAMPIPDTLAHKIAHFGAWGRLVSDGPELFLNPSWLAVHIGQGHVPRAHAPIVDTRDGVDAARHLAGLARVMAEAAEAMPTHADFVATHCAAG

SEQ ID NO: 83792 - protein, 498 aa, Sphingomonas sp.
  REGION 1..498: note = tr|A0A196MT03|A0A196MT03_9SPHN Tryptophan halogenase; OS = Sphingomonas sp. TDK1 OX=453247 GN=A7X12_04755 PE=4 SV=1
MNEHSIRDVVIVGGGTAGWMAAAAFSRVLNNGYTRITLVESDEIGTVGVGEATIPPILRFNQMIGLAENQFLAETGGTFKLGIEFVDWGALGDRYFHPFGNYGQDLEGIPFHQLYLRERARRPLPEIAAWSMSAVAASLGRFGRPAATAQSPIRDLFYAFHFDAGLYAQLLRRLAESRGVSRVEGKVVTVAQRSEDGFVQSVALADGRVVAGDLFIDCSGFRGLLIEDALQTGYEDWRRWLPCDRAIAAPCANVGEPTPFTRATAREAGWQWRIPLQHRTGNGLVYCSDYLEDDAAERQLLGSLEGSPLAAPRRLRFTTGRRRALWSHNVVALGLAGGFLEPLESTSIHLIQSGISRLIALFPDKRFDPIEREEYNRQMGTLYDDVRDFIILHYKATSRTDSPFWDRCRTMDIPDSLAQRIALFESKGRLFREGHELFSSPSWVAVCMGQHIVPSDHEPIADALDEDLVAQALDQMQRGYRETAERLPTHGEFLRRCT

SEQ ID NO: 83793 - protein, 499 aa, Hyphomonas sp.
  REGION 1..499: note = tr|A0A2D8EJG6|A0A2D8EJG6_9RHOB Tryptophan halogenase; OS = Hyphomonas sp. OX=87 GN=CME98_03530 PE=4 SV=1
METQNIRRVVIAGGGTAGWIAAASLSRLLGPLLDITLVESDAIGTVGVGEATIPTHRTFHHLMGIDERDFMRATKATFKLGIAFEEWGGLGDRYIHSFGQVGKSNWMGEFYNIWMYAQERGIGAELDAYCFELQAAEAGRFFTSDKANINYAYHLDASLYAKFLRTFSEAKGVKRVEGLIEEVEQDGESGFITALKLQSGERIEGDLFIDCTGFRGMLIEQTLKTGYEDWTHWLPTDSALAVQTRSIGPAQPYTRAIAHHAGWRWRIPLQHRVGNGLVFCSENMQPDEAKEYLLGHVDGEPLTEPRLIRYKTGRRKKVWSKNCVALGLSSGFVEPLESTSIHLIQVGATRLVQQFPFAGISEAIANHYNEQAERELEKIRDFIVLHYKLTERDDSDFWRARRDMPVPDSLAQRISLFRENGLAYQATDDLFRVDSWLQVMLGQRLKPKGYHHMGHLMTDDQLMTALGGLEANISKAVSQMPSHQDFIDQYCAVPESEAV

SEQ ID NO: 83794 - protein, 507 aa, Pseudoxanthomonas sp.
  REGION 1..507: note = tr|A0A0Q8EAA2|A0A0Q8EAA2_9GAMM Tryptophan halogenase; OS = Pseudoxanthomonas sp. Root630 OX=1736574 GN=ASD72_14410; PE = 4 SV=1
MTDHPNRIRSVVVVGGGSAGWMTAAALATYLGKQASIRLVESEEIGIVGVGEASVPYMKQFNSGLLGIDEFEFVARTQGTFKLGIQFNDWGSIGESYVHGFGKIGQGIGPLPFHQFWLKLFLAGRARPIGEYSLPTLAAPLGKFMASPANAPPDSPLADIAYAYHFDAALYAGFLREVSERRGVQRIEGKITGVQQRSEDGFIEAVVLDSGEQVTGDLFIDCSGFRGLLIEQTLKTGYVDWTHWLPCNRAMAVPCATVEPPTPYTRSTARAAGWQWRIPLQSRVGNGYVYSSEYISDDEAAATLLANLDGRALADPRPLRFTTGMRRKLWNKNVVALGLASGFMEPLESTSIYLVQSGIQRLLGLFPDRDFDPMLERQFNEESAFEYESTRDFLILHYCATRRSDSAFWDYCRTMPIPDTLQRKIEMFRHGGRYFRTGDEFFALPSWVQVMLGQGIVPTGYHPIVDDMPEQALIEHVARVHQSIANSVGAMPPHQAFIDRHCRASAM

SEQ ID NO: 83795 - protein, 520 aa, Streptomyces sp.
  REGION 1..520: note = tr|A0A429I0N9|A0A429I0N9_9ACTN Tryptophan halogenase; OS = Streptomyces sp. WAC 06783 OX=2203211 GN=DMH18_26900; PE = 4 SV=1
MLTNVVIVGGGTSGWMSASYLKAAFGDRLSVTVLESKRIKTIGVGEATFSTVRHFFDYLGLPEHVWMPKCNATYKLGIRFENWHRKGSYFYHPFERLRVVDGFPLTDWWLHRKPGNSERFDQDVFLMSAICDAERSPRYMDGTLFEQDFKEQTDPKDRKPERSTLTEQDTQFPYAYQFDASLLADYLCAYSTERGVRHIEDDVVEVARDDRGWIGHLRTREHGDVTADLFIDCTGFKGLLLNEALEEPVISFQDTLPNDRAVALRVPVDMEKRGLRPCTTATAQDAGWIWTIPLFGRIGTGYVYASDYTTPEEAERTLREFVGPDAKDVEANHIRMRIGRSRNAWVNNCVAVGLSSGFVEPLESTGIFFIQQGIEQLVKHFPGADWNPQLRDSYNRAIGNTIDGVREFLVMHYRGAGRNDNQYWKDAKTRALPDGLAERLDMWRSKLPTTETIFPNYHGFEPYSYHSMLLGLGGVDLKAPPALALMDDSAAQAEFKLLRAQSQELAKRLPSQYEYLAQMH

SEQ ID NO: 83796 - protein, 501 aa, Streptomyces albus
  REGION 1..501: note = tr|A0A0X7JFZ2|A0A0X7JFZ2_9ACTN Tryptophan halogenase; OS = Streptomyces albus subsp. albus OX=67257 GN=ADL21_26840; PE = 4 SV=1
MPAPSEEFDAVVVGGGPGGSTAAALIAMAGHRVLLLERERFPRYQIGESLLPSTVHGIGRLLGVEEELHEAGFMRKRGGTFRWGSAPGTWTFSFADAPGLGETGGYAYQVERMRFDALLLDHARRVGADVREECAVRAIHHHDGRVTGLTYRSPEGTEAEVRARYVIDASGNTGRLHTAAGGRRVYSPLFRNIAVFGYFEGGRRLPPPNQGNILCAAFDTGWFWYIPLTDRLTSVGAVVNREHADQVQGNPEQALAKLVNQCALVRDHLADARRVTEGTYGRVRVRKDYSYCNTRFWAPGVALVGDAACFIDPVFSSGVHLATYSAMLTARSVNSVLGAGMDEGRAFGEFEARYRREYTVFHDFLAAFYSMQAPKDTYFWQAHKVTGGQAGALASFINLVGGLASGDRVLIDADQLTGRLATASRVLDETADGYQADPAGDPWDESPMLAETFAQSDALAGQGVARGDFAEKTPQFPGGLVATADGLHWAEPAGEPPGGTP

SEQ ID NO: 83797 - protein, 503 aa, Caulobacter vibrioides
  REGION 1..503: note = tr|A0A258D7W7|A0A258D7W7_CAUVI Tryptophan halogenase; OS = Caulobacter vibrioides OX=155892 GN=B7Z12_10110 PE=4; SV = 1
MTNDHRLRRIVIVGGGTSGWMTAAALGRFLKDGYTKVTLVESEAIGTVGVGESTIPQINIFNRMLGLEENEFVKKTKATFKLGIDFVDWKEIGHSYHHPFGPYGVDMEGVSFHAYWLKLRAMGLDDDLGAYSLQTVGARQSKFMRPNGQANSPLGQIAYAFQFDAGLYAKFLREYSEARGVTRQEGKIASVQQDGQSGHVTSVTLESGQVIEGDLFIDCSGFRGLLIEQTLKTGYEDWSQWLLNDRAVAMPCTLGGSMAPVTRATARPHGWQWRIPLQHRLGNGYAYSSQHVSDDEALADLLSQLDGEPLADPNLIRFTPGRRKKSWNGNVVAIGLSAGFMEPLESQSIYLIQVGISRLLAHFPDRHFRQADIDRYNRTMAFEYEKIRDFIILHFKATARSDTPYWDYLREMPIPDYLADKIDLFKGSGRVFRENDELFNDTSWFAVFIGQGIYPEGYDPMVDNMDEGLFKARMAEIKSVIAKSAEVMPGHMEFIRENCAAEG

SEQ ID NO: 83798 - protein, 424 aa, unidentified
  source 1..424: note = Gammaproteobacteria bacterium
  REGION 1..424: note = tr|A0A2N1XHW4|A0A2N1XHW4_9GAMM Tryptophan halogenase (Fragment) OS=Gammaproteobacteria bacterium HGW-Gammaproteobacteria-7 OX=2013803 GN=CVV17_01220 PE=4; SV = 1
MSDNRIRTLVIVGGGTAGWMAAAVLAKAFGPSLSIRLVESEEIGIVGVGEATIPQIRLINQFLGLDEDAFLRASQGTFKLGIQFNDWSRLGDSYLHAFGETGLPVGVLGFHHYWLRGLHAGRPERYWDYSLNTRAALANRFGRLDAIGQTPLAGIRYAFHFDAGLYARHLRSYAEQRGVQRTEGRIVDVALRDPDGFIDAVVLDGGERVAGDFFLDCSGFRGLLIEGALKAGYAQWTDWLPCDRAMAVPSARVEPMRSYTQANAQVAGWQWRIPLQHRTGNGHVYCSRYLSDDEAASILLANLDGEALDDPRPLRFTTGMRKRFWHRNCLAIGLSSGFMEPLESTSIHLIQTAISRLLALFPDRDFDPLVIAEYNRISALEYERIRDFLILHYHAVQRSDAPLWRQTAHMAIPDSLQRKLDHFR

SEQ ID NO: 83799 - protein, 510 aa, Streptomyces sp.
  REGION 1..510: note = tr|A0A429IEN3|A0A429IEN3_9ACTN Tryptophan halogenase; OS = Streptomyces sp. WAC 06783 OX=2203211 GN=DMH18_08065; PE = 4 SV=1
MGERAVANSANAGNPANPETYDVVIVGGGPAGSTLGALVARQGHRVLILEKEFFPRYQIGESLLPSTVHGVCRLTGVADDLAAAGFTRKRGGTFRWGATPEPWTFSFSVSEHMAGPTSYAYQVERSKFDEILLRHAGRCGAEVREGCAAADVIADEERVRGVRYTDADGAEREAYGTFVIDASGNKSRLFQRVGGQRTYSEFFRSLALFGYFEGGKRLPEPNSGNILSVAFDSGWFWYIPLSPTLTSVGAVVRREMAEKIQGDQEEALRALIAECPLISEYLANARRVTTGQYGQLRVRKDYSYHQTTFSRPGMLLVGDAACFVDPVFSSGVHLATYSGLLAARSINSVLAGLVDEAVALREFEARYRREYSVFYEFLLSFYEMHHSEQSYFWQAKKVTHHKRSEMEAFVDLVGGVSSGETALTDADAMAERLRADSAEFAGAVDQLAHSEDGSMLPLFKSSVVSQVTREGSQVQMRALLGADAEPETPLLPGGLVSSPDGMFWLPASSG

SEQ ID NO: 83800 - protein, 505 aa, unidentified
  source 1..505: note = Unknown
  REGION 1..505: note = tr|A0A0N1LMC9|A0A0N1LMC9_9PROT Tryptophan halogenase; OS = alpha proteobacterium AAP38 OX=1523418 GN=IP70_12795; PE = 4 SV=1
MMQAKALDITIVGGGTAGWMTAALLAKATKGRLGRITLIESAEIGTVGVGEATIPPIQFFNQLLGIEERDFVARTQASFKLGIEFRNWTRTGHSYIHPFGSYGANIDAVSFHHYWLRARALGDGTDIGDYCPAIVAARQGRFAPEIPQGPASAPLLSYAYHFDAALYAAYLRDFATGLGVTRIEGRITGIRQRAEDGYITALDLADGGSVGGDLFIDCSGFRSLLLGQTLGVGFKDWSRWLPCDRALAVPCEGGRDITPYTRSTAHTAGWQWRIPLQHRIGNGHVYSSAFMSDEEAEGLLLGHLDGRPLADARPLRFTAGRRDKAWVRNVLGVGLAGGFLEPLESTSIHLIQTALFRLLALMPTDIRDQATRDEFNRLSEIEYEQIRDFLILHYNATERDDSDFWNYCRTMPIPDSLRHKIDLFRARGRVARFDGQLFAEASWLAVFLGQGVDPVGYDPMADIMPAGELQQRLSRHRDYVQRAVATMPAHRDFIDRHCKAPATAA

SEQ ID NO: 83801 - protein, 547 aa, unidentified
  source 1..547: note = Chloroflexi bacterium
  REGION 1..547: note = tr|A0A2D8PIN0|A0A2D8PIN0_9CHLR Tryptophan halogenase; OS = Chloroflexi bacterium OX=2026724 GN=CL702_02950 PE=4; SV = 1
  VARIANT 10: note = Xaa can be any naturally occurring amino acid
  VARIANT 33: note = Xaa can be any naturally occurring amino acid
  VARIANT 72: note = Xaa can be any naturally occurring amino acid
  VARIANT 239: note = Xaa can be any naturally occurring amino acid
  VARIANT 250: note = Xaa can be any naturally occurring amino acid
  VARIANT 341: note = Xaa can be any naturally occurring amino acid
  VARIANT 476: note = Xaa can be any naturally occurring amino acid
MTAHEQSPDXVVIGGGPAGSTAATMLARQGVSXLLLERERFPREHIGESLLPASIPILEELGVLPAVEAAGXLTKWGATMVWGSDPTPWSWYFRETNQRNPHSYQVWRPQFDQLLLENSRAHGVDVREGHRVLEVLWQDGKATGVRYQSDDGETGTIQCRYVVDASGQTGLLARDLNLRQWDPFFQNLAVYGYFRGAHPLPEPDETNIFIEAHPHGWLWSIPLHTGWTSVGAVVDSATXQNEISTGSLDXFLQAQIDQAPHTSKMLRDAHLESGPFIVKDWSYVCERVAGDGYVLAGDAACFVDPLFSSGVHLALMSGIMAAAYVTSALKDPEIVEAAAAXYHELYLKEYGHFREMARLFYSSNLTSDSYFWEARRLLEDAGNFTPRQAFIQAVAGQPPRGYERAVLEQGQAPLEFASSVRQVESERERRRVRWEAALSGTDNGDPIMAAVPRLAPETQIQRKPVLGAGEFVWGTXLTTVSQPEGIPCSGLISAMVSQIDGARTVAQLLDELASLGEPSQADQIRQTALAALGILYVDGTVEELGGL

SEQ ID NO: 83802 - protein, 510 aa, Streptomyces albus
  REGION 1..510: note = tr|A0A0X7JQ09|A0A0X7JQ09_9ACTN Tryptophan halogenase; OS = Streptomyces albus subsp. albus OX=67257 GN=ADL21_09150; PE = 4 SV=1
MGERAVANSANAGNPANPETYDVVIVGGGPAGSTLGALVARQGHRVLILEKEFFPRYQIGESLLPSTVHGVCRLTGVADDLAAAGFTRKRGGTFRWGATPEPWTFSFSVSAHMAGPTSYAYQVERSKFDEILLRHAGRCGAEVREGCAAADVIADEERVRGVRYTDADGAEREAYGTFVVDASGNKSRLFQRVGGQRTYSEFFRSLALFGYFEGGKRLPEPNSGNILSVAFDSGWFWYIPLSPTLTSVGAVVRREMAEKIQGDQEEALRALIAECPLISEYLANARRVTTGQYGQLRVRKDYSYHQTTFSRPGMMLVGDAACFVDPVFSSGVHLATYSGLLAARSINSVLAGLVDEAVALREFEARYRREYSVFYEFLLSFYEMHHSEQSYFWRAKKVTHHRRSEMEAFVDLVGGVSSGEAALIDADAMAERLRADSAEFAGAVDQLAHSEDGSMLPLFKSSVVSQVTREGSQVQMRALLGADAEPETPLLPGGLVSSPDGMFWLPAGSG

SEQ ID NO: 83803 - protein, 504 aa, unidentified
  source 1..504: note = Unknown
  REGION 1..504: note = tr|A0A0N0K865|A0A0N0K865_9PROT Tryptophan halogenase; OS = alpha proteobacterium AAP38 OX=1523418 GN=IP70_18640; PE = 4 SV=1
MKPLNKIVIAGGGTAGWITAAMLSFMTKGTGTTVELVESDEIGTIGVGESTIPPFVVLLRSLGIDEQDFIKSTNASFKLAIRFEDWFKKNQHYYHPFGTLGGLIDNHEFYQCWLRAKAAGHTSELQDFAAATVMADQMKFLLPFKAPRTMIASASYALHVDAKRVAQYLRRYAEERGVTRTEGRINRVRTRPDGAIAGLDLANGKVVDGDFFIDCTGFRALLIGQTLGVGYVSWADELLCDRAVAVQTENTDDDADVHPYTLSQAQDCGWRWRIPLQHRAGNGYVYSSRFLSDDEAVATLMRQVKGRPLIEPNIIPFKTGMRAKMWEKNCVALGLAAGFIEPLESTAIHLVYRAVDYLFRFFPDGDIDPSLQAEFNRRVAAEYEEVRDFIVLHYCTTQRDDTPFWRAAQRTPIPASLRARMDLFKATGILRQGLEELFGAASWQSVYEGMGVRPARYQPFVDKVPMSVITETLDRSAPLLKAQVAGLPHHAQFLRDHCRAERDF

SEQ ID NO: 83804 - protein, 526 aa, Sphingomonas sp.
  REGION 1..526: note = tr|A0A4R2TAR8|A0A4R2TAR8_9SPHN Tryptophan halogenase; OS = Sphingomonas sp. PP-F2F-A104-K0414 OX=2135661; GN = C8J46_104513 PE=4 SV=1
MATNTGPEATSDHPITNIVVVGGGTAGWLAACLIAARTDRGAGHPLEVTLIESPDVATIGVGEGTWPTMRRTLERIGITETDFLLACDASFKQGSRFDGWRTGAPDDSYLHPFTAPVDGDPRDIVAAWAEHGGQFANSVGAQGEICHRDLAPRQRAMPDYAGTLNYAYHLDAGKLAALLTRHATERLGVRHVRDHVVGIDSTEHGDIAAVRTRASGAIVGDLFLDCTGHAALLIGGHYGIATIDRGGELFNDRALAVQMPVAPDSAIASQTNATAHAAGWIWDIGLPTRRGIGCVYSSAHLSDDAAAETLERYIRTTSPGVAPPIFRQLKFQSRHRERFWERNCLAVGLSAGFLEPLEASAIVLIELSLDALLDNFPATRRAMDIHATRFNTLFRYRWDRIVEFLKLHYVLSERDEPYWLDHRDAASIPPRLAELLTLWRHQPPSRADFPMIDEIFPAASYQYVLYGMGFPVPTRGPIATTDRARTETLLAQVDQRKRMLAAGLPTNRAYLDALRHATAPAMELSA

SEQ ID NO: 83805 - protein, 512 aa, Xanthomonas translucens
  REGION 1..512: note = tr|A0A1C3TU86|A0A1C3TU86_XANCT Uncharacterized protein OS=Xanthomonas translucens pv. translucens DSM 18974 OX=1261556 GN=BN444_01661 PE=4 SV=1
MIAAPLRNLVIVGGGTAGWMAAAALARVLGPDYRITLIESEQIGIVGVGEATVPHIKAFNNLLGINEAEFVRQTQGSFKLGIEFVDWQRPGTSYIHGFGTEIGHSLGLLPFQQYWFKQALAGKAKPLGAYTLNTVASRRGKFMTSASDAPPNSPLGNIAYAYHFDASLYAAFLRHFSEQRGVTRHEGIVEQVQLHPESGDVLSVRLASGDTIAGDLFIDCSGFRGLLIEQALHTGYHDFTHWLPCDRALAVPCAKVGPPTPYTRATARAAGWQWRIPLQHRTGNGYVYSSAHISDDEAAATLLANLDGAALADPRPLRFVTGRRKQVWNRNVVALGLASGFMEPLESTSIHLIQSGISKLLELFPREGISPVLVQRYNDRIAFEFDRIRDFLVLHYTATERDDSDFWRQCRTMAITPELQATLDLFGDSGRFYRNGDEMFAEISWVQVMVGQGILPRGAGRPAARRAKKRGHAHQGAGLFKIRPKPENGLWRISGKAGRCACYRQCEANAMV

SEQ ID NO: 83806 - protein, 503 aa, Rubrivivax sp.
  REGION 1..503: note = tr|A0A3S3S8U4|A0A3S3S8U4_9BURK Tryptophan 7-halogenase OS=Rubrivivax sp. ICH-3 OX=2499835; GN = ENE75_22465 PE=4 SV=1
MGDTRLKKVLIVGGGTAGWMSAAVLVHSLGRQYEVQLIESDEISTVGVGEATIPSIIRFNDLIGIDENEFMRRTQATFKLGIQFRNWGAQGDAYIHGFGSMGRKTGLVDFHHYWLKAFQAGRVDRLDDYSINLLACETNRFSRADPSNPNSPLADIRHAFHFDAGLYARYLRGYCEQRGVTRTEGRIDSVQVHPETGFVTSVTMANGDVHAADLFIDCSGFRGLLIEQTLRTGYDDWSHWLPCDSALAVPCESVEPLLPYTRATAHGAGWQWRIPLQHRIGNGHVFCSRFMSQDEATAILLGNLDGKALAEPRLIRFTTGKRKKFWHKNVVAIGLASGFIEPLESTSIHLIQQGIVRLVELFPSQGFLQADIDEYNQQSTTEFEQVRDFIVLHYHATQRRDTPFWEYCATMDVPDTLRRKIDLFRANGRFFRQNDELFNETSWVQVMFGQGIRPQGYHPLADNTADEPTWRMLDNVRTVMHRVVERMPTHAQYIAQHCKAAAG

SEQ ID NO: 83807 - protein, 516 aa, unidentified
  source 1..516: note = Novosphingobium sediminis
  REGION 1..516: note = tr|A0A512APH7|A0A512APH7_9SPHN Tryptophan halogenase; OS = Novosphingobium sediminis OX=707214 GN=NSE01_34380 PE=4; SV = 1
MNDRVRQIVIVGGGSAGWIAAARIAAAHRPDGDNGVSVTLIESETIGTIGVGEGTWPTMRNTLRKIGISETEFFRSCDAAFKQGARFTGWVTGKPGDSYYHPLNPPQAATQINLSAHWLRRQDGAGTDFAHAVDFQSALCDAGLAPKSISTAEYVGLANYAYHLDAVKFAALLKKHCIEKLGVRHVIDDVTGVKLDDAGFVTGVEARETGLLSGDFFIDCTGFAALLIGQTYGVPFVDCGDVLLADNAVALQVPYEHEDDPVASQTNSTAQDAGWIWDIGLPTRRGTGYVYSSRHTSHDEAEATLRAYLGPVAEGLNTRRIPIRSGHRQRFWEKNCVAVGLANGFLEPLEASALMLIETAVDFIVDRLPQSRAVMAPLARQFNAAFEHHWARIIDFLKLHYVLTKREDTAFWRDNRDPATVPDRLLEQLELWRHLPPGPQDFPHQPEVFSWPSYQYVLHGMGFECNLAAGSQVTAEAALAQRCFMATQRQQEQALAALPSHRALLDAVRVHGFQAV

SEQ ID NO: 83808 - protein, 498 aa, Pseudoalteromonas haloplanktis
  REGION 1..498: note = tr|Q3IL46|Q3IL46_PSEHT Uncharacterized protein; OS = Pseudoalteromonas haloplanktis (strain TAC 125); OX = 326442 GN=PSHAa1353 PE=4 SV=1
MNNKITNVVIAGGGTAGWITAALLNKVLGNVINITLVESDQIGTIGVGEASIPPISHLNGALGINEHEFINATQATIKLGIEFENWREQNHKYMHAFGSIGKDFPFCEFHHFWLKAKQQNHAPDLWDFSVNYQAAKAGKFAHLRNLPNTQLPGLHYAYHFDATLYAKLLKKLAQQRGVKRVEGKIKSVQQCQQSGDIQALTLESGSVIKGDLFIDCTGLSALLIEKTLNTGFEDWSHWLPCDSAVAVQSESANEPVPYTRSIAQNAGWQWQIPLQHRVGNGLVFSSRYLTDDEAKQQLLANLPGKAITEPRVIRFKTGRRRLQWHKNVVAIGLSSGFLEPLESTSIHLIQTAAIRLIKLFPHNGIKHSQVTTYNLQSKTEIERIRDFIILHYKLTTRTDSAFWRQCQQMSIPETLQQKITLFKQTGKLIREDDELFAEPAWQQVMIGQGLEADDYHPLANALTDEQLLALFSDLKALINHTVEQLPSHSEFLSRMKNN

SEQ ID NO: 83809 - protein, 498 aa, Sphingomonas koreensis
  REGION 1..498: note = tr|A0A1L6JDI8|A0A1L6JDI8_9SPHN Tryptophan halogenase; OS = Sphingomonas koreensis OX=93064 GN=BRX40_17105 PE=4 SV=1
MTEKRPTRVVIAGGGTSGWMAAAAISRTMGRTVDLTLVESEQIGTIGVGESTIPPLVNFNRILGIGEAEFMAAAQATFKLGILFDNWKHDGHSYFHSFGLSGKDHWSAGFQHFWLYARSRGFPEPYDDYCLELAAAMQGKFAHLPQDRMNYAYHVDATLYGRYLRKLAEESGTKRVEGKIQRVELNGETGDIAALHLDGERRIEGDVFVDCTGFRGLLIEGALHAGFEDWGHWLPNDSAIAVQARHLGPPQPYTQAIAHDAGWQWRIPLQHRMGAGIVYSSGYLSRDEAHHRLISAVGEPLIEPFDIKFRGGVRRKQWYRNCVAIGLSGGFVEPLEATTVHLIQRAVLRFVRLMPNGRVSERDAAEFNEQQRQDIEQIRDFVILHYKATDRRDSAFWRHVAAMPVPDSLSQKIELFRETGRTFRKNEELFAENSWVQVMMGQGIDPQSWHPIAEKLSDEELMRLMSTLREDVTRTVATLPEHHTYVAQYCGAADPLAA

SEQ ID NO: 83810 - protein, 503 aa, Sphingomonas koreensis
  REGION 1..503: note = tr|A0A430G3X0|A0A430G3X0_9SPHN Tryptophan 7-halogenase OS=Sphingomonas koreensis OX=93064; GN = DAH66_09195 PE=4 SV=1
MTMGRPFELVIVGGGTAGWMCAAACAAKLVPTGVRVRLVESEEIGTVGVGEATLPQMKDFNDFLGLDEVEFMKATQASFKLGIEFVNWGHEGHRYIHPFGTYGRPVGEADFFSYWIRARRAGIASRLDDYCFPIVAAWQNRFMLPNGDPNDARNAFAYAYHLDAFLYARYLRGWAEARGIERVEGRIVDVERDGGSGAIAAVKLASGEPVAGDFFIDCSGFRSLLLGSMLGVELENWSHWLPCDSAQAVPCARSRDFTPYTRSTRRKAGWQWRIPLQHRTGNGYVYSSAHVSDDEAAATLLANLDGEALAEPRVLRFKAGKRRLAWSHNCIGMGLAGGFLEPLESTSIYLVQMAIMHMLTLLPSTEGIDPALPAEFNRVMDVEYDRIRDFLILHYIANEADAPLWAHVTAVDLPDTLQDKIDRFRHRGHVQAYRDGLFGPPSWQAVFVGQGIEPLAADRLADVLPAEALAQRLEMLASTIARGAGSAPSHADFIARYCPAPAL

SEQ ID NO: 83811 - protein, 503 aa, unidentified
  source 1..503: note = Amphiplicatus metriothermophilus
  REGION 1..503: note = tr|A0A239PWF1|A0A239PWF1_9PROT Tryptophan halogenase; OS = Amphiplicatus metriothermophilus OX=1519374; GN = SAMN06297382_2183 PE=4 SV=1
MNDDPIRSVLIAGGGTAGWMAAAVLARAFGASLSIRLVESEEIGTVGVGEATIPQIRHINNFLGLDENAFLRETRGTFKLGIQFNNWARLGDSYIHAFGDIGLPLGLSPFHHYWLRAQAEGKRAPLWDYSLNAEAAKNNRFSRLERVGDSPLAGIKYAFHFDASLYARYLRRYAEARGVERLEGRIADAARRGENGFIEAVVLENGKRLEADFFIDCTGFRGLLIEGALEAGYEDWTRWLPCDRAVAVACRHGGAMRPYTQATAQRAGWQWRIPLQHRVGNGHVYCSAHIGDDEAAAVLLSNLEGEPLDEPRFLRFTTGMRRKMWVKNCVALGLASGFMEPLESTSIHLIQSGLGRLVSMFPDRRFNPALIAEYNRQSRFEFERIRDFLILHYHANQRTDSAFWRECAAMSVPDALAAKIELFRGAGRIYREHEELFTEVGWLQVMLGQHVRPERYHPAADGLAPQKLDGFLGDIRILIERAVEAMPRHEDFIARHCAAPAPA

SEQ ID NO: 83812 - protein, 505 aa, Pseudoalteromonas sp.
  REGION 1..505: note = tr|A0A0W1KP97|A0A0W1KP97_9GAMM Tryptophan halogenase; OS = Pseudoalteromonas sp. 10-33 OX=1761890 GN=ATS76_12185; PE = 4 SV=1
MNDVNNIKSIVIVGGGSAGWMTASALAKVIGCDNCQITLVESEDIGTVSVGEATIPQIQLFNTILDIDESEFIRFTNATFKLGIEFIDWKEKGHRYFHPFGNYGTNMEALPFHHFWLKMQDEPAFSNLSNFSLASVGAYANKFMHPSTQQNSPLAGINYAYHFDATLYAKFLRNYSTSRGVSRIEGKVDEVMLNPVSGMIESLILNDNTVLNGDLFIDCSGFKGLLIEQALKTGYEDWTHLLPCNKAIAMPCLSKKTLNPYTQSTAQSVGWTWRIPLQNRVGNGYVYSSEFMSDDKAHALLFNKLESDPLADINQLQWVTGMRKKSWNKNCIAIGLSAGFVEPLESTGLHLIQSAIAKLMTLFPSKDFAQCDIDLFNQQTETEYHRIRDFIILHYKLTNRDDSEFWRYCKNIDMPDSLKQKIAMFSENGRIFRHDNELFNETSWLAVMHGQGIKPKSYHPLVDRLNPDEIKRRLKNIESVISRSADVMPDHEAYILKNYTPNDTF

SEQ ID NO: 83813 - protein, 415 aa, Pseudomonas fluorescens
  REGION 1..415: note = tr|A0A379J1V8|A0A379J1V8_PSEFL Tryptophan halogenase; OS = Pseudomonas fluorescens OX=294 GN=kmo PE=4 SV=1
MPTVEMERRQVVVIGAGPSGAIAAALLKRNGHDVLIIEREHFPRFSIGESLLSHCIDFIEEAGMLEAVNAAGFQLKTGAAFAWGERYSAFDFGDTFSDGKPTTFQVQRADFDKLLADQAALQGVEIRYGQTLVGVDFAAGHRYLHVRRENGREYHIKAGFVLDASGYGRVLPRLLNLEAPSNFPLRQAVFTHVQDRIEHPGFDRSKILITTHPTQRDIWFWTIPFSNGRCSVGVVAAKEHFAGCDGDLDACLRRFIAQTPSLSSVLANAVWDTPARTIGGYSANVTTLHGPGFALLGNAAEFLDPVFSSGVTIAMRSASMAAGLLHRQLKGESVDWQTEFAVPLKRGVDTFRCYVEGWYAGTFQDVIYHPGSSPEIRRMISSILAGYAWDERNPFVSEPKRRLRMLSEICTAENL

SEQ ID NO: 83814 - protein, 518 aa, Pseudoalteromonas sp.
  REGION 1..518: note = tr|A0A0W1KQZ7|A0A0W1KQZ7_9GAMM Tryptophan halogenase; OS = Pseudoalteromonas sp. 10-33 OX=1761890 GN=ATS76_10460; PE = 4 SV=1
MNQQNKKIKTVVVVGGGIAGWLTAGRLAAHHKSNTPDGLNVVLVESPNVPIIGVGEGTWPTMRSTLIALGISETDFIRECEASFKQGAKFAKWVDGSDDDFYYHPLVLPQGFSKTDMAGHWLNNTAESTSFSSAVCYQEAICEQGLAPKTIRTPEYAAIANYAYHLDSAKFAVFLQKHCTQQLGVKHFLADVTQVNSAKNGDIASVTTNQQGEISGDLFVDCTGFSSLLLGEHYKVPFKPCDDVLFIDTALAVQVPYENDDESIASHTISTAQEAGWIWDIGLQHRRGVGYVYSSKYSSEAQAREKLKAYVGDKIESLTVRKIPIKSGHRSHFWQNNCVAVGLSAGFLEPLEASALVLVEMSAQMISEQLPHTRDIMDITAKRFNETFTYRWEKIIDFLKLHYILSNRDDNAFWRDNRDPKTIPQSLQDLMKLWQYRAPADHDFTSNNEVFPAASYQYVLYGMGFKSDYSTTAYMLKDTVFAKSQFDKNKSMINQAVTNLPSNRELLNKIKLHGFSAI

SEQ ID NO: 83815 - protein, 510 aa, Sphingomonas koreensis
  REGION 1..510: note = tr|A0A2M8WBJ6|A0A2M8WBJ6_9SPHN Tryptophan halogenase; OS = Sphingomonas koreensis OX=93064 GN=BDW16_1582 PE=4 SV=1
MADPMSQRSIVIAGGGTAGWMTAAALARFCGSGWTITLVESDAIGTVGVGEATIPMIRLFNQALGIDEAEFLRETHGTWKLGIEFDGWGVPGERYMHAFGQVGRGLGLLPFHHYWLRARAAGRAGPLGNYVLNDIAAKANRFGHVERAADSVLPAMPYAFHFDAGLYAAYLRRYAEARGVARIEGRVERVERDGENGDVTTLVLAGGVRVAGDLFVDCSGFRGLLIEGALETGFEDWGHWLPCDRALAVPCERADPLIPYTRATARKAGWQWRIPLQHRTGNGYVFSSAHISEDEAASVLLANLDGAPQAEPRVLKFRAGKRRKAWNRNVVAIGLSSGFLEPLESTSIHLIQSGITRLLDFLPNGRVADADRDAYNRMTDFEIERIRDFVILHYFANRREGEPMWDALRYMDLPEPLADRIAMFRACGRIVREHDELFDVPGWIQVLAGQGIVPERWHPLADELSAEQLDQFLSTVADAYARDAARLPGHADYLTRFCGAPSTLSQSSIA

SEQ ID NO: 83816 - protein, 501 aa, unidentified
  source 1..501: note = Marinimicrobia bacterium
  REGION 1..501: note = tr|A0A2E7VYC2|A0A2E7VYC2_9BACT Uncharacterized protein OS=Candidatus Marinimicrobia bacterium OX=2026760; GN = CMG34_04045 PE=4 SV=1
MRPVNRVVIVGGGSAGWLTAAYLVENMHSATEILLVDKKVSDPIGVGEATILNFKQFMYDCGFKPEQWIPEIDATFKCGILFKDWQEEGVNLWHPFAFPMFKNLDTDLLTLWTMFKEKDFFTHACALYHPGVTENKVDPENIGTYAYHIDCGKLVNWIRNQLLKKIQLVEHEVVSVDRNDRGGINHITIDTGEDIPSDIFIDCTGFKRLIGPEPDSVDCQDRLFCDTAIAGRFDYRNKAIEQNPYTTCAAVEHGWIWKTPTQERVGSGLVFNKSVSDVDEVKESFCKYWDGRVTSDELRVLDWTPYYHKNFWTDNVVTIGLSAGFIEPIESTGIALISSGAMEFVESCRGSFYDELIIKGYNHQMTSFYESCIDFVNMHYAYNKRKTGKFWKYVQDTFKPSDKLLHYENEVLNNPVRLPSNGNYMFAGDNWSMFLCQMLDKDQIVSKQTKKVPPWDADALIRDFAWNEQQKHVNSILHAKFIDQCLVKIRKGESLNIPYNG

SEQ ID NO: 83817 - protein, 505 aa, Streptomyces rimosus
  REGION 1..505: note = tr|A0A0N0S938|A0A0N0S938_STRRM Tryptophan halogenase; OS = Streptomyces rimosus subsp. pseudoverticillatus; OX = 1464079 GN=ADK70_27345 PE=4 SV=1
MSASYLKAAFGDRLSVTVLESKRIKTIGVGEATFSTVRHFFDYLGLPEHVWMPKCNATYKLGIRFENWHRKGSYFYHPFERLRVVDGFPLTDWWLHRKPGNSERFDQDVFLMSAICDAERSPRYMDGTLFEQDFKEQGDPKGRKPERSTLTEQDTQFPYAYQFDASLLADYLCAYSTERGVRHIEDDVVEVARDDRGWIGHLRTREHGDVTADLFIDCTGFKGLLLNEALEEPVISFQDTLPNDRAVALRVPVDMEKRGLRPCTTATAQDAGWIWTIPLFGRIGTGYVYASDYTTPEEAERTLREFVGPDAEDVEANHIRMRIGRSRNAWVNNCVAVGLSSGFVEPLESTGIFFIQQGIEQLVKHFPGADWNPQLRDSYNRAIGNTIDGVREFLVMHYRGAGRNDNQYWKDAKTRALPDGLAERLDMWRSKLPTTETIFPNYHGFEPYSYHSMLLGLGGVDLKAPPALALMDDSAAQAEFKLLRAQSQELAKRLPSQYEYLAQMH

SEQ ID NO: 83818 - protein, 496 aa, Sphingomonas koreensis
  REGION 1..496: note = tr|A0A1L6JG05|A0A1L6JG05_9SPHN Tryptophan halogenase; OS = Sphingomonas koreensis OX=93064 GN=BRX40_06925 PE=4 SV=1
MALSARPVRRIVIVGGGSAGWMTAAALGRALAGQSYSITLVESEAIGTVGVGEATVPPILDFNRYLRIDPDEFLRETNGSIKLGIEFEDWGGAGHRYFHPFGFFGVEMSGIHFHHFWLRHVAEVGPLDHSEYHLEAMALREGRFARMTRTGPVHHAVHFDASLYARFLRGRAEASGVVRVEGKVVHVRLDPENGYIDALALDDGRTIEGDLFIDCSGFRGLLIEGALETGYESWNHWLPCDSAVAVPAANAGDPLPFTRSTAREAGWQWRIPLQHRDGNGYVYSSAHLPHAEAARLLSERLPGPAQADPNFLRFTAGHRRKIWNRNCVAIGLAGGFLEPLESTSIHLIQTTIIRLLALLPRDGIDPNVVARFNRESLHEYRTIRDFVIAHYALAGRDDTPFWRDVAATGVPDTLAERIEAFRATGNILFEPGDLFGPTNWYWVMTGQGVWPRSWHPIADGLSSAELTARLAVLRGRVAEQLAELPPHVEFLRRLSA

SEQ ID NO: 83819 - protein, 512 aa, Sphingomonas koreensis
  REGION 1..512: note = tr|A0A1L6J706|A0A1L6J706_9SPHN Tryptophan halogenase; OS = Sphingomonas koreensis OX=93064 GN=BRX40_04120 PE=4 SV=1
MEAGQTGTGNPPIRRIVIVGGGTAGWMTAALLSKLLFRGYDITLVESDEIGIIGVGEATIPGIKDYNHLAGIDLTEMIRATQATFKLGIEFVNWREPGFRYIHGFGKIGTDLMWLHPHQLWLKLAAMGQAKHFDLYSLNTLAARQNKFCFPDPRNPGSPMGHLDYAYHFDASLYARFLRGRSEAQGVTRTEGRIVEVRQRPEDGFVESVVLADGQTVSGDLFVDCSGMRSLLLGQTLGVGYEDWSHWLPCDRALAVPCESVSPLTPYTRSTAHGAGWQWRIPLQHRIGNGHVYSSAHVSDDEAADVLLANLDGKALADPRPVRFAPGKRHKAWEKNVVAIGLSSGFLEPLESTSIHLIQTGILKLVALFPGQGFNAADIAEYNRQHNFEFDDVRDFIIAHYKVTNREDTPFWAHVRHMEVPDSLAERLELFRASARFFVHGKAELFREESWVQVLLGQGMAMTYDPVVDMIPDEDVIAFMRDIEEVNADVAAAMPTHQAFIDRHCKAPSLLS

SEQ ID NO: 83820 - protein, 493 aa, Sphingomonas sp.
  REGION 1..493: note = tr|A0A1Q4EB14|A0A1Q4EB14_9SPHN Tryptophan halogenase; OS = Sphingomonas sp. 67-41 OX=1895850 GN=BGP17_07120 PE=4; SV = 1
MDQAPIRRVVIAGGGTAGWIAAAALAKLIGPLLEITLIESDEIGTIGVGESTIPTARTFHQLLGIDERAFLRDTRSTFKLGIAFEDWAREGDRYFHSFGQIGKSTWMGDFHHFWLEARAEGWGGELGDYCFELQAARAGRFAIPEQGHINYAYHLDAGLYARFLRDFAEPLGVNRIEGRIERVEQHPETGFVTALRLASGQRIEGDLFLDCTGFRGLLIEQALRAGYEEWGHWLPTDSAIAVQTESVGPAMPYTRAAAHRAGWQWRIPLQHRVGNGLVYARDFLDDDSARALLDARIEGEKLIEPRIIRFKAGRRRTLWDRNVIALGLASGFVEPLESTSIHLIMIAVTRLVQLFPFGGIGEGVAARFNALGRTEIERIRDFIILHYHLNQRADGGFWDRCRTMAIPDSLAERIAAFRDGAVAWQASDDLFRVDSWVQVMLGQRLEPRSHHHMGRMIVDGELRTALGALRSGIARTVAQMPAHQQFLERYTAA

SEQ ID NO: 83821 - protein, 503 aa, Sphingomonas koreensis
  REGION 1..503: note = tr|A0A1L6J8D7|A0A1L6J8D7_9SPHN Tryptophan halogenase; OS = Sphingomonas koreensis OX=93064 GN=BRX40_06915 PE=4 SV=1
MTMGRPFELVIVGGGTAGWMCAAACAAKLVPTGVRVRLVESEEIGTVGVGEATLPQMKDFNDFLGLDEVEFMKATQASFKLGIEFVNWGHEGHRYIHPFGTYGRPVGEADFFSYWIRARRAGIASRLDDYCFPIVAAWQNRFMLPNGDPNDVRNAFAYAYHLDAFLYARYLRRWAEARGIERVEGRIVDVERDGGSGAIAAVKLASGEPVAGDFFIDCSGFRSLLLGSMLGVELEDWSHWLPCDSAQAVPCARSQDFTPYTRSTRRKAGWQWRIPLQHRTGNGYVYSSAHVSDDEAAATLLANLDGEALAEPRVLRFKAGKRRLAWSHNCIGMGLAGGFLEPLESTSIYLVQMAIMHMLTLLPSTEGIDPALPAEFNRVMDVEYDRIRDFLILHYIANEADAPLWAHVTAVDLPDTLQDKIDRFRHRGHVQAYRDGLFGPPSWQAVFVGQGIEPLAADRLADVLPAEALAQRLEMLASTIARGAGSAPSHADFIARYCPAPAL

SEQ ID NO: 83822 - protein, 516 aa, Pseudoalteromonas sp.
  REGION 1..516: note = tr|A0A0W1L526|A0A0W1L526_9GAMM Tryptophan halogenase; OS = Pseudoalteromonas sp. 10-33 OX=1761890 GN=ATS76_04025; PE = 4 SV=1
MTKPIKKIVILGGGTAGWLSAGLLAAEHPHLSVTLIESANVPILGVGEGTWPSMRNTLQRIGIKEIDFITQCDATFKQGSKFINWRNLNKGENYYHPFMDPQGYEQTNLHASWQRIAPNQKFADVVNMQSFVCQAALAPKQLQTPEYAAVTNYGYHLDAGKFAEFLKNHGVKNLNVTHITDDVTHVINDEHGYIASLKTNKNGDITGDLFLDCSGSRARLIGEHFNSEFIAQDHILFNNSAVAAQVPNAHINQPIASATLSTAQSNGWIWDIALPTRRGTGYVFSSKYQSDESATDTLKSYIAESTSEQQAEQLNYRVLKFSPGYRQKFWIKNCVAVGMSAGFLEPLEASALAMVELSISMLSEQLPQNRTHMSQLANRFNDRFSTRWQRVVEFLKLHYVLSERDDTPYWQNIRDLTTAPERLQNLLKLWQFQPPSRFDFIENEEVFSSSSYQYVLYGMGFNTQTVSAQNAFNDPRAGDYYYQQNREKIAQYLKGLPSNRALLNDLLSNNRQPHND

SEQ ID NO: 83823 - protein, 505 aa, Massilia oculi
  REGION 1..505: note = tr|A0A2S2DIR4|A0A2S2DIR4_9BURK Tryptophan halogenase; OS = Massilia oculi OX=945844 GN=DIR46_12900 PE=4 SV=1
MEQKSNGEGGLKGRPIRRVVIAGGGTAGWMAAACISKVLGKRLDIKLIESDEIGTVGVGEATIPTLINFHNLLEINEQEFMAATKATFKLGIGFEGWRNVNEDYIHSFGMTGTDHWTAGFQHFWHKGRERGLATDYGDYCLELRAALENRFAHLPRGGMNYAYHLDATAYAKYLRAFSERFGVQRIEGKIVDVTTSALTGHIRSLTLDSGADIEGDLFIDCTGFRALLIGQALGVAYQDWSQWLFNDSAAALQTMSVGDAVPYTRSIAHGFGWQWRIPLQHRVGNGIVFSSRHVEQEQAIGALLANVEGEALMKPRVLRFTPGQRQQVWKGNCIAVGLASGFLEPIESTSIHLIQRSIVRLMQMFPTAGIAPSDVEEYNRQAALEVEHIRDFIILHYKVTNRGDTPYWREARDMTVPASLQHRIDLFRETGRVFRVPNELFAENSWIQVMLGQGITPLQHHQSADLMGDEELAHFLGSIKATVDKTVSQLPSHQQYVARYCATPK

SEQ ID NO: 83824 - protein, 505 aa, Xanthomonas translucens
  REGION 1..505: note = tr|A0A1C3TI37|A0A1C3TI37_XANCT Conserved hypothetical membrane protein OS=Xanthomonas translucens pv. translucens DSM 18974 OX=1261556 GN=BN444_01818 PE=4; SV = 1
MAQIRKVVIAGGGTAGWIAACALAHQFRDLLDITLIESEQIGTVGVGESTVPPIRSFHRFLQIDEQEFLRAVAGTFKLSISFENWRRPGERYIHPFGLTGHSTLVCAFHHFWLEAQRRGMLSELGDYCLETVASRLDRFALQQSPPVNYAYHLDAGLYARLLRGHAERHGLKRVEGKIQQVRQHAESGCVEALLLEDGTLVEGDLFIDCTGFRGLLIEQTLHTGYEDWTQWLPCDRAVAVQTEAVAAPVPYTRAIAHAAGWRWHIPLQHRVGCGLVFSSAHLSDDEARAKLLHDAAAPPIKEPWLVPFRTGRRRKAWNKNVVALGLASGFIEPLESTSIHLTIAAVMRLLTLFPSEGIAPAMVDLYNAVSRAEMEHVRDFIILHYHANQRDEPMWQACREMALPDSLQQRLRAWRERAHAWQGADELFRVDSWIHVLLGQGIVPAQHHPLARALPDQQLQQFLDAIRQPIDRAVAQMPSQQDFIARYCKAGPEVWAGRAPVAAPA

SEQ ID NO: 83825 - protein, 501 aa, Sphingomonas sp.
  REGION 1..501: note = tr|A0A1Q4E5M9|A0A1Q4E5M9_9SPHN Tryptophan halogenase; OS = Sphingomonas sp. 67-41 OX=1895850 GN=BGP17_12930 PE=4; SV = 1
MTDDRNIRSILIVGGGTAGWMTAATFARILGPDYAKITLVESDEIGIIGVGEATIPQMATFNRMLGLDEDQFVRETKGSFKLGIQFVNWGRIGHRYFHPFGRYGLDMKGVSFHAYYLRLRQLGEAPDVDAWSLQAMAARDDKFMRGIDAGNSPLSDIAYAYHFDAGLYARFLRRYAEERGVVRREGRIVDVKLRGEDGFVQSVTMQDGSEIAADLFVDCSGFRGLIIEQALKAGYTDWSQWLPCNRAIAVPCASVDAWTPYTRSTAHAAGWQWRIPLQHRIGNGHVFSSNHMSDDEATAILMANLDGEPLADPRTVPFTTGHRNRMWVKNCVALGLAGGFLEPLESTSIWLIQSGLSRFLTMFPDRDFNQADIDRYNRIMQTDYEEIRDFLVLHYHATERTDSPFWDYCRTMEIPERLAEKMRVFRSHGRAFRENEELFNDTSWFAVMLGQLIEPASHDPVADVMPLDETRARLAHIREAVANSADYMPKHRDFIREHCAA

SEQ ID NO: 83826 - protein, 504 aa, Sphingomonas sp.
  REGION 1..504: note = tr|A0A4R2T685|A0A4R2T685_9SPHN Tryptophan halogenase; OS = Sphingomonas sp. PP-F2F-A104-K0414 OX=2135661; GN = C8J46_107146 PE=4 SV=1
MADQPLRIAIAGGGTAGWMAAATFARFLEMGYEIDLIESDDIGTVGVGEATIPQIHLFNDALGLDEDAFLRATGGTFKLGIEFVDWFKPGHRYMHAFGDVGRDVGLLPFHQYWLRARSLGLAGDLGAYSLNTHAALAERMQRGPARTSRVLPSMPYAYHFDAGLYARYLRRYSETRGVNRIEGKIVRVTRDGESGDVSGLMLENGTTVAADLYIDCTGFRGLLIEEALGTGYEDWTHWLPCDRAIAVPSARSKAFTPYTRSTAHAAGWQWRIPLQHRTGNGVVFSSAHMSEDEATATLLSGLDTPAMADPRTITFRTGRRKQMWNRNVVALGLAAGFMEPLESTSIHLIQSAIARLLKLLPGRVIADADRTEFNRQSDFEYERIRDFIILHYKATTRDDTPFWRECRDMAVPDTLAAKIELWRGSGHIVREHEELFTEVGWLQVLAGQGIVPRGHHPLADAISTADLAEFMDTIDKLNAREAGQMQDHAAFVAQHCAAAAGLAA

SEQ ID NO: 83827 - protein, 510 aa, Stenotrophomonas sp.
  REGION 1..510: note = tr|A0A149QMM7|A0A149QMM7_9GAMM Tryptophan halogenase; OS = Stenotrophomonas sp. DDT-1 OX=1609637 GN=AB839_03490; PE = 4 SV=1
MLDTQSTPSGRIRKVVIAGGGTAGWLAGCALAHQFRDQLQITLVESEQIGTVGVGESTVPPIRTFHRFLQIDEQEFLRAVAGTFKLSISFENWRLPGDRFFHPFGTIGHGTWAAPFHHFWLDSLRRGMPSDLGDFCLESIASRGDRFSLHTQPQASYAYHFDAGLYARFLRGRAEAHGLRRIEGRIAQVRQHAHDGSVQALVLDDGQVIEGDLFIDCTGFRGLLIEQALGTGYEDWHEWLPCDRAVAVQTEAVAPPVPYTRAIAHEAGWRWHIALQHRVGCGLVYDSRHLSDDEAAAKLLRDAGAPPLRDPWKVPFRSGRRLKAWNRNVVSLGLASGFIEPLESTSIHLTISAVVRLIQLFPFDGISASLVQLYNDVSRQEMEHVRDFIILHYHATQRSEPMWKACREMRVPESLQQRLQAWRERAHAWQDPGELFRVESWTSVLLGQGIAPGPAHPLARAVSDADLRTLLKGIQRPVQQAAAQMPAQAEFIAQYCRSGVDVWRSTAASA

SEQ ID NO: 83828 - protein, 362 aa, Advenella kashmirensis
  REGION 1..362: note = tr|I3UHR7|I3UHR7_ADVKW Tryptophan halogenase; OS = Advenella kashmirensis (strain DSM 17095 / LMG 22695 / WT001) OX=1036672 GN=TKWG_25050 PE=4 SV=1
MEILKEADLLQAVNDGGFQIKNGAAFTWGDRESVIDFRDKFTAGPGTTFQVERAKFDQILIQEAQKKGVQVWFGHTVTHMTSTPEHATLSVSTDQDESYTLQARFVLDASGYGRVLPRLLDLEQPSTFPMREAWFTHIQDNISDPAFDREKIVIATHPQDRAIWMWLIPFSHGRCSIGVVGEPSHLAMNGRQPLPFLQAMTNEIPRLRQLLADAQWDTPVNPLRGYSANVTSLYGQRFALLGNAAEFLDPVFSSGVTIAMHSAKLATALIDKTLRGQTADWQTDFADALRVGIDTFRTYVAGWYDCSFQDVIYSRQINQDIRRMIAAILAGYAWDTRNPYVEKSKRRLKALAEICGEAQLDT

SEQ ID NO: 83829 - protein, 480 aa, Burkholderia pseudomallei
  REGION 1..480: note = tr|A3NVJ7|A3NVJ7_BURP0 Putative tryptophan halogenase OS=Burkholderia pseudomallei (strain 1106a); OX = 357348 GN=BURPS1106A_2103 PE=4 SV=1
MHLPNRTQVLVIGGGPAGATGAAFLAREGVEVTLVDKEVFPRYHIGESLLPSCLEILTLMGARDTFDRHGFQRKPGAYFNWKGETWKLDFGELGGTYRYSYQVRREEFDHLLLQHARAVGAQVHEGVSVREILFDDGRPCAALCVAQGAEEATTVEFDYLVDASGRNGLMSTRYLDNRKFHEIFRNVAAWGYWEGLSWPDDCAPGSILVSSIPDGWWWAIPLADRPTSVGVVMHRDAFVAARRTGTLEQVYAQALALSPVMANLTEHARLVTPLKTEQDYSYTCDSFAGNGYFLSGDAACFLDPLLSTGVHLAMYSGMLAAASLASILRAEVTEREAAAYYRDSYRQAYLRFLVFVQTFYEAHGKLGYYSKADELSHYMIEAGDIRRAFLNLVSGLEDIADAEQATSHLMGEMSRRIDQNLALRKDKRALSSTIGSTQVEDNARFFDAIEGLPCLSANMALDGLYVSTRPRLGLQRVAAM

SEQ ID NO: 83830 - protein, 503 aa, Sphingomonas koreensis
  REGION 1..503: note = tr|A0A1L6JG24|A0A1L6JG24_9SPHN Tryptophan halogenase; OS = Sphingomonas koreensis OX=93064 GN=BRX40_06800 PE=4 SV=1
MTEEHGEDAIRTIAIVGGGTAGWMAASYLARTLAHTNIAITLIDSSEIGTVGVGEATVPAIRDFLAVVGLADADVLAATEGTIKYGIHFADWAEPGHRFYHPFGLYGVSARGVPFHQYWLKLRAAGHDLSLEDYCLCTQLAEQGRFLPPPEQPGSELGVFDFALHFDASMFATLLRDLSLSLGVTHIDARIDGVEQAPEDGQVRAVRLADGRSVAADLWIDCSGFRGLLIGEAMGVPFVDWRNWLPCDRAIALGCEPSGAYRPVTTSTARAAGWQWHIPLRHRIGNGYVYCSDYIGDDEAEAVLRANIEGPALGEARRIRFTPGHRASFWKGNVVAIGLAGGFLEPLESTSITLIQSGLERLVRLFPDRRFDPALAALFDRQSQLEFERIRDFLLVHYCLNRREGEPLWDRMRTMELPGHLQGKIDAWRAQGELVRYEWETFQDPSWLSMYAGFGIEPRRYNVRADQFDGAELLATFGRMRTAIDDTVKLGVPAAQFAAALRR

SEQ ID NO: 83831 - protein, 513 aa, Pseudoalteromonas sp.
  REGION 1..513: note = tr|A0A0W1LGD5|A0A0W1LGD5_9GAMM Tryptophan halogenase; OS = Pseudoalteromonas sp. 10-33 OX=1761890 GN=ATS76_15115; PE = 4 SV=1
MSGVINRIIVLGGGTAGWITAGILAKKHASNLSNQGIKVTLIESPEISVVGVGEGTWPTMRKTLAQLGISETQFMRECGATFKQASKFVNWVNAKGDVYYHPFTEPQGFNKVDPAPYWQSVVEPTCSFSEAVSFQQYLCEQGLAPKTIANKEYEVIANYGYHLDAAKFITLLRKHCISELGVEHISDTVERIEQASCGDITCLQTKEHGAQLADLFVDCSGMRSLLLGETLKVPFVPCDDVFLADTAIATQVPYINEHDPIACHTISTAQEAGWIWDIGLQERRGVGYVYSSKHCSEEQARKTLANYVGLEEVKTAKKINFKPGHRKIFWKNNCVAVGLASGFLEPLEASALMLIEASANYIADQLPANKELMPITAKRFNAIMLKKWRGVIDFLKLHYALSERTEPFWLEHRDTQSIPNSLQELLSIWRYSSPSEYDFTDNVEAFSAASYQYILYGVGFKSDFSQMEHIYNQGELAKKQLQMTKIRIDQLKYNLPTHRDLINKVNSLGFAKL

SEQ ID NO: 83832 - protein, 587 aa, Nonomuraea polychroma
  REGION 1..587: note = tr|A0A438MEW4|A0A438MEW4_9ACTN Tryptophan halogenase; OS = Nonomuraea polychroma OX=46176 GN=EDD27_6881 PE=4 SV=1
MEQWSGAMGPGGRTPLDELLETLTQQESAGVKAWLGSGPSWPGAPAGVSPKALTEHHEKVEGDRFRPSDDDPRAIRSVGVIGGGTAGYMTALALKTKRPWLDVTLVESKEIPIIGVGEATVSYMVMFMHHFLGIDPMELYRKVEPTWKLGIKFDWGPDPDGFMATFDWHHHSIGALGALEEDNTVNGFTVQSLMMMADRAAVYKIGDKNVSLMKYLPFAYHLDNARFVAFLTELAAERGVKHVEARLEDVVLNGEEWVDHVRTSDGRQLSYDFYVDCTGFRSMLLGKALGTGFHSYADTLFTDSAVTGNLEHGGHLKPYTTATTMNAGWTWNIPTPQSDHLGYVYASGALSDEEAAKELTEKFPGIEGLRQVRFRSGRHDKAWRGNVMAIGNSYAFVEPLESTGLLMIALAVQTLTSVLPASWEDQAVREVVNRGLGQRWDAIRWFLGIHYKFNTRLDTEFWKDVRDRCDVSGFQPLMELYQNGAPLTRRDPYILDLALGAAPTFFGLAGIDNILLGQKVPARLLKRAEPIEDWRARRKAADALVAKAMTQAEALHAFTTDPELNTQLLNDFDSWAGRHIAGYIGML

SEQ ID NO: 83833 - protein, 481 aa, Sphingomonas koreensis
  REGION 1..481: note = tr|A0A1L6JGX7|A0A1L6JGX7_9SPHN Tryptophan halogenase; OS = Sphingomonas koreensis OX=93064 GN=BRX40_16900 PE=4 SV=1
MTATALAKSLGRAVRITLLESEEIGTVGVGEATIPTIHWFNQFIGLDETAFLSATKASFKLGIEFTDWTRLGHRYFHPFGTYGAQLPGVAFHHRWLKAAREGLDLPLSAFSLASALAEQNRFAKPQGDARSILSTLGYAYHFDASLYAGHLRSIAEAAGVVRVEGLLQDVERESESGFVTALTTQRGERLDGDLFIDCSGFRALLIDKTMGGDFEDWSHWLPCDRAAAVPSARNGAITPYTRSTAREAGWQWRIPLQHRTGNGYVFSSRFISEDEAIATLLANLDGAALAEPRVLRFLAGTRRRAWIGNVVALGLSSGFLEPLESTSIHLIQSGIAKLLTLFPDRDCDPALADRFNRLLNADMDVIKDFLILHYHATERTEPMWVERRAMALPDSLVAREAQYRRSGRLMLDAEELFRETSWLAVLNGQGVIAKGYNPLADTLDPEVNRAQVQQIADVIARAAPTLPLHDDALAEATGSGS

SEQ ID NO: 83834 - protein, 799 aa, unidentified
  source 1..799: note = Methylorubrum sp.
  REGION 1..799: note = tr|A0A4Z0EIE9|A0A4Z0EIE9_9RHIZ Tryptophan halogenase; OS = Methylorubrum sp. Q1 OX=2562453 GN=E4V01_00570 PE=4 SV=1
MFRSERSAPPRLVVAGGGPAGWMAALYLKRVLRRAGWTVTLVGSAPAAGASAALATRPAFTRFLTGIGIDEAIFMRRCAATYRLASRYDDWFAEGQGHWHPFGACGPRIAGRDLFHYWMKLRQESTEEGAEVEAGSYADYAPQALMAAAGRGPRPMADRSSLTESGDYGYHLDRTALVRFLRDLALSEGVRGVAGRVREIERDLYGDVGAVVLDGGQKVEGDIFLDCTGATGQLIGTALGEAWVAGSGPGNRMARLSLPQSPEVPPFTAYRGRAEGWTASLPLADRTEHLYVYDSRTTPPDAAAATLRCAFDSEAGIVDAELRHGRRASPWQRNVVALGAAAGAVEPLLGFDLDLVLAGLETFLATLPRQGDGGDVLRRAYAARLNRFHDDAAEAVAAHYVLGRRSEPFWAAARAVTIPDRLADRLDLYELAGHVALSEEAPFSEGDHYLLFSGADFLPRRPFAPVDVADGREIARLLASIRAQSAQIAEAMAPHGRLMDALHGKVPVAGPSVRIAAASAPVGPAGLRRTPEGARLADLVAGLGQPFGYERSVKASPAGLQTDRFLMSLHRASLGLTPETTLDRLAAGLGLPERERAEAAGLIGGADILHLGYEDGPPGALYKLYVEWSSRTDAAWTGADEAGAEPMLVHRAYKWTPGGTHPPVVTLYHWPRVRGPEEIGARLNRMAGEWGAAGAPARDTAHAILRLAQERGRGAVHYLEAREEPGRRLSYDLNLYACGLTVADAEPLLGQAFVNLGVPREAAARVLRERLQETLGHVAGGVGRDGQPFITVYSGVAGG

SEQ ID NO: 83835 - protein, 525 aa, Luteimonas sp.
  REGION 1..525: note = tr|A0A4U5JM41|A0A4U5JM41_9GAMM Tryptophan 7-halogenase OS=Luteimonas sp. H23 OX=2572684; GN = FCE95_10860 PE=4 SV=1
MAIVRKVLVVGGGTAGWLTATYLARALGAAKPGGIVVELVESPDISIVGVGEGTFPSIRGTLSAIGLDENKFIARANATFKQGIRFEHWARSPGAPGRDHYLHPFSAPSQRPGAPELLPYWLLGYAPKELAFAEAVTMQKRVTDAGRGPKRLSDGPWQAPLNHAYHFDAARFADVLSEHGQRELGIVRRAATIERVELDQTGAIACVHTREQGALSADLYVDCTGFRSLLCGQALGVGWRSAKDVLFNDRAWAMQVPYERKDTPIPSFTIARAHEAGWTWDIGLHERRGVGYVFSSRHTDETRAEQVLRDYLGKAADGLTAKLIKFEAGHRTAPWHKNCVAVGLAGGFVEPLESTGIALIEIAAYLIAHLFPADGDMAPVSKTFNAMMAARYERIFDFIKLHYCLSQRRDTPFWIDNVDAASIPQTLQDKLAMWRCRPPHRLDFISDLEMFLPASWQYVLYGMEFRTDLSAMRGVYDQGESARREFAAVQHVAGLALDDLPAHRTLVEAMARDYETQGDRMPQTA

SEQ ID NO: 83836 - protein, 514 aa, Pseudoalteromonas citrea
  REGION 1..514: note = tr|U1KT69|U1KT69_9GAMM Tryptophan halogenase; OS = Pseudoalteromonas citrea DSM 8771 OX=1117314; GN = PCIT_08458 PE=4 SV=1
MTLKKIIILGGGTAGWLTANHLAKKLNAELGQNVSITVIASDTIPTIGVGEGTVPYIKETLQYFGISEEAIITEAEGTYKQGIKFQNWSEDPIKRGEHAYYHPFEPFPLGQESIIRSWLQEPDKVNFEDYISIQARLAENNLAPKLITHGNYQSFVDYAFHFDAGKFTKLLSNNAITQFGVEAKNAVINRVELNPDGSIHSLVSENEVFEADFFVDCSGFQSDLLSGTLGVGFNDLSDTLLTDKALVTQIPYPQSPEKYDINPYTKAVAQSCGWIWDIQLQTRKGVGLVYSSSHSSIDEAHTLLSDYTGIDKDILNARQIDMKVGYRKQFWKKNCAAIGLSQGFVEPLEATGLLVFDMTASMLSYALAGGGDVLTQSAAKFNRDVETVWLNIVDFIKLHYCISKRRDSEFWIDNCENSKIPDSLSEKLEMWRFRAPNKFDFTSKLNVFTISNYQYVLYGMKHFPEALVNPSPFSNSVYQEMLKSKTMEYEYWADKAQLHSELIDKIIKFGVSKG

SEQ ID NO: 83837 - protein, 515 aa, unidentified
  source 1..515: note = Novosphingobium sediminis
  REGION 1..515: note = tr|A0A512AFW8|A0A512AFW8_9SPHN Tryptophan halogenase; OS = Novosphingobium sediminis OX=707214 GN=NSE01_04410 PE=4; SV = 1
MMTPDPIRSILIVGGGTAGWSAAALLSAVLGPSGCSITLIESSDVPTVGVGEATIPPVFEFLAHCGIDEIEFIRQCQATFKLAIRFDDWLERGHSYWHPFGNLGVTINQRPFHHYWWKNKAAGHGETFADLCPAIALAQDGKFAFPPPDGSYPGGALNYALHFDAGLVAAFLKKHSTARGVAHIDARIAGCELAADGAIAAVQLADGRRIEADFFIDCSGFRGLLIEEALHAGYEDWTRWLPCDRAVAMPTATVGPPAPYTVSAAHEAGWRWRIPLQSRVGNGYVYSSRHVSDEQAAETLRGAAAGEALAEPRFLRFTAGHRKAMWVKNCLAVGLSSGFLEPLESTSIHLIHTALNRLLDYFPDRHCDSALSAAYNREAADEYAHIRDFLLLHYVPNRRHGEPFWDEIRHNPLPDSLAAKLELFRRTGRIVSRRRELFADISWFFVAAGMGIVPEALDPLADAAPFGEVRKVIGQISEVMGRYRQAAPTHQDMLARLLDPALKGRPNFKQTWGGA

SEQ ID NO: 83838 - protein, 503 aa, Microbulbifer sp.
  REGION 1..503: note = tr|A0A2S1JWW4|A0A2S1JWW4_9GAMM Tryptophan halogenase; OS = Microbulbifer sp. A4B17 OX=359370 GN=BTJ40_19755 PE=4; SV = 1
MSSQRKKIIILGGGTAGWITANLMANHWQDKGFEITLVESPDIGIIGVGEGSTPPLKGFMETIGVSEAEWMPACNATYKVGITFRDWSVKPGFTEYVHPFVGQPDQFTIPAFFHNSFLRRKGVELEGHPDHFFLATEMIRQKLSPVAPENFPFEIAYGYHFDSGLLGQFLRRVAETKGVHYKVATVAGAMLDAQGNIDHLKTTDGEVLKADLYVDSSGFRGSLIQQSLKVPFISSAESLFNDSAVVFATDQEKEYAPHTISTAMKYGWAWKIPLTNRNGNGYVYSSRFVDDDKAETEFRAHLGLLNSDVEARRLKFKVGRVAQHWAKNCLAVGLSQGFIEPLEATALDMVQETVVRFIEAYNNGDHTDKFRDDFNNRISARFDAVRDYIVCHYRISSRTDTDYWIVNGANEKISPSLRSILMSWMAGKNITDELLDQKLDVYFPNVSWNCLLTGKGIYPDQEQLRPGNELAHKYKMEEIREFNRRCALNFMSHMDQLNQLRMG

SEQ ID NO: 83839 - protein, 506 aa, Sphingomonas koreensis
  REGION 1..506: note = tr|A0A430G169|A0A430G169_9SPHN Tryptophan 7-halogenase OS=Sphingomonas koreensis OX=93064; GN = DAH66_15930 PE=4 SV=1
MTQRSIVIAGGGTAGWMTAAALARFCGSGWTISLVESDAIGTVGVGEATIPMIRLFNQALGIDEAEFLRETHGTWKLGIEFDGWGVPGERYMHAFGQVGRGLGLLPFHHYWLRARAAGRAGPLGNYVLNDIAAKANRFGHVERAADSVLPAMPYAFHFDAGLYAAYLRRYAEARGVARIEGRVERVERDGENGDVTTLVLAGGVRVAGDLFVDCSGFRGLLIEGALETGFEDWGHWLPCDRALAVPCERADPLIPYTRATARKAGWQWRIPLQHRTGNGYVFSSAHISEDEAASVLLANLDGAPRAEPRLLKFRAGKRRKAWNRNVVAIGLSSGFLEPLESTSIHLIQSGITRLLDFLPNGRVADADRDAYNRMTDFEIERIRDFVILHYFANRREGEPMWDALRYMDLPEPLADRIAMFRACGRIVREHDELFDVPGWIQVLAGQGIVPERWHPLADELSAEQLDQFLSTVADAYARDAARLPGHADYLTRFCGAPSTLSQSSIA

SEQ ID NO: 83840 - protein, 510 aa, Sphingomonas sp.
  REGION 1..510: note = tr|A0A4R2TCX6|A0A4R2TCX6_9SPHN Tryptophan halogenase; OS = Sphingomonas sp. PP-F2F-A104-K0414 OX=2135661; GN = C8J46_101175 PE=4 SV=1
MTDPNPGPIRKVVIVGGGTAGWMAAAAAARYLDDGQRQVVLIESDAIGTVGVGEATIPPILGFNALLGIDERDFLRATGATFKLGIEFVGWDTGDDRYMHAFGGHGRDIQGLAFHQLWLKLRDRPGIGALEEYAPSAVAAYLHKFGQPGGQPPLAYAYHFDAGLYAAFLRRRAEAGGVTRIEGRITGTDRDPLTGHVRAVRLEGGQSVDGDLFIDCSGFRSLLLGETMGVAFEDWSHWLPCDRAVAVPTEPSTPLLPYTRATARTAGWQWRIPLQHRTGNGHVYSSAHISDDEATATLLANLDSKPTAEPRQLRFKAGRRERLWEGNVVALGLAGGFLEPLESTSIHLIQTGISKLFALFPDRGFSAVERDEYNRLMGDAYTSVRDFIILHYHATRRDDSAFWRHVRTMPIPDSLTRKLTLFRKNARIFRYDDELFGISSWVQVLLGQDVVPVGYDPIVDALDADRVADAVRQIRGATLRTAQALPGHGDFVATHGRFEGVPPMRSPVRT

SEQ ID NO: 83841 - protein, 519 aa, Marinobacter sp.
  REGION 1..519: note = tr|A0A1I2ET16|A0A1I2ET16_9ALTE Tryptophan halogenase; OS = Marinobacter sp. DSM 26671 OX=1761793; GN = SAMN04487869_12830 PE=4 SV=1
MNQDEKKIFDVVIAGGGSAGWMAAAFLSEVFKLENSQKYTVTLVESETIAPIGVGEATIQSMRGFLAACGINEGEFLVATDATFKHGILFKEWLHKQGEDELPHQYFHPFEGPMTLAPEPLVSHWLNAKLSGLNSERYDRCSGVQGALAAAGRCPKTWQSSAYEAPINYGYHLDATKFATFLKKISLQKGVKHLLADINGVHLSEKGNISHLDLKSGQHLYGDLFLDCTGFSGLLMKSLDSEFIDYSKYLFCDRAVTIRLPHKSSDYEPRPYTTATARESGWTFEIDLQGRTGFGYIYSSKHCDSATAEEALRRFYPNIVPEQKANHLKMNVGRLKKSWNRNCVAVGLSSGFLEPLESTGLYFVEMELRLLVDYWDPLSKSTACQEQFNDAFNSKFDEAMEFIVLHYVLTKREDSSFWRDVQSQTAELPALKHKLAMWEHKPPTDGDFKNETVLFRAPNYSTVLYGMDWLPEETPVSISHIPPQESLEHFVKLRKLQKMAIEGSPTHSEYLKKYTASFR

SEQ ID NO: 83842 - protein, 497 aa, unidentified
  source 1..497: note = Amphiplicatus metriothermophilus
  REGION 1..497: note = tr|A0A239PQG2|A0A239PQG2_9PROT Tryptophan halogenase; OS = Amphiplicatus metriothermophilus OX=1519374; GN = SAMN06297382_1400 PE=4 SV=1
MSQSRPRKKVIIAGGGTAGWMAAAAIGKTLGKIVDVTLVESDAIATVGVGEATIPTLVTYNRLLGIDEAKFMSAVGGTFKLGIAFENWTDLGHRYIHSFGVTGKDHWTAGFAHFWRRGREMGIARDFGDYCLELVAAERERFAHLPDLGLNYAFHLDSTAYAAFLRNIAEEHGVVRKEGRICGVRRKENGDLQALVLEGGTALEGDLFLDCSGFRALLIGETLGVGYDDWTHWLPCDRAIAVQTKSTRPPVPYTRSIAHEAGWQWRIPLQHRTGNGIVFCSRYMSEDEARERLLSSIEGEILTEPRVIRFRAGARRAHWHRNCVSIGLSSGFIEPLESTSIHLIQRSVIRLMQMFPHGDVEPSDVTEFNKQTFYELEHIRDFIILHYHLTNRTDTEFWRHCRNMDIPDGLKHRMRLFSQTGRAFKANDELFAENSWTQVMLGQGLLPKTYHPVADVMSEEELARFLAHVEGNVARTVESLPAHEAYLKTYCPVKAPA

SEQ ID NO: 83843 - protein, 245 aa, Sphingomonas sp.
  REGION 1..245: note = tr|A0A4V6NS93|A0A4V6NS93_9SPHN Tryptophan halogenase; OS = Sphingomonas sp. PP-F2F-A104-K0414 OX=2135661; GN = C8J46_10860 PE=4 SV=1
MTIDIQRMQDLAHEIVWLQGELDREIENRRRALGVELTGRIVGFEHGVLDAQRRLKVSVLRFVARSDVVSIVTAPVIYSLIVPLAIVDLWVSAYQAICFRAYGIARVRRRDYIMFDRAHLGYAQVRDFIILHYHATERSDSPFWDHCRTMALPESLKGKLALWRGKARVFREQGELFTPDSWIAVLLGQNVQPASFDPLTGGLPLGEATRFMAHIREMIGKTAEAMPTHEDFIARHCSAPMVRQA

SEQ ID NO: 83844 - protein, 525 aa, Mesorhizobium sp.
  REGION 1..525: note = tr|A0A442VH46|A0A442VH46_9RHIZ Tryptophan 7-halogenase OS=Mesorhizobium sp. OX=1871066; GN = EOS11_20280 PE=4 SV=1
MTKSVLIVGGGTAGWMTASYLAKVFPKLRITVLESDIIPTIGVGEATFSTIKVFFDFLGLPESEWMPHCNATYKLAIKFANWGPEPGHFYHPFQRYATIDGFNAGEWWLRLKPGQQFDRSCFVTPALCEAKLSPCFLDGRVFDEKVQDLFADPRRKASVLSEHKEQYPYGYHFDAALFAKYLRDYATKLGVKQILDDVINVELADDGSIDHVIGKISERVSADLFVDCTGFRGLLLNEALQEPFISFKDSLLNDRAVALRVPSTPDTDEIEPFTTATTMSAGWTWNIPLYNRIGTGYVYSSQFITPEMAESELRNHVGSRAENCSANHIKMRIGRSRNSWVKNCIGIGLTSGFVEPLESTGIFFIQHNIEELVAHFPGENIDPDVVASFNRIVGSCIDGVRDFLVLHFKGSGRNDTPFWKAVKQTPLPDHLEERFQLWRKRLPNAKSIDSRYHGFEYYSYSVMMLGLGSAPTEYLPTLAQRDPKNAILSFNQVNEQSQKLVSTLPSHREYIMQLYSTAPHSERHK

SEQ ID NO: 83845 - protein, 500 aa, unidentified
  source 1..500: note = Novosphingobium sediminis
  REGION 1..500: note = tr|A0A512AFS7|A0A512AFS7_9SPHN Tryptophan halogenase; OS = Novosphingobium sediminis OX=707214 GN=prnA PE=4 SV=1
MTETHAKRRIVIAGGGTAGWMAAAALARTMGDAIELTLVESEAIGTIGVGESTIPPLVAYNRLLGIGEADFMRATQATFKLGINFENWRVQGENYFHSFGTTGRDHWSAGFQHFWMHGLTKGHEASYDDYCIELQAAMKSRFAHLPDNRINYAYQLDSGLYAVFLRKLAEADGCRRVEGKIAEVQLHPETGDIAALLLESGQRVEGDLFLDCTGFRALLMEGALHVGYDDWTHWLPCDSAIAVQTASVRPPVPYTRAIAHDAGWQWRIPLQHRQGNGIVYCSRYLDKDAALDRLLTTVEGEVLTKPNVIRFTTGARRKQWHRNCVAIGLSGGFMEPLESTSIHLIQRAILRVVRMLPAGEISPRDVAEFNDQQHTDMEQIRDFLILHYKATDRRDSPFWRQCAGMDIPESLTHKIELFRETGRVFRKNEELFVENSWVQVMMGQGIMPRSYHPVATKLSDAELAHLLSGLRESVAKTVAGLPDHHAYVAQYCGAQEARAA

SEQ ID NO: 83846 - protein, 504 aa, Sphingomonas sp.
  REGION 1..504: note = tr|A0A4R2TCH3|A0A4R2TCH3_9SPHN Tryptophan halogenase; OS = Sphingomonas sp. PP-F2F-A104-K0414 OX=2135661; GN = C8J46_101345 PE=4 SV=1
MVEQRVRKVVIAGGGTAGWLTAAALSRQLGQLLDITLVESEEIGTIGVGEATIPTMRSFHAILGLDEREFMRATQATFKLGIAFENWAHDGDRYIHSFGDLGKSTWMGDFHHFWLAAKAAGDPSEIGDYCLELQAAKAERFALPSEGEINYAYHLDAGLYARFLRARSEANGLKRIEGRIASVDRDGETGFISALVLDSGERVDGDLFIDCTGFRGLLIEGTYAAGYEDWSHWLPTNSALAVQTASRGPAHPYTRAIAHDAGWRWRIPLQHRVGNGLVYASEHLSDDEAHARLLGAIGSAPLTEPRLIRFRTGRRRQVWKGNCVALSLASGFVEPLESTSIHLIMTGVLRLMKSFPFGGIAPAVVTRFNDQAQAELEHVRDFIILHYHLNNRPEPFWAARRDMPIPDTLIERIALFAEGAQAYQGGEDLFRVASWVQVMLGQHLVPHDHHRLGSIMGGPQLASVLTKIRSDIAGMVSGMPTHQQFLDRYLAPPIAAGSGIRSMN

SEQ ID NO: 83847 - protein, 514 aa, unidentified
  source 1..514: note = Amphiplicatus metriothermophilus
  REGION 1..514: note = tr|A0A239PX55|A0A239PX55_9PROT Tryptophan halogenase; OS = Amphiplicatus metriothermophilus OX=1519374; GN = SAMN06297382_2267 PE=4 SV=1
MTDALSRSAIRRIVIIGGGTAGWMTAAALSRLMRNGHSSITLIESDEIGAIGVGEATIPPITAFNKLLGIDENDFVAKTQATFKLGIEFVDWTRRGHRYIHPFGEYGLDIEAVKFYQIWLKLYSLEDDIPYIDEFNLSAVAAKLERFLKPSTDPRSVMSSLAYAFHFDATQYAAYLRRYAEARGVKRIEGKVVDTTLRSEDGFIEAIRLESGEKIGGEFFIDCSGFRGLLIEQALHAGYESWTRWLPCDRAVAAPSERVRDPIPYTRASAHSAGWRWRIPLQHRTGNGCVYCSEHMDDETAMAQLVAGLDSPLTGEPRYLKFTAGRRKEFWKKNCVAIGLSAGFLEPLESTSIHLIQAGVSKLIALFPDGEFNPIERDEYNRLTALQFEQIRDFLILHYHATERDDSEFWRYTRSIPIPETLKAKIELFRSKGRIFRFQDELFGESNWLSVLLGQNIRPRTWDPFVDALDYAQIRGQLMRMHALIRSTAEKMPRHQAYIDRFCAAAKPVREQSK

SEQ ID NO: 83848 - protein, 502 aa, unidentified
  source 1..502: note = Amphiplicatus metriothermophilus
  REGION 1..502: note = tr|A0A239PWH7|A0A239PWH7_9PROT Tryptophan halogenase; OS = Amphiplicatus metriothermophilus OX=1519374; GN = SAMN06297382_2268 PE=4 SV=1
MPNQSHGETRNIVIIGDGFDAWLSAAYLTRKLRAGYDIVVCAPPREEMQDHCAVFAGPATSSLHAELAVDERDLLRYCRGTFSLGAHFLDWTKPGKDYVVAFGAYGAPIETIAFHQCWRKRQRIVKGGDRFDSYSLSATAARAGKFAHPSRDPADIRSTYRYGYHVDVELYTDYMRRYAMHYGAKKAGARYANALLKERREGIDAVRLADGEIIPAFLALDCASAAAPLIEGALGATWTSFPSPGAVDSVITFAASSVASPSMTRIVAAKTCWRMDIPFQDGARCMIGYDSRAVSLDALAREHGPLENLEAKRIVRGRRAPAIGNVAALGESACRLDPLFCPAPATLIAGLKTLVELLPASQSGAETDEYNRIMSDVFERCNDFVTLQYWLAEQLGQHAWAAGAEKALSPHLRRKIEQFRSRGQIVQFDEEIYDQEMWIASLLGAGVNPERYDPFADGLSETMLDARLAALREKIAETVRAMPDQMIYLRQARATAPERSGS

SEQ ID NO: 83849 - protein, 515 aa, unidentified
  source 1..515: note = Paucibacter aquatile
  REGION 1..515: note = tr|A0A2N8KVC7|A0A2N8KVC7_9BURK Tryptophan halogenase; OS = Paucibacter aquatile OX=2070761 GN=C1O66_07675 PE=4 SV=1
MTSAPPASPHFVIVGGGTAGWMSACLLARQLGPACRYTLVESSDIGIIGVGEGSTPYLRDFFRQLGLEERDWMPACHATYKAGIRFPGWSTHPGYESYVHPFFNEADRPLGQAFIQQANQRRCGEDVDANPADFFLAAELARQRRAPHYVHPAQHPATDYAYHFDSGLLGSFLKRHAQEQLGLQHCVDTVAAVERHAESGDITALRLQSSGQRLEGDFFIDCSGFRGLLINETLGEPFIPWGDRLFNDRAIAIPTPLEPDRDIASETTSTALGHGWAWQIPLTHRHGNGYVYSSQFISDDAAEAALRAHLGPAAEGASARRLKMRVGRVARHWRHNCVAIGLSQGFIEPLEATALMLIQFSVQHLIEALQTGGDDPATLRERYNAEINRMFDGVCDYVQTHYLLNTREDTEYWRANRAMKPGSDRLAELLASWDAGADFDAALGRHEAALMYQRPSWYCLLAGMGRFPANAPGHRAAPSQAMALSGLQARAALMDQARKHFLPHREALRRLATSA

SEQ ID NO: 83850 - protein, 490 aa, Sphingomonas sp.
  REGION 1..490: note = tr|A0A4R2TBQ4|A0A4R2TBQ4_9SPHN Tryptophan halogenase; OS = Sphingomonas sp. PP-F2F-A104-K0414 OX=2135661; GN = C8J46_101174 PE=4 SV=1
MTSRTPIASIAVLGAGVVGLSAAIAFARALPGLAVTLIETPDDAAALTDRLSGTLPSITAFHDRIGLRERDLLAAGATHRLGTRLSDWSADGAPVVLAQGERGGTIAPGAFHQHWLNARRAGKTAAFDAFSVPAVLAAAEKFVHPSDDPNSPISGFGYALRLDPPRYRDLLRALARHIGIVPVPGAFAGVERGEDGRVSAVLLADGRRLVADLYVDCSGPAAPLRSALDTQWDDWRTWLPVDRLLLGTAPVQTLTPTDDLVAVPAGWRFASRLRDRTLVGLAYAADQTSDSSARRILPAGDTIVPLTPGARPEPWKHNVLALGDAAVVLDPLADANLHLAHAAILRAIDLLPGRDCAPTELAEYNQRSYRQAARVRDFQAAHYLPTGRTRGPFWKHASRLSRPDSLAHTLEHFAHRGRLPFYEDESFDKDDWHGLLLGLGIIPRIADPIASASPPDTIAATLKRLAEATAALPARLPPYPLYLAQLERAR

SEQ ID NO: 83851 - protein, 504 aa, unidentified
  source 1..504: note = Amphiplicatus metriothermophilus
  REGION 1..504: note = tr|A0A239PVM6|A0A239PVM6_9PROT Tryptophan halogenase; OS = Amphiplicatus metriothermophilus OX=1519374; GN = SAMN06297382_2130 PE=4 SV=1
MNDAHIRSIVILGGGTAGWMSAALLAKVMGRKRRITLVESEEIGTIGVGEATVPPLQLFNGLLGVDENEFLRATNGTFKLGIEFVDWGRLGARYFHPFGRHGDHFDVAPFHQYWLKCRLAGKAAPIDEFSLCAAAARCSRFQRPPTKDPRSIWSTFSYAFHFDASAYAAFLRRYAEARGATRVEGKVADVRLRAEDGFVDRLVLADGREIAGDLFIDCSGFRALLIGQALGVGDEDWSHWLPADRAVAVQCENAGPLLPYTRSTARRAGWRWRIPLQHRVGAGYVFVSDYLSEDEAAADLLAGLDGPALAEPRLLKFRTGRRKAFWAKNVVAVGLAGGFLEPLESTSIHLIQTALTKLASWFPDRRFDPMIVAEYNRLHHLETERIRDFIILHYKATEREDSPLWRYCRNMPIPDSLAEKMELFRRYGKLKQLEGDFFQDASWLAVMLGQFVTPERNDPIADLHETEPLAKTLETMRAIIARTAKDMPEHAAFVERSCAAAAAH

SEQ ID NO: 83852 - protein, 506 aa, Sphingomonas sp.
  REGION 1..506: note = tr|A0A4R2TTC9|A0A4R2TTC9_9SPHN Tryptophan halogenase; OS = Sphingomonas sp. PP-F2F-A104-K0414 OX=2135661; GN = C8J46_101173 PE=4 SV=1
METGGTRVVVVGGGTAGWMTAAALVRLLPTACSVHLIESAEIGIVGVGEATLPHIRAFVERLGLDEADFMRATHATFKLGIDFRDFGAIGDSYIHPFGTFGRPLDDVGFHHYWLRLAAEGRAGPIGDYSVAVAAAKAHRFAIPDGPADDLAASFGYAYQFDATLFGPYLRRFAEAHGARRTEARIISVDQDAVSGDVRAVRLDSGETVEGDLFVDCSGFRSLLLGNAMAEPWEDWSRWLPCDRAVAMPCTSPEGPIEPYTRATAKPAGWQWRIPLQHRVGNGYVYSSAHIADQAAADALVASVEGTPLADPRFLKFRAGRRSNSWVGNVVAIGLASGFLEPLESTSIYLAQMAITQLIELFPQRAGSEGISATDRTEFNRMVDMEYDRIRDFLILHYHATTRDDSDFWNHVRTMEVPATLADKMELFRRAGRVTQYSEGLFLEPSWIAVYLGQGIIPQAWDQRADRPGLDGLDRAVASLRDHVAATASAMPDHAAFIARRNATIAA

SEQ ID NO: 83853 - protein, 505 aa, unidentified
  source 1..505: note = Amphiplicatus metriothermophilus
  REGION 1..505: note = tr|A0A239PY70|A0A239PY70_9PROT Tryptophan halogenase; OS = Amphiplicatus metriothermophilus OX=1519374; GN = SAMN06297382_2269 PE=4 SV=1
MSQSALIKRILIVGGGTAGWMTAAAMGKLLAPLKIDVTLLESDQIGTVGVGEATLPHIRFFNRRLGIDEADFMAQTAATFKLGIEFRDWARKGDAYIHPFGDYGRDIKGVPFHHYWLRLRQRGRAWRIGEFSAPVMISEFGRFAMPVEDERSVMSSFSYAYQFDAGLYAKYLRRFAEACGVRRIEGKITTVIQRGEDGFIEAVKTEDGRRVEADLFVDCSGFRGLLIEQTLKAGFEDWSAVLPCDRAVAVPCENAAPSLPYTRATARGAGWQWRIPLQHRVGNGYVYCSEHVSDDEAAQTLMASLEGRPRAEPNFLRFRAGKRRRQWVKNCVSIGLSSGFLEPLESTSIYLIQASVTKLLELFPDRDFRACDIDEFNRAMDLEYERIRDFLILHYHATERDDTPFWDYVRTMKIPDSLAYKMTLFRKRGVVVKYKDGLFLHPSWIAVYLGQRVMPDMYDPRAEFIAEDELEKTLSAMRNLIRKTAESLPDHSDFIRRYCPAPGTV

SEQ ID NO: 83854 - protein, 266 aa, Rubellimicrobium mesophilum
  REGION 1..266: note = tr|A0A017HWG3|A0A017HWG3_9RHOB Tryptophan halogenase, putative OS=Rubellimicrobium mesophilum DSM 19309 OX=442562 GN=Rumeso_00401 PE=4 SV=1
MQEAHLFQHLIWKKRGPFAEVNGKRVPAGPFHYAFHFDQALVGAWLRKKAKGIRHLDAQVTGVETGGDGVAALHLDTGERVDGDLFIDASGFRRRLVSELPFEWVSFSEMLPNNRALPFWLDLKDGEEIDPVTGAWAQGHGWMWKIPTQGRFGCGYVFCDAYISIEEAQAEIERALGHPIEPRGDIRINPGRQPGRLGGERRGGGACVVLPRAAGGDLDPRDHRAAHLPDGVDGPAGGRGALQRHRRSASGGLSGLRAAALRVGAA

SEQ ID NO: 83855 - protein, 510 aa, Sphingomonas koreensis
  REGION 1..510: note = tr|A0A1L6J8L3|A0A1L6J8L3_9SPHN Tryptophan halogenase; OS = Sphingomonas koreensis OX=93064 GN=BRX40_07205 PE=4 SV=1
MADPMSQRSIVIAGGGTAGWMTAAALARFCGSGWTITLVESDAIGTVGVGEATIPMIRLFNQALGIDEAEFLRETHGTWKLGIEFDGWGVPGERYMHAFGQVGRGLGLLPFHHYWLRARAAGRAGPLGNYVLNDIAAKANRFGHVERAADSVLPAMPYAFHFDAGLYAAYLRRYAEARGVARIEGRVERVERDGENGDVTTLVLAGGVRVAGDLFVDCSGFRGLLIEGALETGFEDWGHWLPCDRALAVPCERADPLIPYTRATARKAGWQWRIPLQHRTGNGYVFSSAHISEDEAASVLLANLDGAPQAEPRVLKFRAGKRRKAWSRNVVAIGLSSGFLEPLESTSIHLIQSGITRLLDFLPNGRVADADRDAYNRMTDFEIERIRDFVILHYFANRREGEPMWDALRYMDLPEPLADRIAMFRACGRIVREHDELFDVPGWIQVLAGQGIVPERWHPLAGELSAEQLDQFLSTVADAFTRDAARLPGHADYLTRFCGAPSTLSQSSIA

SEQ ID NO: 83856 - protein, 503 aa, Sphingomonas sp.
  REGION 1..503: note = tr|A0A031I014|A0A031I014_9SPHN Tryptophan halogenase family protein OS=Sphingomonas sp. RIT328 OX=1470591; GN = BW41_01685 PE=4 SV=1
MTAPATPRRIVIAGGGTAGWLAAAILTRQLGPFAEITLIESDEIGTVGVGESTIPTVRAFHALIGVDEREFMEATGASFKLGISFENWARHGDRYIHSFGDVGQSTWMSDFHHFWLEAQARGIAEPFGAYCYEHEAAAADRFAVGGTPALNYAYHFDAGRYAHFLRGKAEANGLRRIEGRIDRVVRDADSGDIATLILADGTAVPGDLFFDCTGFRALLIGEALGVGFEDWGEWLPTNRALAMQTEATGPAPPYTRAIAHDAGWRWKIPLQHRVGTGLVYCADYLSDDAARARLLAAAEGRTLIEPRLIRFRTGRRKAAWQHNCIALSLASGFVEPLESTSIHLIMIALTRFLQLLPAGRPSAAAIARFNGQAAQEIEGVRDFIILHYHLTGRDEPFWRDRRTMAIPDSLAERIALFRDSANAYQADHDLFRVASWLQVMLGQRLAASSHHPLLRLMPSNQLNAVLQGIRQRISASVDALPSHETYLQDYLRSKGPPTLRTHR

SEQ ID NO: 83857 - protein, 508 aa, Sphingomonas sp.
  REGION 1..508: note = tr|A0A031I0B2|A0A031I0B2_9SPHN FAD dependent oxidoreductase family protein OS=Sphingomonas sp. RIT328; OX = 1470591 GN=BW41_01786 PE=4 SV=1
MRQDAIRRVVIVGGGTAGWMAAAGISRILGDMPGLSIELVESEEIGTVGVGEATIPQIVLFNTMLGLDEAMFMRETRATYKLGIEFVDWVRPGHRYVHPFGSYGLDMKGIEFHHFWLKGRELGDTTPLDAYSLAIVAGLQGRFGHPRPDQPGSPLSKLGYAFQFDAGLYARLLRRLAEANGVRRTEGRIVGVDRDGESGHVAAVTLASGARVEGDLFIDCSGFRGLLIEGEMQAGFEDWRDWLPCDRAVAVPCANGGERQPLTRSTARAAGWQWRIPLQHRIGNGYVYASEHLSDDEAAATLLANLDGAPLAEPRFLRFTAGHRRRAWVGNVVALGLAGGFLEPLESTSIHLVQSAIARLLTYWPTRAFDQREIDRFNAAHVEDYRDIRDFLVLHYKATDRDDTAFWDYCRTLPPPPGLADKLAIFAANGRIFREHEELFTETSWLSVMVGQGVRAGGYHPAADLLSDAETLARLGHIRTVVAETAHLLARQDDILAHYGCTLTGAAA

SEQ ID NO: 83858 - protein, 534 aa, Streptomyces stelliscabiei
  REGION 1..534: note = tr|A0A0L0KQY4|A0A0L0KQY4_9ACTN Tryptophan halogenase; OS = Streptomyces stelliscabiei OX=146820 GN=IQ64_33865 PE=4; SV = 1
MNGQDSRIKKVVILGGGTAGWMTAAYLGKALENTVEITVLEAPTIPRIGVGEATVPNLQRVLFDFLGINEDEWMRECNASFKTAVRFVNWRTEGKGEPAARELPAGGPDHFYHPFGLLPDYDQTPLSHYWYKNHHEGTTTEPFDYACFREPPVMDAKLAPRWLDGRHATRYAWHFDAALVAQFLRRFATDKQGVLHVEDEMTRVEQDERGFVTALHTKSGKVLDADLFVDCSGFRGLLINQAMAEPFIDMSDHLLCDSAVATAVPHDDEANGIEPYTSAIAMSSGWAWKIPMLGRFGSGYVYSSKFATQDEATREFSELWGLDPENTKFNQIRFRVGRNRRAWVKNVVSIGLSSCFLEPLESTGIYFITAAIYQLAKHFPDRNFNETLINRFNNEIEVMFDDTRDFIQAHFHLAPRNDTPFWRANKELTLPENIQEKIAAYRAGLPINSPVTDESTYYGNFEAEFRNFWTNGSYYCIFAGLGLVPDAPLPALSYRPGSVAGAQPLFERVKRQQKDLLDTLPTTYEYLRQLHGAS

SEQ ID NO: 83859 - protein, 518 aa, Pelomonas sp.
  REGION 1..518: note = tr|A0A0Q7SRM8|A0A0Q7SRM8_9BURK Uncharacterized protein OS=Pelomonas sp. Root1444 OX=1736464; GN = ASD35_01530 PE=4 SV=1
MSDIQSIVIVGGGTAGWLAACYLQRTLGAARQSPLPITLIEPPQAVSLGADLATVPTLRGTMQALGLPERALFTAADATLSNGLRFNGWRRGGAAPDDSFDHPFDIPPPFHGFATTAHWLNLLQRGLTREPMAQACAVQTTLFDGHQSPKLVDSPEYQAPVSYGYQLDAVKLAMLLQQKALERGVRHVQGEVVRVQRGAGGIEAVELADGRRCEASFFIDCTGSRSLLLQQALGVPWVSFADWLPCDRTVSLPLAHGQAHGALRSHTTATAQAAGWTWDMDLQSRRGTGYVYASRFCSEDEAVATLRELGAGHKPLAEPRLQRLRAGHAARAWEANCLALGAAGGFIEPLESTGLYLVEWMLQLFVDHVAPAGNSDACRGRVNRVFGDFYEEMRDFIVAHYALSQRRDTPFWRACTEEATLPPRLAELLALWDSKVPTPTDLDRRLSLFGVANWSYLLAGLQRLPSRGIGLSDHISPEISLKAMAHVQGIRRIAAAQSPTMRDYLLSLDGVVTSHAAH

SEQ ID NO: 83860 - protein, 480 aa, unidentified
  source 1..480: note = Gammaproteobacteria bacterium
  REGION 1..480: note = tr|A0A2N1Y1M7|A0A2N1Y1M7_9GAMM Tryptophan halogenase; OS = Gammaproteobacteria bacterium HGW-Gammaproteobacteria-2; OX = 2013798 GN=CVV12_10285 PE=4 SV=1
MAAAILAKAMGPQLSIRLIESEEIGIVGVGEATIPQIRLINSFLGVDENEVLRASQGTFKLGIEFNDWRRVGDSYLHAFGETGMPLGPLSFHHYWLRSQQAGGKTRLWDYSLNTSAAEGLRFARMDKVGDTPVGGIRYAYHFDAGLYGQFLRRYAEQRGVRRSEGKVVDVHLRATDGFIESVQMDSGERIEGDLFLDCSGFRGLLIEGALKAGFDDWSRWLPCNRAVTVASARVEPMRPYTQSNARPAGWQWRIPLQHRTGNGHVYCSDFMSEDEASALLLANLDGEALAEPRALRFTSGIRNTLWQRNCVALGLASGFVEPLESTAIHLVQSCINRLLTLFPDRHCDAALRDEFNRQTRYEFESVRDFLVLHYKATERDDTPFWRHCAQLQLPERAARKVALFRASGQIVRENEELFTEGSWLQVMLGQGIEPERYHPSADAISAAQLDGFLRGIRGTVAQAAAMLPSHSEYVAGHCRA

SEQ ID NO: 83861 - protein, 507 aa, Erythrobacter sp.
  REGION 1..507: note = tr|A0A3N5D8J8|A0A3N5D8J8_9SPHN Tryptophan 7-halogenase OS=Erythrobacter sp. HN-E23 OX=2488860; GN = EG799_04380 PE=4 SV=1
MSEPARPPLRVVVLGGGTAGWMTAAGLARLLPGMANVQLIESEDIGIVGVGEATLPHIRGFVERLGIDEAAFMRATHATYKLGIDFRDFGRLGESYIHPFGSFGEEVAGVGFHHWWLQLQSQGMAGDLGNYSLAVAAARADRFAPPAGDASLASTYGYAYQFDATLFGPFMRDFGLGIGVARHEGLVIEVERDAQTGDVTALVLEDGRRIEGDLFVDCSGFRSVLLGQELGEEWEDWTHWLPCDRAAAMPCTHATGAIRPYTTATAMPAGWRWRIPLQHRMGNGYVFASSFTSEDEACETIRSAADGEPLADPRILRFRPGRRRRSWSHNVVGVGLASGFLEPLESTSIYLAQMAITYLIELFPEGPGIDPRDRNEFNRLVDMEYDRVRDFLILHYHATTRDDSDFWNHVRTMTVPDSLADKMELWRRAGRIEKYSDGLFYDASWIAVYLGQGVFPERHDPRTSLADPARVEGALERLKRTIADHVAAMPAHADYLHRESARLAEEA

SEQ ID NO: 83862 - protein, 492 aa, Sphingomonas sp.
  REGION 1..492: note = tr|A0A0Q5PPH9|A0A0Q5PPH9_9SPHN Tryptophan halogenase; OS = Sphingomonas sp. Leaf343 OX=1736345 GN=ASG07_00575 PE=4; SV = 1
MSAPFTVTIAGGGTAGWMTAAALARFAGPATRVRLIESDAIGTVGVGEATIPQIRLFNHGLGIDEDAFLAATGGTFKLGIEFVDWLRRGHRYMHAFGTVGRDIGVVPFHHYWARANAAGVAAPLGDYALNDVAARAGRMHRGPSITAPNLPPVPYAYHFDATLYARFLRDYAEARGVERIEGRILSVERADTGDIGALRLEGDRRIDGDLFVDCTGFRALLIGETLGVGYETWSHWLPCDRALAVPSEPTPEPVPYTRSTAHKAGWQWRIPLRHRTGNGHVYCSAHTSDDEAAATLLAGLDTPALGDPRPLSFTTGRRIRTREANVVAIGLSSGFLEPLESTSIHLIQSAIARLLKLFPGRTVIAAERVEHNRQTDFEIERIRDMVILHYHATERPEPFWQTCRDMTLPDTLAAKIDLWRARGHIVREHDELFTEPGWLQVLAGQGIAPAAWHPLAETLPDADLAGFMRMLADHNAREAAAMKPHAAFLRPQ

SEQ ID NO: 83863 - protein, 485 aa, Asticcacaulis sp.
  REGION 1..485: note = tr|V4PH22|V4PH22_9CAUL Uncharacterized protein; OS = Asticcacaulis sp. AC466 OX=1282362 GN=AEAC466_06170; PE = 4 SV=1
MSAAAISKSFGTDILVQLVESEEIGLIGVGEATVPHISAFNRLLGINEAEFVRETKGTFKLGIQFNDWGKIGDSYIHGFGTIGRDLGLMPFHQYWLKARFARKAKEISQYSLNTVAAPMGKFMAPPRDAPANSPLAEIAYAYHFDATLYARFLRTRAEAQGVVRTEGKVVAVNQNKESGFVESVTLENGATITADLFIDCTGFRALLIEDTLHAGFEDWTHWLPCDRALAVPCEKVGPPTPYTRSTARSAGWQWRIPLQHRTGNGYVYSSQFTSDSEAADLLLNSLDGRALSDPKAIRFTTGKRRKLWDKNVVAIGLAGGFIEPLESTAIFLIQSGISRLVSLFPQSDFEPVLQDVYNAQMQFEYERIRDFIILHYYATERSDSEFWNYVRTMRVPDSVKSYIDLFAANGQFFREGTELFGLTSWVQVMLGQGIMPRSYHPAVDWVKNEDMQALVDHVEKVVASNVALMPRHEDFIARYCAASPI

SEQ ID NO: 83864 - protein, 602 aa, Microcystis aeruginosa
  REGION 1..602: note = tr|A0A551XYQ5|A0A551XYQ5_MICAE Tryptophan halogenase; OS = Microcystis aeruginosa Ma_QC_C_20070703_M131 OX=2486263; GN = EWV85_13210 PE=4 SV=1
MNSTITQSREYDVVIMGAGFAGLCQARHLMLNIPNIRVALIDPRPVERTDKDLKIGESLIEVAALFLCKELGLHDYLIENHPPKSGLNFHWPKDPAKTETLDDYYHVWANRQTPVGSFHLQRAKFEQDLLVMNCQMGADFYEGRVKDIALTSGDELKTVYAKVGEENITLQAKHVIDAAGKNFIIGRKTDNVLSGPENLLGLNNGSAWLRVKNIDRTIFHSGYHPEGASTSHYYATNHYFGQGHWLWMIPIDKHSMELSIGIIHHHEVIPAHSINNLDKFSNFLKSNHTILSQLIESGEVVDFHYWPKIAHKSKVLFSPDNWYVIGDAAHIFDAFYSYGTTMIAFEVESVTEIIRAKLAEEAAAEQKRSAYNDFNLAYARTVNCLYRDHAYQLGHASVMSWRIYFEYMWWFGVHVPTYIGKWHLDLNFIPRYVTIADGNVNGIFADLCQEFHQLVSQGANIGLMDAYRADQLLGGYGTLKHFDDFLENTKFEPRRCNVFASMKAAYFYIAIWYALFQWKAFGIAGWLNPKHWYYFGRMLKLSIQATIAEVIYKRKTRGIADNSQIEKMREEFKNYHYQPQKKSPSVVQNVISERVKIESFPA

SEQ ID NO: 83865 - protein, 497 aa, Pseudoalteromonas sp.
  REGION 1..497: note = tr|A0A1I6Y5X7|A0A1I6Y5X7_9GAMM Tryptophan halogenase; OS = Pseudoalteromonas sp. DSM 26666 OX=1761892; GN = SAMN04487870_0545 PE=4 SV=1
MKPIKHVVIAGGGTAGWIAAALLNKVLGKVINITLIESTHIGTVGVGEATIPPIMQLNNALGINEQHFINATNATIKLGIEFENWKSSAHSYMHAFGTLGKNFPFCDFYNFWLKGQTQGNKDDFWDFSLNYQAAKNNKFAPLNTISNTSLPGLSYAYHFDASLYAEFLKHLATERGVKHLDAKINEVMQCPTSGNIQSLTLDDGSSISGDLFLDCTGLRALLIEQTLNTGFVDWSHYLPCDSAIAVQTASNDELKPYTRSIAHSAGWQWQIPLQHRMGNGLVYCSRYISDDDAKQLLLNNLPAEPITEPRLIKFKTGRRLKQWHKNVVAIGLSSGFLEPLESTSIHLIQSAVTRLIKLFPHHGVSDALVTEFNKQSITEIEHIRDFIILHYKLTEREDTPFWRQCKQMEIPQSLAHKMDLFKQTGKVVRENDELFAEVAWQQVMIGQGLLPDDYGALADSLTNEQLAELFSNLKTLINSTVEQLPSHTVFLSSLKPK

SEQ ID NO: 83866 - protein, 503 aa, Sphingomonas sp.
  REGION 1..503: note = tr|A0A031I3X1|A0A031I3X1_9SPHN Tryptophan halogenase; OS = Sphingomonas sp. RIT328 OX=1470591 GN=BW41_00830 PE=4; SV = 1
MTAPSIGSIVIVGGGSAGWMTAAALSSLIDERSAMTITLVESEAIGSVGVGEATIPDILAFNQMLGIDEAEFMRATEATFKLGIEFIDWARPGDRYIHPFGQHGVDMEGVDFHHYWLRLRADGVETPIETYSLSALAARAGRFTAPHPDPRSILSHLRYAYHFDAALYARYLRRYAEARGVTRVEGIVTQVDRTASGEGIAAVVMASGERITGDIFFDCTGFRALLIGETLDVAYTDWSAWLPCDSALAMPSAPVGPPLPYTRSTAQPAGWQWRIPTQRRTGNGHIYSRHFMDDDTAEAVLRAGVDGAPLAEPRQIRFTAGHRRRFWSGNCVAIGLSAGFLEPLESTSLYFIQEGISRFISLFPTKDMPDILRTEYNRHMNVEFEQVRDFIVLHYAATERDDTPFWRYCRTMDLPDTLRHKIELFRETGRVFRYNDELFARPSWVAVLLGQRIMPRRYDPVIATLPVGDVAHSLRSMAHAMADAVQRLPTHADYLAHYCAAGR

SEQ ID NO: 83867 - protein, 102 aa, Cupriavidus sp.
  REGION 1..102: note = tr|A0A5C8AXK6|A0A5C8AXK6_9BURK Tryptophan halogenase (Fragment) OS=Cupriavidus sp. OX=1873897 GN=E6Q40_00260; PE = 4 SV=1
MENAGKISHLVIVGGGTAGWMSAAFFSKVFTPQQMKITLVESADIGTVGVGEATIPPITFFNQVVGVDERRMLTATQGTYKLGIEFVGWGDPGDAYMHPFGN

SEQ ID NO: 83868 - protein, 504 aa, Asticcacaulis sp.
  REGION 1..504: note = tr|V4PFS1|V4PFS1_9CAUL Uncharacterized protein; OS = Asticcacaulis sp. AC466 OX=1282362 GN=AEAC466_10385; PE = 4 SV=1
MKKLISKVVIVGGGTAGWMTAAMLAKTMGTQAYDITLIESEQIGTVGVGEATIPPIQMFNSVLELDEDEFVRETNATFKLGIRFNSWFMPGSSYFHPFGFMGQDMDGIGFSHFWLRFARLSGNVDFGRFNVETMAANENRFGRTPPADGREKYGLNYAFQFDAALYAAYLGKYAQKRGVKRVEGLVVAVDQEAESGFVTGVRLKDGPTIAGDLFIDCSGFRGLLIEETLKAGYENWSEWLPCDRAAAVPCDRNPGPITPYTTSTAQEAGWQWRIPLQHRTGNGYVFCSDFISEDAACEKLLGRLDGAAQKDPKVLRFTTGHRRKIWDKNVIAVGLASGFLEPLESTSIHLTQSVITKLISLFPKFGVQQSVIDQFNRDILADYVNVKDFLIAHYKVTGREDTPFWKRCKSMDIPDSLKHRLEIFKTTGHIHVQPHELFKEASWFAVLVGQGLFPDNYHPLADTISEDALRQRLARIRTGITDRVNGLPAHDAFVGRVGAVRAAV

SEQ ID NO: 83869 - protein, 497 aa, Sphingomonas sp.
  REGION 1..497: note = tr|A0A031HV07|A0A031HV07_9SPHN Tryptophan halogenase; OS = Sphingomonas sp. RIT328 OX=1470591 GN=BW41_02342 PE=4; SV = 1
MTAPMPRRIVVAGGGTAGWMTAAALTRTLGRTAAVTLVESDTIGTVGVGESTIPPLITFNRLLGITEAEFMAATQATFKLGIQFDGWKGPDDSYFHAFGLTGKDHWAAGFQHFWLEGQARGHQQSYDDYCLELIAARESKFAHLPDDRLSYAYQLDSTLYGRFLRRMAESDGARRIEGRIARVDLDGESGDIAALVLDDGSRVEGDLFVDCTGFRALLIEQALHVGYDDWTHWLPCDSAIAVQTESVRPPVPYTRAMAHDAGWQWRIPLQHRVGNGIVYCSRYLTREAALDRLLGNVEGKVLTEPNMLRFVTGARRKQWHRNCVAIGLAGGFMEPLESTSIHLIQRAILRLIRLLPAAGAISPHDIAEFNDQQLTDMDQIRDFLILHYKVTERRDSPFWRQCAAMDIPDSLAQKIGLFRETGRVFRRNDELFAENSWIQVMLGQGITPAARHPIAAKLPDEELDRFLSGLRQGVATTVRGLPAHSDYVSRYCGAAPT

SEQ ID NO: 83870 - protein, 547 aa, Alteromonas stellipolaris
  REGION 1..547: note = tr|A0A0S1YQA2|A0A0S1YQA2_9ALTE Tryptophan halogenase; OS = Alteromonas stellipolaris LMG 21856 OX=1160720; GN = AOR13_3556 PE=4 SV=1
MSNQPIKHVVIVGGGTAGWLCAGVLAARLGNRSGNSDESAINITLVESPNVPSIGVGEGSWPSLRDTLQEIGIKEAEFLTCCNASFKQGSTFAGWRNGQQNDNYQHPFTTPTGYTELDIHRCWQQFFSNESFEQSFCLQPDICHAGLAPKQNSTPEYAYVLNYGYHFDASALATLLTNHCKTSLGVKHTQAHIANVVTQDNGDIEALVTERGDTIKGDLFIDCSGQQGLLIDKHYHVPWHSVSSVLLNNRAVAAQVPYGSSDIEGSADSISSTTIATAQTCGWTWDIGLQHRRGVGLVYASEYASEEDAESILREHLAKQLPKTEIENLNYRHLQFDPGYRKQFWVNNCIGMGMSSGFIEPLEASAIAMVELGIRMLCDQFPQNRKHMSHVATRYNQRFTYRWERVIDFLKLHYVLSERTEPYWKAQRSENSIPDSLNALLDLWQYQAPSRYDLIENEEIFPSASYQYILYGMGFHTNGRQLDKNSDMVNKAFAVKQSLQQGKRQLLAGLPTNRDLLTAISHHAEKETTTNDNDKKEGPRHDVIGFR

SEQ ID NO: 83871 - protein, 511 aa, Pelomonas sp.
  REGION 1..511: note = tr|A0A0Q7SIE3|A0A0Q7SIE3_9BURK Tryptophan halogenase; OS = Pelomonas sp. Root1444 OX=1736464 GN=ASD35_17910 PE=4; SV = 1
MSDLSLRKIVIVGGGTAGWMAAAPLAQLFARAGARRPEIVLVESPDIGTIGVGEATLPPIRAYNKTLGLDEADFVRQTQGSFKLGIEFRDWGHVGNRFFHGFGDFGPAIEGRSPWQHWLRLQRSVADMPTYEDWSTPTVMARRNRFTLPEGGAPSAANAFSFAYHFDAGLYAAYLRDYAMQRGAQRIEGLIVDVELRPEDGFVAAVKLQDGRRIDGDLFIDCSGFRALLIGGAMQSPFEDWSELLPCNSAQAVPSERVEPLTPYTQSTARAAGWQWRIPLQHRTGNGHVYCSSFISDDEAAATLLAGLDSKALDTPRQLRFTTGRRKQGWVKNVVAIGLSSGFLEPLESTSIQLIMDAVGRLIQFLPDRNFKPHLAAEFNRLMARQYESIRDFIVLHYKVTARRDSELWRYCAAMPIPDSLAHQIELFRSTGRVAVLDPDSFAEPSWVSLFLGLGLRPEAYDPFVDLIDVQALLQHFVRLRQAITQTVAGMPDHADYIAKHAPAPRPVSPG

SEQ ID NO: 83872 - protein, 589 aa, Microcystis aeruginosa
  REGION 1..589: note = tr|A0A551XYQ1|A0A551XYQ1_MICAE Tryptophan halogenase; OS = Microcystis aeruginosa Ma_QC_C_20070703_M131 OX=2486263; GN = EWV85_13205 PE=4 SV=1
MNTTQALHYDVVIMGAGFAGLCQARHLMLKIPNIKVALVDPRPEQRTDKDLKIGESTIEIAALFLAKELGLHDYLIENHAPKQGLNFHWPKNPAKTETIDDYYHAGSNRQVPIPSFQINRSKFEQDLLKMDKAMGINFYNGQVVDVDLTPGDAIKTVKIKVGDERIDLQAKHVIDAAGRKFIIGRKTDNLLFGPENLMGLNTGSAWVRVKNVDRTIFHSGYDPLNASTSHYYSTNHYFGEGHWLWMIPIDTQTMELSIGVIHHHDVIDSTQVNSREKFHNFLQNHHQVLANIIDSGEAVDFHYWPRISHASKTLFSPDNWYVLGDAAYIFDAFYSYGTTTIALAIEGITEIVRAKLAGEADAEQKRAAYNEFNLAYSRSVNCLYRGHAKQLGQASVMSWRIYFEYMWWFGVQVPMYVGKWHLDLTYIPIFLKTLNSNIDGLFADLNEQFTELADKDVNIGLMDCYRGDQLFKGYHTLKHFDDFLENTKFEPRRCNVFAGLKATCFYAALWYALFQWKGFGIQGCLNPRHIYHFLRLLGLSGQATIGELIYKFKTKGLPANSEIEAMRQEFKTYQYQPKLQPWLAEATNS

SEQ ID NO: 83873 - protein, 476 aa, Pseudoalteromonas atlantica
  REGION 1..476: note = tr|A0A510ZG15|A0A510ZG15_PSEAF Tryptophan halogenase; OS = Pseudoalteromonas atlantica OX=288 GN=PAT01_01060 PE=4; SV = 1
MLNKVLGKVIKITLIESSTIGTIGVGEATIPPIIQLNNALGINEQDFINATNASIKLGIEFENWKTPSHSYMHAFGSFGKDFPFCDFYNFWVKGHISGAEESLWDFSLNYQAAKQHKFAPLNTIPNTQLPGLSYAYHFDATLYAEFLKNLATSRGVEHIDAKIEQVEQCPLSGNIKSLTLDNTQQINGDLFIDATGQRALLIEQTLNTGFVDWSHYLPCDSAVAVQSQGTSELKPYTRSIAHSAGWQWQIPLQSRIGNGLVYCSRYLSDDAATQLLLNNLPAEPMTEPRVIKFKTGRRLKQWHKNVVSVGLASGFLEPLESTSIHLIQSTVTRLIKLFPHNGISEALVTEFNKQSVIEIEHIRDFIILHYTLTAREDSPFWRQCKQMDIPDSLAHKLKLFKQTGKVVRENDELFAEVAWQQVFIGQGLIPEDYNSIVDSLSSEQLNDLFSTLKTLITSTVDQLPTHKDFLAKIKKA

SEQ ID NO: 83874 - protein, 507 aa, Sphingomonas sp.
  REGION 1..507: note = tr|A0A0Q5URM3|A0A0Q5URM3_9SPHN Tryptophan halogenase; OS = Sphingomonas sp. Leaf198 OX=1736299 GN=ASG20_06325 PE=4; SV = 1
MTGTPAARITKVVIVGGGTAGWMTAAVLSRLVATGVAVTLVESEDIGTVGVGEATIPSLRDYNRMLGIDEDALVRATGATFKLGIEFRDWRRLGDSYLHPFGTHGRDIEGVSFHQLWLRQANLGGDPGPIGDYCLSAVAARKGRFTRPASNPQSVLSTLSYAFHFDAALYAKFLRGMAEEAGVVRVEGRVAAVDRDAETGFITGLRLDGDRRIDGELFIDCSGFRSLLLGDALGVPFTSWQHWLPCDRAWAVPSERLGTLTPYTRATAETAGWRWRIPLQHRVGNGHVYASDHVDDDDALRALLAGLDGKPLAEPRQLRFVAGRRERFWEKNCVAIGLSGGFLEPLESTSIHLIQSGITRLMALFPDRGFGGVEIAEYNRVMLREYAQIRDFIILHYHATERSDSTFWNHCRTMTIPDTLQAKLDLWSGNARTFREQGELFTPDGWIAVLLGQGVRPVSTDPLVAALPPEESARFMDHVRDMIGKTADAMPTHEQFIAQHCAATIAP

SEQ ID NO: 83875 - protein, 522 aa, Pseudoalteromonas atlantica
  REGION 1..522: note = tr|A0A510ZLL3|A0A510ZLL3_PSEAF Tryptophan halogenase; OS = Pseudoalteromonas atlantica OX=288 GN=PAT01_21080 PE=4; SV = 1
MNDTLKSIVIVGGGTAGWLSAGIIAAYLKKHHSLNYHITLVESADIATVGVGEGTWPTMRRTLQNMGVDEAQFINQCNVSFKQGAKFANWHSTKENDFYYHPLMMPQGFADNDLAAAWLRQDTDSAAPHNHFANFVCPQHALCEHNLAPKALTTPQYSGVANYAYHLDAGLFATFLKNHCINHLNVTHVVASVLSVNNNANGDIHSLSLDNNTALCGDLYIDCSGFKSLLLGENLKIGFKSCKDILFADSALAVHMPYDDETQVISSHTISTAQTAGWIWDIGLQTRRGVGHVYSSRHISEQEAKEQLFDYLNISPAKRADFNVKKISFEPGHREKFWHKNCVAIGLSAGFLEPLEASALLLVEISANFIAEQLPANRQVMDITAARFNRTFSYRWQRIIDFLKLHYMLSERTDSLFWQRHCAEQSIPQSLQGNLALWRTHIPNDNHFDYSVEVFPAASYQYVLYGMGFKTATTHYGNHPRAIKKARNLAAKNTKDTAELVSKLPDNRTLLKQIKQYGLQKI

SEQ ID NO: 83876 - protein, 516 aa, Sphingomonas sp.
  REGION 1..516: note = tr|A0A0Q5V6U2|A0A0Q5V6U2_9SPHN Tryptophan halogenase; OS = Sphingomonas sp. Leaf198 OX=1736299 GN=ASG20_06330 PE=4; SV = 1
MRKRILIVGGGTAGWLTAGYLAKRLGADLAGGVSITLVESRDIGILGVGEGTFPTIRRTLATIGIDEAELVRRCGATFKQGAKFVHWRHEPGQGRTDHYLHPFQVADANDGLDLLPYWLLGYGGPDNWDEVSNPQKKAADQMRAPKLATNPDYVGPLNYAFHFDAVALAGLLREQGVKNGVRHLTDTVTEVLLDADGAIGGVRTEQNGLLDANLYIDCTGFRAELIGKAMKIPYRSCRDVLFCNRAITAQLPYARRDEPIASYTISTAQESGWIWDIGLDRRRGIGHVYSSDHSDDETAERVLRGYLGAGGDEADVRHFKFDAGYREVNWYKNCVAVGLSSGFFEPLEATGIAFAEVSAGMIANLFPWGGDYETSARQFNANMLRRYERALDFIKLHYCISERRDTAFWRDNVADSSVPDSLLELLDRWRFRPPNELDIDGQVDIFTDASWQYVLYGMGWKTDLSAKAGALRYPDDARRAFAEVQRQAQYAIANLPSNRALVDYAQTHRFGARAPA

SEQ ID NO: 83877 - protein, 496 aa, Sphingomonas sp.
  REGION 1..496: note = tr|A0A031HMF3|A0A031HMF3_9SPHN FAD dependent oxidoreductase family protein OS=Sphingomonas sp. RIT328; OX = 1470591 GN=BW41_03316 PE=4 SV=1
MNDRTVRRVVIVGGGTAGWMAAAVLCRSFPRERLAVTVVQSSEIGTVGVGEATIPPILQLNAQLGLDEDALIRATQGTYKLGIEFRDWGQLGDRYFHPFGSFGADLAGVPFHQHWLRLREGRLTDYSLPARAAYASRFTRPSDDPRSVLSKMSYALHFDAALYADLLRTLALAEGCQRSEGRIVDVRLAAEDGFVKHLVLDDARVIEGDLFIDCSGFRGLLIEEALATGYLDWSHWLPMDRALAVPSEAVAPPAPFTRATAGAGGWRWRIPLQHRVGNGHVYCSAFVDDDSAARALLDGLDSPALGDPRPLRFTTGRRRLSWHRNVVALGLASGFIEPLESTSIHLIQRGIATLMSLFPANGFVPAEVDLYNDLMRRETEAVRDFVILHYKQTRRDDTPFWRTMRGMAVPDSLAQRMEIFANLGRVILEPGELFREASWVAVMLGQGLQPHDHDPAADLLPAEETRASLRRMRDLMHRGVQAMPTHEAFLSGARAA

SEQ ID NO: 83878 - protein, 562 aa, Ruegeria atlantica
  REGION 1..562: note = tr|A0A0N7LR89|A0A0N7LR89_9RHOB Flavin-dependent tryptophan halogenase RebH OS=Ruegeria atlantica OX=81569; GN = rebH PE=4 SV=1
MNNRLRKITIVGGGTAGWMTALILDMVFSRTSAPKDRPRICLIESPNIATVGVGEATVPRMPVTLRQAGISERDFFRETNASFKLGVKFCNWNKDAKGNRIDYVNPFAHGQLLEGLEAAEYFLRFGNGDRDFTQSISPHDDLARLCKGGRPLGQPEFEQRFGYAYHLDAVKFAGMLTKVCTKRGVEHIQDEVQAVELDEQGNVSHLMLERKGRHDIEMVIDCTGFRGLIINKALGEPFMDYSDYLPNDRAMALQIEHPDPEKIESVTRSTALGAGWTWRVPLYNRVGTGYVYSSAHRTDDQAADEYLEWLGDSGKDLTPRVIPMRIGRVRNAWVKNCLAIGLSGGFIEPLESTAIHMVDHAVRWFAEHLPTRDIEPSLRARYNRQMNKMYDEVLDFICLHYRLGNRTDDQYWIDARTEMKIPDRLAENLELWQHRLPMEHDIEFATLFNFRVYQTVLLGKQVYDTGYGTGIRDRLRPLKKPIWFQWWKGAKVDLAQILKAMPDHKTLLRDIRGELEQPPAFGMAAAMQPTVAMPGEQLAPVAIQNMPNLAEIQSGKKDLQLF

SEQ ID NO: 83879 - protein, 495 aa, Sphingomonas sp.
  REGION 1..495: note = tr|A0A0Q5PKM7|A0A0Q5PKM7_9SPHN Tryptophan halogenase; OS = Sphingomonas sp. Leaf343 OX=1736345 GN=ASG07_11400 PE=4; SV = 1
MTDTPKRTRVVIAGGGTAGWLAAAILTHQLGPLIDVVLVESDEIGTVGVGEATIPTIQAFHALIGLDEREFMAATGASFKLGISFENWTRPGERYIHSFGDVGRSTWMGDFQHFWLEARAQGIAAPIGAYCVEHEAALAGRFATGGQDRLNYAYHFDAGRYARYLRARCEAAGLTRIEGRIARIEQDSDTGHIAALHLDDGQRIAGDLFLDCTGFRALLIGDTLGIGFEDWGHWLPTNRALAVQTKAVGPAVPYTRAVAHDAGWRWQIPLQHRVGNGLVYSADHLSDDAAHDRLLASVEGETVTDPRLIRFRTGRRLRSWHGNCIALSLAGGFVEPLESTSLHLIMVAMTRLVQQFPFDGISPATVARYNDQSRREIEGVRDFIVLHYHLNLRDEPFWRDRREGGIPDTLADRIALFRDNAQAYQGADELFRVTSWLQVMLGQGLQPRTHHHVARMMPPGRLRDTLAQLQAGVAAGVEALPTHQDFLDRYCPTST

SEQ ID NO: 83880 - protein, 513 aa, Sphingomonas sp.
  REGION 1..513: note = tr|A0A031HLK5|A0A031HLK5_9SPHN Tryptophan halogenase family protein OS=Sphingomonas sp. RIT328 OX=1470591; GN = BW41_03243 PE=4 SV=1
MHPIRNIVIVGGGTAGWLTAGVIAARHQGQRPHGFTVTLVESPNVPIIGVGEGTWPTLRTTLKRMGVSETEFFRQCDASFKQGARFNRWTTGAVDDGYYHPLMLPQQFGSVNLAPHWLAAGGDDSFCDMVTPQGRLCDEGLAPKTMATPEYEGQANYAYHLDAGKFSAFLQRHCCDTLGVRHVLADVTEVLKDEGGDITGLRTEQGIAVDGDLFVDCTGFAALLIGKAMDVPFRSCADTLFCDTALAIQVPYAQADDPIASHTLSTAQSAGWIWDIGLPTRRGVGHVFSSSHIDVDAAERELRAYLGPAGADLPVRRLAIRAGHRERFWERNCVAVGLAAGFLEPLEASAIVLIELSAKMIAEQLPPCREVMDVVARRFNETTHYRWGRIIDFLKLHYALTRRTDTDFWRDNARPETIPDRLRGLMELWQHQSPWLHDEFDRAEEVFPSASYQYVLYGMGARSAVLPGTIEGEAELARRARRENAMQTQRMVASLPRHRELIERIVRHGLQPI

SEQ ID NO: 83881 - protein, 461 aa, Fischerella sp.
  REGION 1..461: note = tr|A0A1Z4THS7|A0A1Z4THS7_9CYAN Putative tryptophan halogenase OS=Fischerella sp. NIES-4106 OX=2005456; GN = NIES4106_12710 PE=4 SV=1
MNHSDYDVVIIGGGPAGSTLSTFLVRKGHQVLVLEREKFPRFHVGESLLPATQLIWEKLGIAESLQNFGNTFKYGTEIRMGLNPQQSEYEYSRQEFYNIPRQRLHQRPYAYQVERSEFDLFLLNHARQEGVTVFEEAVVKEILWEGDKATGIRWKNKDNIEYITKAKCIADCSGRYAFISRSRKFLTPNKTIKTSAVFGHFKHVTRASGIQQGYFNGYLIENGWIWFIPLASDIMSIGVVMNEPGTSWWKQKSSEEILLTYIKQYKFIQERFEQAEQFSKVRMLHNLSYASKHSVGNGWILVGDANFFVDPLFSSGVHIAFRSAEKAADAIDGFLKNNWDKKAFQYYQKWSQKEHFHVSTTMGLMYKMLKYRVSMEILVKLTGKYSNHWDNPLLRRLVAWGSGYYEEFHLVLYCSWIFCILLIAIGWVYEKFLGISAWNTHHEFNSESPQAIAKSVGILEK

SEQ ID NO: 83882 - protein, 532 aa, Sphingomonas sp.
  REGION 1..532: note = tr|A0A031HWW0|A0A031HWW0_9SPHN FAD dependent oxidoreductase family protein OS=Sphingomonas sp. RIT328; OX = 1470591 GN=BW41_01785 PE=4 SV=1
MNEHTIRSVVILGGGTAGWMAAAALSRFLNNGVTRVTLIESEEIGTVGVGEATIPPLRTFNTMLGIDEHEFIRQTGGTYKLGIEFVDWGGLGERYFHPFGAHGHDLAGVHFHQLYLRERQRRVMPDISAWSMSAVAAQAGKFAPPAAQAQSAVKDLFYAYHFDAARYAAFLRRFAEQNGVQRIEGKVTAVAQRPEDGHVTALKLEDGQVVGGDLFIDCSGFRGVLIEETLETGYEDWRHWLPCDRAVAVPSAYAGDPDPFTRATARGSGWQWRIPLQQRMGNGLVYCSDFQQPEQAERELLANLEGEALAAPRHLSFTTGRRKRSWHRNVVALGLASGFIEPLESTSIHLVQSGIARLIALFPDRRFNPVERDEYNAQMDELYADVRDFVILHYKATRRSDTPFWDRCRTMSVPDSLARKIELFRAKGRVFRENRELFATTSWVSVCLGQHIVPDDHEPAVDALDEEKVAGALEEMRRGYLDVAARLPSHGDFLRHVAGRPAAPPPPPPTSPETPTFSFASESPFDFSADPL

SEQ ID NO: 83883 - protein, 519 aa, Escarpia spicata
  REGION 1..519: note = tr|A0A370DHA7|A0A370DHA7_9GAMM Tryptophan 7-halogenase OS=endosymbiont of Escarpia spicata; OX = 2200908 GN=DIZ78_13570 PE=4 SV=1
MVKKSGDREMNERIDDITIVGGGSAGWLMGLFLTTMLNKGESKVKVTLIESPNIPTIGVGEGTVTGFPRMLQQLGIKESEFLRNSDATFKCAGKFVGWNLDAKGKPTTFYNPFNVGGYVGGFETGYYYQKYGNAPGASSFVDSIMPTQMVVENLLGPKLIGAKDYESPAPYTYHLHAHDFSRQIANIAKKRGVVHILDEMVDAEQDENGYITALNLKEKGCVPVKLVIDCTGFSGRILQQVLKEPYNEFGNHLLCDRAIPIPHPHEDPKRLSPCTTATAMKAGWTFDVPLYSRMGTGYVYSSRFISDDEALDELIRHIGDESLRERTPPVIKMRVGRVRNTWVKNCIATGLSAGFVEPLEASAIYTIEMTARMLLTYYPEQGIEQKTVDRFNEVMNRMYNEILSFIVMTYYTSNRTEPFWVAAREDIDLPDKLRENLEMWQSFMPSPHDVEGKFLFSHWNYIYVLLGKGYFEGRHFPAERFLVKSDWMRFSNHIAEVKRQLKQKLPSHYDLLTAIRSGR

SEQ ID NO: 83884 - protein, 603 aa, Microcystis flosaquae
  REGION 1..603: note = tr|A0A3E0KXT3|A0A3E0KXT3_9CHRO Tryptophan halogenase; OS = Microcystis flos-aquae DF17 OX=2060470 GN=DWQ53_21805; PE = 4 SV=1
MKNMSNRPYDVIIMGAGLAGLCQARHLMLKIPNIRIAMIDPRPENRTEKDLKLGESTVEVATLFFGKDLGLYEYLIENHPPKYGLNFHWPKRNDQTKTIDDYFHIWANRQPDLASTQLNRPKFERDLLKMNREMGADFYNGRVVDIDLTPNDQLHTVKVKLPNESIKLQGKHLVDAAGRRFLIGKKTNNISFDSKDLYGVNTGSAWVRVQNVDRTIFHSGYDPTGASCSHYYATNHWFGKGHWLWMIPTDIETMELSIGVIHHHDYISSESLNSKEKFYEFLKANHNILYQLVTSAENIDFHYWPRLAHTSKTLYSPDNWYVIGDSACIFDAFYSLGSTMIVSAIDSITEIIRAKLAGEVNAAEKCQAYNQFNLTLINSINLFMHNHSRHLGDASIMSWRIYFENMIWFGILIPIFVGKWHLDLEFIPQFVQTFQTTLRSLVYEIHDQFDQLVDEKKNIGLMDCYRSDQLIWNYHTPKRYTHALENAQYEPKQTSVFTSMKKTFFYLTIWYLKLQWKSGGLSQVCHPRSLGTMAKLLTTSIYIGLGDIIYSLTGNHGSESRLIAEMRQAFQEYQYGDTLQPWTVEGVDTKSPEMEAEKVPLQV

SEQ ID NO: 83885 - protein, 504 aa, Sphingomonas sp.
  REGION 1..504: note = tr|A0A031HYZ4|A0A031HYZ4_9SPHN Tryptophan halogenase; OS = Sphingomonas sp. RIT328 OX=1470591 GN=BW41_01738 PE=4; SV = 1
MTAAHPNPPLKTVTIVGGGTAGWMTAALLSRLLLGAYTIRLIESAEIGTIGVGEATIPAIRTFNGLAGIDEFEFVRATQATFKLGIEFRNWGGVGDSYIHGFGKIGQDLYWLHCHQFWLKARAAGDARPFDHYSLNTLAARMNRFALPDPAHPHSPIADLDYAYHFDAALYAAFLRRRAEAAGVERIEGRIVAANRRGQDGFLDHVVLADGRTVDGDLFVDCSGMRGLLIGDAMGVGYEDWDRWLLCDRAIAVPSARQGPLTPYTRSIAHDAGWQWRIPLQHRTGNGHVYASRFVSDEAAARTLLAHLDTPAIGDPRPVRFRPGKRLRAWERNVVALGLAGGFLEPLESTSIHLIQTGILRLLALFPGRGFHPADIAEYNRQTDFEYRDVRDFIIAHYKVTEREDTPFWRYVKHMEVPDSLTERLALFAASARFFLHGSAELFREESWVQVLLGQRLHATYDPMVDMVPAEQATAFLHDVEEVIGEVAAGMPTHEAFIARHCQA

SEQ ID NO: 83886 - protein, 494 aa, Sphingomonas sp.
  REGION 1..494: note = tr|A0A031HXU8|A0A031HXU8_9SPHN Tryptophan halogenase family protein OS=Sphingomonas sp. RIT328 OX=1470591; GN = BW41_01784 PE=4 SV=1
MTAIDAPIERIVVVGGGIVGWSAAVALRRRVPDVAVTIVATPPSPDALADRIAQTLPSTIGFHDDLGLREEDAVLRAGGVWRLGTLFDGWAEGQPPYVHAYGPCGQPFGTASFHHHWLRAARAGTTAPFEAHAPAAALARAGRMPVPPAGPMAEVQAALVLDVPRYRGMLEAFGRHFGVVVRDGTVASVRLRGDDGFVAALALADGGEVTADVFVDASGPRALVRSAIDAQWEDWQPWLRCDRLVTGEGAAAPLTALDTVSALPAGWRWRSAAVGRTLHGLCYAAEFLSEAEAQQALTAAGATMVTPAASFRQGTRPAPWARNCVAIGDAATVIEPLDFTHLHLAQSAIDRIISMLPGRACHPLEIADYNRQASAEVMRVRDFVLAHYATARRPEPFWREPVALPPSLAETLALFGARGRLPFFEEETFSRDDWLAVLIGQGALPRRIDPLIDGTDAADSDRAMASYRGAIAEAVMRCPTLDDYYHSQRKRLSR

SEQ ID NO: 83887 - protein, 512 aa, Herbidospora sp.
  REGION 1..512: note = tr|A0A4U3MF76|A0A4U3MF76_9ACTN Tryptophan 7-halogenase OS=Herbidospora sp. NEAU-GS14 OX=2575442; GN = FDA94_19040 PE=4 SV=1
MIRSVAIVGGGTAGWMTATYLKAAFGDRIDVTVVESAQVSRIGVGEATFSTVRHFFDYLGLDEAEWLPKCAGGYKLGIRFENWSAPGEYFYHPFERLRVVDGFSLADWWLEHGDRSQPFDRQCFVTTALCEAKRAPRMLDGSLFAAGLDGSLGRSTLAEQRAQFPYAYHFDADRVAGFLAEYGVARGVRHVVDDVEHVAQDERGWISHIVTKERGELTADLFVDCTGFRGLLINQTMGAEFMSFQDVLPNNRAVALRVPRDEATDMNPYTTAYAAGAGWIWTIPLFGRNGNGYVYSDQFISPEDAERELRAHVAPGRDDLPANHIRMRIGRNRDAWIGNCVAIGLSGAFVEPLESTGIFFIQYAIEQLVKYFPDERWDETQRREWNTRMANAVDGVKEFLVLHYKSARREDTPYWKEAKVRQMPGSLAARLDLARSQLLDEETIYPNYHGFETYSWNTMNLGLGNVPAHPRPALRHMDPTQALAEFAQVKADADAMVAALPSCYDYLASIND

SEQ ID NO: 83888 - protein, 587 aa, Microcystis flosaquae
  REGION 1..587: note = tr|A0A3E0KZK2|A0A3E0KZK2_9CHRO Tryptophan halogenase; OS = Microcystis flos-aquae DF17 OX=2060470 GN=DWQ53_21820; PE = 4 SV=1
MMKTTNSVRQFVYDVVIMGAGFAGVCQARHLMLKVPNIKIALIDPRPENRSDKDLKIGESTVEIANLFICKELGLYEYMIENHPPKFGLNFHWPKDSHKTDTIEDYYHIWTNRQPPLASSQMNRAKFERDLLRMNKEMGVDFYNGRVVDVTIHPGNDPHQVKVKLHDEVIELTAKHLVDAAGRQFIIGKKTDNVIFDPEHLCGVNTGSAWVRVKNIDRTLFHSGYDPEATSCSHYYATNHWFGQGHWLWMIPTDTDTQEISIGVIHHHEIIPADYLNQEQKFYAFLKANHKLLYDLLSSGEKIDFHYWPRIAHTSKEVLSADNWYVIGDAAYIFDAFYSMGTSLTTFAIESVTEVIRSKLAGEADAEVKRIAYNQFNLAQAEGVNQLMRDHKTQLGHASIMSWRIYFEYIWWFGILVPLYVGKWHLNVSFIEGFVKIHRQTVNSLFVEIYEQLNQLVERKANLGLLDCYRGDQLLGDYQPPVHFDSFLENAQYEPFRSNIFTSIKYTHFYGAIWYLVFQWKGFGLGGVIAPKHLYHFLRLLLLSGVASFGEFYHRLKMKKIPHNHQIACTTEEFKHYQYQSSLNPWM

SEQ ID NO: 83889 - protein, 517 aa, Asticcacaulis sp.
  REGION 1..517: note = tr|V4P9R5|V4P9R5_9CAUL Uncharacterized protein; OS = Asticcacaulis sp. AC466 OX=1282362 GN=AEAC466_06965; PE = 4 SV=1
MASPLKVVILGGGTSGWMCAAALSAILKPGTPSSILDLRLIESADIGTVGVGEATLPHIKEFNDFLGINEAEFMRKTKATFKLGIEFRDWGQVGNSYIHPFGTFGQTLAGVEFQHYWTRAQALGEAASIEDYSYAIQAARGQKFDFPSEDKESIKSTFSYAYHFDAGLYAAFLRDFAEARGLKRTEGKVETVALKPDSGDIASLTLASGEVIEGDLFIDCSGFRGLLIEDHLHAGWEDWSRWLPCDRALAVPSERTDDFPSYTRSTALSAGWQWRIPLQHRTGNGYVYSSAFISDDDAQKALLANLDGAALMDPKPLRFKAGRRKKSWYKNCLTIGLSSGFLEPLESTSIYLVQIAVQTLIALFPSSKPGEPIDDKLADEFNRLIDIEYERVRDFLILHYHANTRTDSALWDYVRHMNVPDSLTHKIEQFKRRGYVKKYRDGLFSPPSWLAVFIGQGVVPHGYDRMADTMDDATVIEKLADMRVRIRANVDAMPDHADFVRDYCFVPPAKVMAEVSK

SEQ ID NO: 83890 - protein, 376 aa, unidentified
  source 1..376: note = Bacteroidetes bacterium
  REGION 1..376: note = tr|A0A136L8M8|A0A136L8M8_9BACT Tryptophan halogenase; OS = Bacteroidetes bacterium OLB8 OX=1617419; GN = UZ08_BCD001002150 PE=4 SV=1
MVEKEKFPRFVIGESLLPRCMEAFEEAGFMDDLKRQGYQTKNGALFLRGDDKCDFDFNTQYTQGWNWTWQVQRAKFDSCMTENLVNRGVDLRFEQTVKAIEFDGSDSTTTVEGKEGNQYKIRARFIIDASGYGRVIPKLFNLDRPSDLPPRMTLFAHVDDPRRGQFQAADRIHAIVQEPHTWIWSIPFSDGTTSVGFVSNPEYFEGLNGSPEENLRALIAREPSVSARFQGNKFLFEPRILKGWSISTDKFFGDGFVLTGNVTEFLDPIFSSGVTLAAASSQLAANIVVRKFRGEQVDWAADYLAPMLEGVDVFRTYVMSWYNGRLQKIFFSKTIDETIKAQLCSVLAGYVWDYSNPYVRKHKERVESLAAMVGGD

SEQ ID NO: 83891 - protein, 502 aa, Sphingomonas sp.
  REGION 1..502: note = tr|A0A031HYL9|A0A031HYL9_9SPHN FAD dependent oxidoreductase family protein OS=Sphingomonas sp. RIT328; OX = 1470591 GN=BW41_01783 PE=4 SV=1
MDGKRQRVVVVGGGASGWMAATALAKLLPTRCTVELVESEAIGIIGVGEATLPHIRAFNERLGIVEAEFMAATRATFKLGIEFRDWGRVGDSYIHPFGTFGRGSGEVQFHHYYTRLLRAGVTLPPIEAYSMACSLARANRFGPPARDPQQIASTFGYAYQFDAVAFAPYLRRLAERLGARRTEGRIVAAERDPASGSVTALILSDGRRVEGDLFVDCSGFAAILIGQEMAERFEDWSQWLPADRAVAMPCRTETAVTPYTSAIAMPAGWRWRIPLQHRTGNGYVFASDFLSESAATDALLASVEGTPLTDPRVLRFKAGRRTRSWVGNVVAIGLASGFLEPLESTSLYLVQQAITALVELFPERTIADVDRDAFNRLINMEYDRVRDFLILHYHATERDDSPFWRHMRTMAVPDSLAEKMALFRRRGRVVKYREGAFLDASWVSVYLGQRIVPAAADPRASAPSTDSLLAGLERMRGEITGAVGAMPDHAAFLADYCPMPAA

SEQ ID NO: 83892 - protein, 510 aa, Sphingobium sp.
  REGION 1..510: note = tr|A0A0Q4ITP8|A0A0Q4ITP8_9SPHN Tryptophan halogenase; OS = Sphingobium sp. Leaf26 OX=1735693 GN=ASE85_22080 PE=4; SV = 1
MSGEPLPPVKRVVIVGGGTAGWMTAAALSRLTDAGVAVTLIESEEIGTVGVGEATIPSLLDFNRYLGIDEDAFMAATGATFKLGIEFVDWADRGDRYLHPFGIHGRDVHGVKFHQIWLRQSRLAGRMGQVGNVSDYCLANQAAASGRFTRPVPDPAAVLSSFSYAFHFDASLYARFLRGLAEEAGVQRIEGKIVHVDIASDDGCIRAVELADGRRAEGELFIDCSGFRSLLLGDALGVPFTSWQHWLPCDRAVAVPSASTSAPLPYTRATADSAGWRWRIPLQHRVGNGHVYASAFIDDDEATAKILDNLDAPPLDAPRPLRFTAGVRERLWERNCIAIGLAGGFLEPLESTSIHLIQSGITRLMSLFPDTGPAIAERKEYNRLLRQEYEQVRDFVILHYHRTNRTDSDFWNYCRTMAIPTTLEDKIALWRAKGRIIRDQGGLFSDDSWIAVLMGQGLIPQSHDPLADALPIEEAGRFLDHLRDVIARTAAAMPRHIDFIASHCRSDLAA

SEQ ID NO: 83893 - protein, 504 aa, Erythrobacter sp.
  REGION 1..504: note = tr|A0A3N5DKM4|A0A3N5DKM4_9SPHN Tryptophan 7-halogenase OS=Erythrobacter sp. HN-E23 OX=2488860; GN = EG799_11980 PE=4 SV=1
MTDRPITRYCIAGGGTAGWMAAAALARFLPGGHTVELVESEAIGTVGVGEATIPQIHLFNGALGLDEAEFLRETKGSIKLGIEFDGWLREGAAYMHAFGNIGRSAGLLPFQHYWLRAHALGFAKPLQRYSLNELAGRTMRMQRGKTAGGQEMPYAYHFDAALYARYLRRFAEERGVTRYEGRIEQVERAGQSGDISALLLDGDRRIEADFFIDCTGFRGLLIEGALETGFEDWSDWLPCDRALAVACEGGGDFTPYTRSIARPAGWQWRIPLQHRLGNGLVYCSAQWSDDEAAETLLANLDGAPQTDPRPIRFTTGTRRRHWNRNCLALGLAAGFMEPLESTSIHLVQSAISRFLAVLPHAAPDPAIVGWFNQQARFEWERIRDFLILHYTANDRVGQPFWDQVRTMIPPDTLTAKLDQWRATGFIHREHEELFTDVGWFQVLVGQGVAARGYNRLADAMPEDDLRRFLGETERALIEQVKPMPRHLDFLRDCIARSERQGVDA

SEQ ID NO: 83894 - protein, 518 aa, Pseudoalteromonas atlantica
  REGION 1..518: note = tr|A0A510ZJV4|A0A510ZJV4_PSEAF Tryptophan halogenase; OS = Pseudoalteromonas atlantica OX=288 GN=PAT01_14990 PE=4; SV = 1
MNQQNKKIKTVVVVGGGIAGWLTAGRLAAHHKSNTPDGLNVVLVESPNVPIIGVGEGTWPTMRSTLIALGISETDFIRECEASFKQGAKFAKWVDGSNDDFYYHPLVLPQGFSKTDMAGHWLNNTAESTSFSNAVCYQEAICEQGLAPKTIRTPEYAALANYAYHLDSAKFAVFLQKHCTQELGVKHFLADVTQVNSAKNGDIASVTTKQQGEISGDLFVDCTGFSSLLLGEHYKVPFMPCDDVLFIDTALAVQVPYENEDESIASHTISTAQEAGWIWDIGLQHRRGVGYVYSSKYSSEAQAREKLKEYVGDKIESLTIRKIPIKSGHRSHFWQNNCVAVGLSAGFLEPLEASALVLVEMSAQMISEQLPHTRDIMDITAKRFNETFSYRWEKIIDFLKLHYILSTRDDNAFWRDNRDPKTIPQSLQDLMKLWQYRAPADHDFTSNNEVFPAASYQYVLYGMGFKSDYSTISYMLKDTDFAKSQFDKNKSMINQAVTNLPSNRELLNKIKSHGFSTI

SEQ ID NO: 83895 - protein, 512 aa, Azospirillum sp.
  REGION 1..512: note = tr|A0A239A3B4|A0A239A3B4_9PROT Tryptophan halogenase; OS = Azospirillum sp. RU38E OX=1907313; GN = SAMN05880556_101400 PE=4 SV=1
MGERIRDLVIVGGGTAGWMVAAAMADHFRGSGPRITLVESSTIGTIGVGEATIPTIRRFYQSLGLRDLDVLKATHGTVKLGIRFDGWTGDGGGFIHPFGLHGQDLRGIPFHHYWLRARTAGLGGAFGDYSLAVALAKAGRFTLPSANPPSTLSVFDWALHFDAGLFAGLMRQVAEQRGVRRIDARIEQVQQRGEDGHITGLLLDDGRVVTGDLFVDCSGFQGLLIEGAMQAGYQDWGQWLLCDRALAAQGPALSPPPPFTRVTAQQAGWRWTIPLQHRTGHGYVYSSRHIDDAAAEAELLAAIGAKPTVGPRRIAFTPGRRTQAWKGNCVSIGLSSGFLEPLESTSIALIETGIEKLKQLFPDRDMDPTLAAEFNDWSRREMERVRDFIILHYWLNRRGEAFWQDCRAVDLPDSLAHKVDLFRRRGHLVRYRWEMFHPDSWLAIFAGFGFLPERYDPALDGMDVASLDRALAGMRQAIATAVADCPSHEEFIEHYARVAAPTLSTSTAGNAR

SEQ ID NO: 83896 - protein, 501 aa, Erythrobacter sp.
  REGION 1..501: note = tr|A0A3N5DHA4|A0A3N5DHA4_9SPHN Tryptophan 7-halogenase OS=Erythrobacter sp. HN-E23 OX=2488860; GN = EG799_05000 PE=4 SV=1
MTIEHIVIVGGGTAGWMAAAALSRLRAGRELAITLVESESIGTVGVGEATIPPFVEFNQLLEIDEAEMLAAVQGTFKLGIQFRNWGRQGDSYIHPFGNYGYQIGSVGFHHVWHHARAHGDKRPIQVFNAETMAAYFGRFQRTQGMDRDDLPPINYAYHIDASRYAGFLRRYAEKRGVVRQEGRVEDVALHGDRGDVVSIRLESGEVVAGDLFVDCTGFRGLLIEQALETGYEDWTHWLPCNRAVALPCHRDDGSGPPPFTVATAHAAGWQWQVPLQHRNGNGHVYCDAYMDADEATDILMANMAGKPTAEPNHLRFVTGRRRLFWNRNVVALGLSAGFMEPLESTSIHLINTGVTKLIATLSLDGITDAQRNTFNRITGREYEKIRDFLILHYHATARDDSEFWNYCRTMSVPDSLTEKIALFRDTGQIFREEDELFTETSWAAVMMGQGIAMRGHNALADTLDPAKTRKELDEIEKSIRFLVQHMPAHADFLAGYCPGTP

SEQ ID NO: 83897 - protein, 511 aa, Pseudoalteromonas sp.
  REGION 1..511: note = tr|A0A1I6X9R8|A0A1I6X9R8_9GAMM Tryptophan halogenase; OS = Pseudoalteromonas sp. DSM 26666 OX=1761892; GN = SAMN04487870_0056 PE=4 SV=1
MDIKKVAIVGGGTAGWLAANHIGKEMLNRKGISVTLIESPDIPPIGVGEGTVPDIRNTLKSFGIREDEFIRQCDATFKQSIKFINWMDKKKHGEGNFFHHLFDVPSPYDAKHLTSYWLNNKEESQSYAQGLSSQYVICEAGLAPKNITNAQYEGELAYAYHFNAGKFAQLLACNAKEKFSVEHIHTHVTQVKLGDDGAIAALITDNNEELEFDFYIDCSGFESLLMSKALKIPFVDVSESLLINSALVVQVPTKADDAIPPYTLATAHQAGWIWDIALTNRRGVGFVYSDNHMTDEQAHEKLDRYLGDSKQDLTYRKIPMRVGYRKKFWHKNCIALGLAQGFLEPLEATSILLTDFSAKFLTLRFPSSTTQLEQLEERFNHAMGYAWERVIDFIKLHYCISDRTDSAFWIANKNQDTISTSLKEKLNLWKEFTPVRDDFFSQFEVFYLENFLFVLYGMNYNTKASNSPDKEQAHCLARLNQRAEIDHYLINKLPDHRALLNKIKQYGLQSI

SEQ ID NO: 83898 - protein, 489 aa, Sphingomonas sp.
  REGION 1..489: note = tr|A0A031I0N9|A0A031I0N9_9SPHN FAD dependent oxidoreductase family protein OS=Sphingomonas sp. RIT328; OX = 1470591 GN=BW41_01306 PE=4 SV=1
MNPPIRSVVIVGGGTAGWMAAAAAARFLNDGQRTITLIESEAIGTVGVGEATIPPIRGFNARIGLDEASFLRATGGTPKLGIEFVGWGALDERYMHPFGTVGHEIEGLNFHQLWLRLRDRAEIGSYGDYAIAAVAARAGRFAPPAGDPRSPTGQLDYAYHFDAGLYAALLRGHAEAQGVTRIEGRITGVERDARGHVAAVRLEGDRRVAGELFLDCTGFRSLLLGETMGVAFEDWSHWLPCDRAIALPTARQGPLLPYTRATAHDAGWQWRIPLQHRTGNGHVYASAFTDDETAERVLMANLDAAPTAEPRRLSFRAGRRTKLWAGNVVALGLAGGFLEPLESTSIHLIQDGISKLFALFPDQGFGTVERDEYNRLMGDQYAAIRDFIILHYAATRRDDTPFWRHVGTMALPETLIRKLALFREKGRIFRYDDELFTVPSWVAVLLGQGIVPSGYDPIVDALDADRVAGALRQMRRGYAAAAAAMPALG

SEQ ID NO: 83899 - protein, 525 aa, Sphingomonas sp.
  REGION 1..525: note = tr|A0A0Q5V6Z0|A0A0Q5V6Z0_9SPHN Tryptophan halogenase; OS = Sphingomonas sp. Leaf198 OX=1736299 GN=ASG20_06605 PE=4; SV = 1
MSVTDGAGATRNSGPLRSIVIVGGGTAGWMAATLLARKLDRQSVTITVVESSDIRTVGVGEATVPGIRDFFREIGVTEQEVMAAAQGTVKLGIEFVDWKREGERFFHPFGLYGMRSRGVAFHHYWRKLNAAGQTTPLSDFCLATALAERNLFMRPTDSPVHDLLFFDWAVHFDAGLFAKFLSKKAGEWGVKHIDATITDVLVDQSTGLISSVDTQCGKTIAGDLFIDCSGFRSLLLGDALGVPYEDWTNLLPCDRAVAMPCERAGPLTPYTRSTALTAGWQWRIPLQHRVGNGYVYASRHISDDEAVATLKGRLEGEALAEPNMIRFRTGRRTEFWKGNCVALGLAAGFMEPLESTSITLIQTGLEKLLALLPDRGFDPALADEYNRTTGLEYARIRDFLVLHYFANGRQGQPMWDRCRGTALPEQLARKLTLFKARGHLVRYEWESFQDPSWLSMYAGFGIDAAAHDPLADHFSLSDLEAAFERMKGSIRDAVALAEPHETFLKSFAPASAPPASRSMNFTANG

SEQ ID NO: 83900 - protein, 499 aa, Sphingomonas sp.
  REGION 1..499: note = tr|A0A0Q5P662|A0A0Q5P662_9SPHN Tryptophan halogenase; OS = Sphingomonas sp. Leaf343 OX=1736345 GN=ASG07_13150 PE=4; SV = 1
MEQQARIRRVVILGGGTAGWMTAAALSRSFGRSISITLLESEEIGTVGVGEATIPTIHWFNDLIGLDEAEFLRATKATFKLGIEFVDWTAPGSRYFHPFGHFGAALPGVAFHHRWLKARAEGLDMPLSDLSLAGRLAAQGRFAKPGGDGRSILSTLGYAYHFDAGLYAAYLRGLSERHGVRRVEGKMQAVERHPETGFVTALTTERGERMEGDLFVDCSGFRALLVEKAMGEAFEDWSHWLPCDRAVAVPCARTTATPPFTRSTARAAGWQWRISLQHRTGNGYVYASRYISDDEAAATLLANLDGEALAEPRMLCFAAGMRRRAWRGNVVAIGLASGFLEPLESTSIHLIQSGITKLLTLFPDRDCDPALADRYNQLLGRDMDGIRDFLILHYHATSGRDEPLWRRCQTMALPDTLLIREEQYRRSGRLMLDPEELFRDASWLAVLNGQGITAAGYNPLADAIDSATNRAQVQQIADVIARAAPTLPLHDTALAELMA

SEQ ID NO: 83901 - protein, 501 aa, Sphingomonas sp.
  REGION 1..501: note = tr|A0A0Q5URE4|A0A0Q5URE4_9SPHN Tryptophan halogenase; OS = Sphingomonas sp. Leaf198 OX=1736299 GN=ASG20_05805 PE=4; SV = 1
MVEQRIRKVVIAGGGTAGWLAAAALTRQLGQLLDITLVESEEIGTIGVGEATIPTMRAFHTILGLDEREFMRATQATFKLGISFENWARDGDRYIHSFGDIGKSTWMGDFHHFWLAAKAAGDPSEIGDYCLELQAAKAERFALPSEGQINYAYHLDAGLYARFLRARSEANGLKRIEGRIASVDRDGETGFIRALVLDSGERVEGDLFLDCTGFRGLLIEGTYGAGYEDWSHWLPTNSALAVQSAAIGPAHPYTRAIAHDAGWRWRIPLQHRVGNGLVYASDHLSDDEAHARLLGAIGGAPLTEPRLIRFRTGRRRQVWMENCVALSLAGGFVEPLESTSIHLVMTGLMRLMQAFPFGGIAPSLVTRFNDQAQAELERVRDFIILHYHLNERPEPFWAARRDMLIPDTLVERIALFTEGAQAYQGGEDLFRVASWVQVMLGQRLTPRDHHRLGNIMGGPQLASVLTNIRSTIADAVAGMPTHQQFLDRYLATPTAAASGIR

SEQ ID NO: 83902 - protein, 483 aa, Sphingomonas sp.
  REGION 1..483: note = tr|A0A031HZW8|A0A031HZW8_9SPHN Tryptophan halogenase family protein OS=Sphingomonas sp. RIT328 OX=1470591; GN = BW41_01307 PE=4 SV=1
MNRREALHDIVVVGGGIVALTAAIAFARALPRATVSLVATKADPAALADRLPAVTPAVAEMFETLGLDEAALVAGGVATHRLGERFAWGEPAFTVGEGDGVANLAGAPPHQLWRAHGEGAFETLVPAAVLAQAERFAPPAEDRASLLSSLNYTLRLDPEALTPALLAAMRAARVRLIAPTSLSVERQAGQTVALLVDGGTRLTADLFIDASGPAALLAAEDAAWVDWRATLPVDRLLLAAAAARPSPLDRYEAGSHGWGARWPLARRTLVGFAYARETTNDARAAKELPGPAERIALHPRRQVAPFAGTVLAIGDAAAALGPLGWPGYTLALAQLELALSLMPARTPEPLLIAEYNRRATLRAERLHAYAAAFYLAGTARRGGFWHAARKAEPPAELATALAQFGQRGTLPPVEEEMVAPAQWWQALIGLGVSPQRRDPVALSVPRVSAIAAMTQLRTAIAALPAQLPPYPAWLAQAGGARSR

SEQ ID NO: 83903 - protein, 508 aa, Pseudoalteromonas atlantica
  REGION 1..508: note = tr|A0A510ZL44|A0A510ZL44_PSEAF Tryptophan halogenase; OS = Pseudoalteromonas atlantica OX=288 GN=PAT01_19020 PE=4; SV = 1
MNKAIKTIAVIGGGTAGWLSAAIIASYHQGNKGDGLKVMLVESSDIPTIGVGEGTWPTMKNTLQQIGLREVDVFKACNATFKQGGKFVNWTHGNNDFYYHPFTVPLGYGRIDLAPYLDNVENFAQQTNFQHDICEANLAPRGIAQGEYQANCNYAYHLDAGAFAELLKQHCKSKLGIEHIIGTVDQVKLDESGAIDTLTLTDQTRTINADLFIDCTGFSSLLLGQALNVPFKKMDHVLFNDSALAMQVPYDEGDESLASHTIATAQNAGWIWDIGLTHRRGVGHVYSSKFLSDEEAEQNLRNYLGDAAKGLTARKISFESGYREKFWHKNCVAVGMSAGFVEPLEATAIMLVEISSRFVAEHMPADTQVMSIVAKRFNEQMDYRWQRIIDFLKLHYMLTKRPEPYWQAHVQPQSIPQSLQEDLLLWGTRGPLIQDFHGALELFPAASYQYVLYGMGFKPDFTKQAYLYSNDAQASQIIERNSQLTQQMLQTLPPHRAYIEQWLAANPV

SEQ ID NO: 83904 - protein, 501 aa, Sphingomonas sp.
  REGION 1..501: note = tr|A0A031I7K1|A0A031I7K1_9SPHN Tryptophan halogenase; OS = Sphingomonas sp. RIT328 OX=1470591 GN=BW41_00469 PE=4; SV = 1
MTEPPVTTIVIAGGGTAGWMAAAALGHLLEDGYRIHLVESEAIGTVGVGEATIPQIRLFNQALGLDEDAFLRATGGTFKLGIAFDGWGAPDESYMHGFGDVGRDVGLIAFQHYWLRARRLGLAGPLDGYNLNTIAARAGRMHRGDPLTAATIPAMPYAFHFDAGLYAAYLRRFATNRDVERSEGRIVRVERDGEGGDVTALLLDSGARIAGDLFIDCTGFRGLLIEETLGAGYEDWRQWLPCDRALALPTEAAAAPLPYTRAIASAAGWQWRIPLQHRTGNGYVYCSDFTSDAAAAATLTATVEGAPLGDPRPLRFVTGRRKQAWQRNVVAIGLASGFLEPLESTSIHLIQSAIARLVKLLPALPVAAALRDEYNRQTAFEIERIRDFLILHYWANGRSEPFWQACRAMALPDSLRARIALWQEAGVIVREADELFTEDGWLQVLAGQGVAAGAHHPLADRIAPQDLGDYMKTLDLLYRREAGVMPRHADYVARHCAMPAR

SEQ ID NO: 83905 - protein, 521 aa, unidentified
  source 1..521: note = Litorilituus sp.
  REGION 1..521: note = tr|A0A502L1W4|A0A502L1W4_9GAMM Tryptophan 7-halogenase OS=Litorilituus sp. RZ04 OX=2491017; GN = EPA86_03535 PE=4 SV=1
MQAKEKKISHIVIVGGGTAGWLAASHLAKQLRPNAADGVKVTLIESPNIPTIGVGEGTVPMMRNTLKDLGITETEFFKHCDATFKQGIKFVDWLDNPTNEHSSYYHHLFDYPEIDHFDATPYWLKGLAGEGRSFADCVSLQGIVCDAELAPKKITTPEYEGITSYGYHLDANKFSALLTKNAVERHGVQHIKAHVEEVCLNDDGEIHSVITKEKGEISGDFFVDCTGFDCLLLGKTLGVPFVDKSDVLFVDHALTIQIPYESEDATIPSYTISTAMEAGWIWDIGLLERRGVGHVYSSKYTSHEEAEKALRAYVGPMADKYPTRLIPMNIGHREKFWHKNCAALGLAQGFVEPLEATGLLVFDATAKMLAAQFPTQKNTMNIVAKQFNERIKLSWESVIDFVKLHYYLSRRDDNQFWLDNRKAETTPDTLLERLELWKTQLPNALDFYSGYEIFKLENYLYVLYGMEFSTDIEALSHRYPETEKAKQFFSAIEKAAAKLKGDLSSNRELVNKILSFGLQKV

SEQ ID NO: 83906 - protein, 530 aa, Actinopolyspora mortivallis
  REGION 1..530: note = tr|A0A2T0GYW2|A0A2T0GYW2_9ACTN Tryptophan halogenase; OS = Actinopolyspora mortivallis OX=33906 GN=CEP50_06405; PE = 4 SV=1
MNDSVESIVILGGGTAGWMSATYLKKALGDTVHITLVAAPDIPTLGVGEATIPNLQTAFFDFLGIEEDEWMRECNASYKMAIRFVNWRTPGPGRPVPRGSDDGEDEFYHSFGILPYHHGIPLSHYWFDRRWRGRTTRPFDRSCYREPPVMRARKSPRWADGTRATNYAWHFDAHLVADFLRRVATERFGVHHVEDRLEHVRRRPSGFIDAVTTGEGRTLEADLFVDCSGFRGLLINQEMEEPFLDMSDHLLNDSAVATAVPHDDSAHGVEPYTSAIAMPSGWTWKIPMPGRFGTGYVYSSAFATEDEAVRDFCALWGLDPERHQLNRIRFRVGRNRRAWVRNCVGIGTSSCFVEPLESTGIYFIYAALYQLVKHFPDKSFDQVLIDRFNREIEVMFDDTRDFIQAHFHCSPRTDTPFWRANKEIALGEEMREKIRCYDAGLAINAPATDDAQVYYGNFEEEFRNFWNNSNYYSVLAGLGYLPDKPLPKLRHMPEAVETVDRVFDRIRDEQKYLLNTLPSCHEYLNAQHGR

SEQ ID NO: 83907 - protein, 506 aa, unidentified
  source 1..506: note = Litorilituus sp.
  REGION 1..506: note = tr|A0A502LBL5|A0A502LBL5_9GAMM Tryptophan 7-halogenase OS=Litorilituus sp. RZ04 OX=2491017; GN = EPA86_01205 PE=4 SV=1
MKIKQVAIVGAGTAGWLAANHLGSELQSEDIQITVIESDKVPTIGVGEGTVPYIMKGLERFGISEAELLVSCDATFKQGIKFVNWMKPTQEAEHFYYHPFDAPYPGGFDVSRHWLNNEPTRPFDDVGIQARICELGLAPKRKSSGEYQGDLAYAYHFDAAKFAKLLADNAKKKFNVNHIIETISGVKKDRNGSITHLLTESNAELAFDFYIDCSGFSSVLIDKELNVPFIKKDKELLTDTVLVQQVPVTEDEELNPYTTATAHKAGWVWDIPLTTRRGTGFVYSSKHMSEAEAKACYAKYLGVNEEGFTPRKVPMEIGYRESFWQNNCVALGLAQGFLEPLEATSILLSDFSAELLAKNFPRQTADIECANTYYNKVVTYAWERTVDFIKLHYCLSDRDDSAFWQENREQSSFSTELKQRLNKFKLRPPQQSDFFSRFDMFDDKNFLYVLYGMNFTTKKSIISEHEQSHSKKLLEHNDQLVKQAATNLLNHKTWLYGLKKAMLNRQ

SEQ ID NO: 83908 - protein, 520 aa, Streptomyces rimosus
  REGION 1..520: note = tr|A0A5B7YVZ8|A0A5B7YVZ8_STRRM Tryptophan 7-halogenase OS=Streptomyces rimosus OX=1927; GN = CTZ40_09640 PE=4 SV=1
MLTNVVIVGGGTSGWMSASYLKAAFGDRLSVTVLESKRIKTIGVGEATFSTVRHFFDYLGLPEHVWMPKCNATYKLGIRFENWHRKGSYFYHPFERLRVVDGFPLTDWWLHRKPGNSERFDQDVFLMSAICDAERSPRYMDGTLFEQDFKEQTDPKDRKPERSTLTEQDTQFPYAYQFDASLLADYLCAYSTERGVRHIEDDVVEVARDDRGWIGHLRTREHGEVTADLFIDCTGFKGLLLNEALEEPVISFQDTLPNDRAVALRVPVDMEKRGLRPCTTATAQDAGWIWTIPLFGRIGTGYVYASDYTTPEEAERTLREFVGPDAKDVEANHIRMRIGRSRNAWVNNCVAVGLSSGFVEPLESTGIFFIQQGIEQLVKHFPGADWNPQLRDSYNRAIGNTIDGVREFLVMHYRGAGRNDNQYWKDAKTRALPDGLAERLDMWRSKLPTTETIFPNYHGFEPYSYHSMLLGLGGVDLKAPPALALMDDSAAQAEFKLLRAQSQELAKRLPSQYEYLAQMH

SEQ ID NO: 83909 - protein, 547 aa, Sphingomonas sp.
  REGION 1..547: note = tr|A0A0Q5UDM1|A0A0Q5UDM1_9SPHN Tryptophan halogenase; OS = Sphingomonas sp. Leaf198 OX=1736299 GN=ASG20_16875 PE=4; SV = 1
MNEHSIRRVVIVGGGTAGWMAAAAFARFLNNGYTEITLVESEEIGTVGVGEATIPPLINFNQMLGLDENAFLAATSGTFKLGIEFVDWGALGERYFHPFGNYGHDLQGVHFHQLWLREKARRPIDDISAWSMSAMAAANGKFGRATGDARSPVRELFYAFHFDASLYARYLRDYAERAGIVRIEGKIAQVNQRPADGYVAAVTLEDGRRIEGDLFIDCSGFRGLLIEETLHTGYESYAQWLPCDRAIAVPCALPNPSEPDAFTRSTAHKAGWRWRIPLQHRMGNGLVYCSKYLGDDEAEAQLLASLEGEQLAEPRRLQFTAGRRRDCWNRNVVALGLSSGFIEPLESTSIHLVQAGIQRLIALFPDKRFDPVERDEFNRQMHDLYEDIRDFIILHYKATRRDDSPFWNQVRTMDVPESLQRKIDLFAGKGRLFREGYDLFSNPSWVAVCLGQGITPQGWEPAADALDEQKVASALEQMRRGYLDTAQRLPTHGEFLRRTALSPLAAQAASPPTTPASAPAPTSSDDLPFFAFTAESPFDVGGGGSPL

SEQ ID NO: 83910 - protein, 384 aa, unidentified
  source 1..384: note = Bradyrhizobium arachidis
  REGION 1..384: note = tr|A0A1I7M753|A0A1I7M753_9BRAD Tryptophan halogenase; OS = Bradyrhizobium arachidis OX=858423; GN = SAMN05192541_13039 PE=4 SV=1
MRARWRDEAASQQDNAAIIVDRTLFDRFLIEAARKAGVTVLCPARARRPAFVDERWIIPIDARDAGALVVEAQFLVDATGRRGGCRPAGAPTIALCGRWQGKVSSSPAEMCIDAGEHAWFWAAPLSHDSATAQVFIHPQSYTRRGAADCATLYRTLLDQSRLAREFLRGLSLADIRIRDATFRVDNETVTPNSIKVGDRAFAMDPLSSQGVQAAIRSGLQASAVIHTILRRADLEAALEFYRATLQGAVKVHDRHASEVYASQALYASSFWQSRSSTRSLEEKKPAASIRISDNPELMLSQNARLIALPVIEGDEIRRRTALTHPGLERPVAWLGGVPLGTVLSAIRSKRPAASILAEWSGQTTPAQAHALLDWMIAREILVNA

SEQ ID NO: 83911 - protein, 497 aa, Erythrobacter sp.
  REGION 1..497: note = tr|A0A3N5DMQ1|A0A3N5DMQ1_9SPHN Tryptophan 7-halogenase OS=Erythrobacter sp. HN-E23 OX=2488860; GN = EG799_11440 PE=4 SV=1
MSEAGDSGPRISRVVVAGGGTAGWTVAAALVKALGRLLTITVVESDQIGTVGVGESTIPTARRFHELLGIDEKTFVQATNASFKLGIKFQDWLREGESYFHSFGTSGRSNWLADFHHIWLRARELELAEEYGAYCLEHHAALSGKFACGAGSGLNYAYHLDATSYGGFLRQHAEANGVLRREGRIARVRRDGETGDIAALEMEDGEAIEGDLFVDCTGFRALLIGETLEVPFADWTHWLGCDRALAVQTEPVGPPPPYTRARAHRAGWQWRIPLQNRVGNGLVYASERLSECEAQSLLRERTDGAYVTEPRLIRFRTGMRRTMWERNCIAIGLTGGFVEPLESTSIHLIMTAAIRLLQLFPFDGMTAAGQSRFNVVGRREMEHIRDFIVLHYHLNRRQEPFWREAADMEIPDTLTARIEAFAEGAIAWQEPDELFRIDSWVQVMLGQGIVPSSHHAFARMMERETLAKSLAGLSGNIRSATSQLPDHGDFLSRYPAG

SEQ ID NO: 83912 - protein, 512 aa, Pelomonas sp.
  REGION 1..512: note = tr|A0A0Q7SFT3|A0A0Q7SFT3_9BURK Tryptophan halogenase; OS = Pelomonas sp. Root1444 OX=1736464 GN=ASD35_07425 PE=4; SV = 1
MSDDQAIRRVVIVGGGTAGWMTAAPLGQLMGRGEHAARCEIVLVESPEIGTVGVGEATLPTIRYYNRTLELDNAEFIRKTQATFKLGIEFKDWGHLGNHFFHGFGEFGPAILNRSSVMHWLRLHHLGGMDSHEEWSTATVMARRNRFVPPEGDLPSAANAYSYAFHFDAGLYAAFLREYAMARGVKREEGTIVDVSVRPGDGFVTAVTLADGRRIEGDLFIDCSGFRALLIEGVCKAGYHDWTHWLPCDSAQAVPCDKVAPLTPYTTSTARSAGWQWRIPLQHRTGNGHVYCSAYTSDQEAGQVLMRNLDGAAQADPRQLRFKTGMRKKAWDRNVVAIGLSSGFLEPLESTSIQLIMDGVGRLIELFPDRRCDVHLAAEYNRRMARQYESIRDFIVLHYKLTKRDDSEFWRYCAAMSIPDDLKHQIEIFRRSGRVAILDPDSFAEPSWVSLFLGLGCWPQRHDPLLAQVDEQALRTHFERLRAAISGTVDDMPDHGAFIEKHLRAAPMEMVK

SEQ ID NO: 83913 - protein, 562 aa, Ruegeria atlantica
  REGION 1..562: note = tr|A0A0P1EM76|A0A0P1EM76_9RHOB Flavin-dependent tryptophan halogenase RebH OS=Ruegeria atlantica OX=81569; GN = rebH PE=4 SV=1
MNNRLRKITIVGGGTAGWMTALILDMVFSRTSAPKDRPRICLIESPNIATVGVGEATVPRMPVTLRQAGISERDFFRETNASFKLGVKFCNWNKDAKGNRIDYVNPFAHGQLLEGLEAAEYFLRFGNGDRDFTQSISPHDDLARLCKGGRPLGQPEFEQRFGYAYHLDAVKFAGMLTKVCTKRGVEHIQDEVQAVELDEQGNVSHLMLARKGRHDIEMVIDCTGFRGLIINKALGEPFMDYSDYLPNDRAMALQIEHPDPEKIESVTRSTALGAGWTWRVPLYNRVGTGYVYSSAHRTDDQAADEYLEWLGDSGKGLTPRVIPMRIGRVRNAWVKNCLAIGLSGGFIEPLESTAIHMVDHAVRWFAEHLPTRDIEPSLRARYNRQMNKMYDEVLDFICLHYRLGNRTDDQYWIDARTEMKIPDRLAENLELWQHRLPMEHDIEFATLFNFRVYQTVLLGKQVYDTGYGTGIRDRLRPLKKPIWFQWWKGAKVDLAQILKAMPDHKTLLRDIRGELEQPPAFGMAAAMQPTVAMPGEQLAPVAIQNMPNLAEIQSGKKDLQLF

SEQ ID NO: 83914 - protein, 505 aa, Sphingomonas aerolata
  REGION 1..505: note = tr|A0A2T4YMJ7|A0A2T4YMJ7_9SPHN Tryptophan halogenase; OS = Sphingomonas aerolata OX=185951 GN=C8J24_2841 PE=4 SV=1
MTTPPIHRVVIAGGGTAGWMAAAAIARTMGRTVAVTLVESEAIGTVGVGESTIPPIVTFNRLLGINEAEFMRETQATFKLGILFDNWKDRGDTYFHSFGTTGKDHWSAGFQHFWLHGLTRGHHQPFDDYCLELRAALQGKFAHLPDGRMNYAYQLDSGLYARFLRKMAEADGTTRIEGRIAQVELNGESGDIAALTLDSGARIEGDLFLDCTGFRALLIEQALHAGFDDWTHFLPCDSAIAVQTESARPALPYTRAIAHDAGWQWRIPLQHRTGNGIVYCSRYLDHDAALERLLGTVEGPTLTEPNRIRFVTGARRQQWHRNCVAIGLSGGFMEPLESTSIHLIQRAILRLLRMFPSAGISPRDVAEFNEQQHTDMLQIRDFLILHYKATNRRDSAFWRQCASMPVPDSLAHKIALFRETGRVFRKNDELFAENSWVQVMLGQGIVPESYHPIATKMRDDELVRLLCGLRDTTNATVDALPDHAAYVAHYCSTAPSASAGSPHLG

SEQ ID NO: 83915 - protein, 513 aa, Pelomonas sp.
  REGION 1..513: note = tr|A0A0Q6T7U6|A0A0Q6T7U6_9BURK Tryptophan halogenase; OS = Pelomonas sp. Root1217 OX=1736430 GN=ASC95_25360 PE=4; SV = 1
MRDDQAIRRIVIVGGGTAGWMTAAPLGQLMGRGEHAASCEIVLIESPEIGTVGVGEATLPTIRFYNRTLQLDNVEFIRKTQASFKLGIEFKDWGHLGNRFFHGFGEFGPAVFNRSSVMHWLRLHQQGGMDSHEEWSTATVMAQRNRFVPPEGDLPSAANAYSYAFHFDAGLYAAFLREYAMERGVKREEGTIVDVSLRPGDGFVTAVTLADGRRIEGDLFIDCSGFRALLIEGVMKAGYHDWTHWLPCDSAQAVPCDKVQPLTPYTTSTARSAGWQWRIPLQHRTGNGHVYCSGYMSDEAAGQMLMQNLDGAPQSDPRQLRFKTGMRKKAWDKNVVAIGLSSGFLEPLESTSIQLIMDGVGRLIELFPDKRCDRYLADEYNRRMTQQYESIRDFIVLHYKLTKRDDSEFWRYCAAMSIPDALSHQIELFRRSGRVAILDPDSFAEPSWVSLFLGLGCWPERHDPLLRQVDEQALRAHFQRLRAAISQTVDGMPDHGAFIDRHVRAPAMEAVKP

SEQ ID NO: 83916 - protein, 521 aa, Xanthomonas citri; identical to SEQ ID NO: 83608
  REGION 1..521: note = tr|H8FH58|H8FH58_XANCI Tryptophan halogenase family protein OS=Xanthomonas citri pv. mangiferaeindicae LMG 941; OX = 1156940 GN=XMIN_2686 PE=4 SV=1

SEQ ID NO: 83917 - protein, 521 aa, Xanthomonas phaseoli
  REGION 1..521: note = tr|A0A1V9HD44|A0A1V9HD44_9XANT Tryptophan halogenase; OS = Xanthomonas phaseoli pv. dieffenbachiae OX=92828; GN = IM53_006505 PE=4 SV=1
MPDTTPSDPQQRPVRHVVIAGGGTAGWMAAAALSKLLGRHLQITLVESDEIGTVGVGEATIPSLVTFHRLLEIDEAAFMAATQATIKLGIAFEHWRDVDQHYIHSFGHAGTDHWSAGFQHFWLKGRQRGVARDFGDYCLELRAAQEGRFAHLPNGGMNYAYHLDAGLYARFLRRFSEGFGVQRIEGRIGQVETDPESGFLTALTLHNGARVEGDLFIDCTGFAGLLIGKTLGVGSDDWSRWLFADSALAVQTESVGPPVTYTRSRADQAGWMWRIPLQHRVGNGIVYSSRYMDQDGARAVLERNLTGRALTEPRPLRFTPNQRHRVWEKNCVALGLASGFLEPLESTNIHLIQRGIIRLLQTFPQVINAVDIAEYNRQAAQEITHIRDFVILHYHATDRRDTPFWRDCAAMDIPDSLRHRVELFRQSGRVFHQANELFAENSWVQVMLGQGIVPQQHHPVADLMGGAELGRFLETIRTRVEAALVRLPAHADFLQRYCPAPPLPEPAARAPAPHVMATPAG

SEQ ID NO: 83918 - protein, 495 aa, Pseudoalteromonas sp.
  REGION 1..495: note = tr|A0A0W1L4K2|A0A0W1L4K2_9GAMM Tryptophan halogenase; OS = Pseudoalteromonas sp. 10-33 OX=1761890 GN=ATS76_04020; PE = 4 SV=1
MTKTNAVKNVVIAGGGTAGWMAAAALAKLIGKNIHVTLVESDDIGTVGVGEATIPPIRTFHKLLGINEQTFMKATQASFKLGISFENWGDENTRYIHSFGATGKECWAGEFHHFWLQGKTLGIHNPFGDYCYELQAAKAGKFAFNQQNPINYAYHMDATRYAQFLREFSEPLGVKRVEGKIQKVVKNAKTGHIESLLLNSGEQINGDFFIDCTGFRGLLIEQALHTGYEDWSHLLPCNSAIAVQTKSTSNTVLPLTRSIAHKSGWQWRIPLQNRVGNGLVYCSQYMDDEQAKALLLNNIEGEALTEPRVIKFKTGRRLKGWNKNCLALGLASGFVEPLESTSIHLIMSGIIRFMRLFPFNGITNHAIDEYNKQLKSEIENIRDFIVLHYKVTNRDDSEFWLHCSAMEVPKTLKHKIDLFKQTGRVFLDDGDIFRVDSWVQVMLGQGIGPEQHHLIASMMSDEELTRFLHGIKQQIEQRVSQLPPHHEFLKHYCPA

SEQ ID NO: 83919 - protein, 467 aa, Sphingomonas aerolata
  REGION 1..467: note = tr|A0A2T4YTT3|A0A2T4YTT3_9SPHN Tryptophan halogenase; OS = Sphingomonas aerolata OX=185951 GN=C8J24_0605 PE=4 SV=1
MTATVAVLGANLCGWIAAAALARRLPRESYRVVVIDDGTGGDGLGDFAPVIAVPPALARFHADLGLDAATLVRMTGGGHALGVAFGGWRADRAAAFLSYGETGAPLEGIAFHQLAGRLRAAGHPVRLADHALSAVAAQAGRFAPGAPLAHALHLPVAPYEALLRGAALRAGAERASADFVDAEIAANGIVEKLTLADGTGIEPWLVLDCSGTDARIASRTSPASEDWSSWLPCDRTHAETVPAQGAPPPYTQVDAQDTGWTATWPLDGADVRLTCSVGGNGKPFRAASRFEAWRGNCVALGAAAGLLEPLHPTALTLLLRSLAQLIQLWPAGPQAPIEAAAFNRTAAAALQGARDFLIAHYAVAGRAGALWDDRRTASLPGPLAAKHDLFAARGRLPMYDDEVFEEEDWAVMFDAMGLMPRRYDARADIVPLAAIERHLAGQRARVIAQVRALPPYAQAMAALRTRA

SEQ ID NO: 83920 - protein, 538 aa, Burkholderia cenocepacia
  REGION 1..538: note = tr|B1K9Y4|B1K9Y4_BURCC Tryptophan halogenase; OS = Burkholderia cenocepacia (strain MC0-3) OX=406425; GN = Bcenmc03_6983 PE=4 SV=1
MTHPIKNIVIVGGGTAGWMSASYLVRALQQQANITLVESAAIPRIGVGEATIPSLQKVFFDFLGIPEREWMPQVNGAFKSAIRFVNWRKSPDGSRSDHFYHLFGNVPNCDGVPLTHYWLRKREQGFQQPMEYACYPQTEALDGKLAPCSLDGTRQMSHAWHFDAHLVADFLKRWATERGVKRVVDEVEQVHLNDRGHISSLSTKEGRTLEADLFIDCSGMRGLLINQALKEPFIDMSDYLLCDSAVASAVPSDDARVGIEPYTSAIAMNSGWTWKIPMLGRFGSGYVFSSKFTSRDQATADFLDLWGLSDKQPLNQIKFRVGRNRRAWVNNCVSIGLSSCFLEPLESTGIYFIYAALYQLVKHFPDTAFDPRLADAFNAEIVYMFDDCRDFVQAHYFTTSRDDTPFWRANRHDLRLSDAIKEKVERYKAGLPLTTTSFDDSTYYETFDYEFRNFWLNGNYYCIFAGLGLLPDQSLPLLRHRPESIDKAEAMFARIRREAERLRSSLPTNHDYLRSLRERAAGRSRSQPGPTLATPETL

SEQ ID NO: 83921 - protein, 506 aa, Xanthomonas citri
  REGION 1..506: note = tr|H8FE69|H8FE69_XANCI Tryptophan halogenase family protein OS=Xanthomonas citri pv. mangiferaeindicae LMG 941; OX = 1156940 GN=XMIN_1630 PE=4 SV=1
MIPAPLRNIVIVGGGTAGWMAAAAFARVLGPTFKVQLIESEQLGTVGVGEATVPHIKAFNNLLGIDEAEFVRQTQGSFKLGIEFVDWQRPGSTYMHGFGTQIGHPLGLLPFHQYWIKQHARGKAQPLGAYTLNTVAAARGKFMTSAGDVPANSPLANIAYAYHFDATQYAHFLRRYSQQRGVTRIEGLVEQVQLHPESGHVQSLQLASGQVVHGDLFIDCSGFGGLLIEQALHTGYHDFTHWLPCDRALAVPCEQVSPPAPYTRSTARAAGWQWRIPLQHRTGNGYVYCSAHISDDEAAATLLANLDGKPLADPRSLRFTTGRRKQCWNRNVVALGLASGFLEPLESTSIHLIQSGISKLLELFPREGISPVLVQRYNDRLAFEFDRIRDFLLLHYHATERDDSAFWRHCRHMPITPELQATLDLFRDSGRFYRNAEEMFAEISWVQVLVGQGILPQGYHPLVDQVPDRDAEGFLASVAQTISHCVDVMPSHQQFIDRYCKAATLP

SEQ ID NO: 83922 - protein, 516 aa, Duganella sp.
  REGION 1..516: note = tr|A0A3E1RU76|A0A3E1RU76_9BURK Tryptophan 7-halogenase OS=Duganella sp. BJB475 OX=2233914; GN = D0T23_13565 PE=4 SV=1
MQQNQADRRIKQILIVGGGTAGWMTAAAMSKLLGGHYQVRLVESDEISTVGVGEATIPQIKLFNQALGIDEDDFLRETQGTFKLGIQFVNWGKLGENYIHTFGSIGLDMGLIEFHHYWLKLHQAGLAPDFGAYSLAAVAAPQNKFMRAVDAGNSPVSHIAHAFQFDAGLYAKYLRKFAEARGVVRTEGKVADVILREGDGHVAAIMMENGERIEADLFIDCSGFRGLLIEGALKTGYEDWTHWLPCDRALAVPCESTGPITPYTRATARTAGWQWRIPLQHRIGNGHVYSSKYISDDEATAQLMANLDGAPLAEPKPLRFVTGKRKKFWNKNVVAIGLASGFMEPLESTSIHLIQSTIARLMSFFPGRDFNQDNIDEFNRQAHFEVDKIRDFLVLHYHATERDDTPFWNYCRTMEVPESLKQKMDLFKQHGRFYREKDEMFASVSWLQVMLGQGLRPQSYHPLVDLYPQEQIEAHLRTIKTVVENCAGKMPNHEDFIAAHCQATAMNMKRPNYGAR

SEQ ID NO: 83923 - protein, 515 aa, Pelomonas sp.
  REGION 1..515: note = tr|A0A0Q7T5R4|A0A0Q7T5R4_9BURK Tryptophan halogenase; OS = Pelomonas sp. Root1444 OX=1736464 GN=ASD35_01315 PE=4; SV = 1
MTNKRRILIVGGGTAGWLTAAYLAKALRLPERSHLEITVLESPDISSVGVGEGTFPTIRSTLQFLGIDEAQFIRATSATMKQGIRFVDWAHAPTAGRQHQFFHPFEAPFYADGINLVPYWLLQDEATRPPFAEAMTLQYRVAQAQRAPKRAGEAPYAAPLNYAYHFDAIKLARLLADRARELGVRHVEGTVNHVALDTAGAIAHLDSVQQGRQERHQADLYIDCTGFRAELIGGALASPFKSVRGQLFADRALACKLPFESPDTPMESCTIATAHEAGWLWEIGLNGARGIGCVYSSSHLSDDRAAEILRAYCGAGRDEALAMRSIPFAPGYREQQWLKNCVAVGLSAGFLEPLESTGLVLIEAAVGMIAEMLPHSGPMEAPARRFNELMTARFDNIVGFLKLHYCLSQRTEPFWRDNTAPATIPARLAELLAQWRLRPPGRFDFVLDTETFAFFNYQYILYGMGVQTDLGAGRADFTQGDEAQKLFAKIQRFAERALVDLPSHRALIQQINAVK

SEQ ID NO: 83924 - protein, 519 aa, Pelomonas sp.
  REGION 1..519: note = tr|A0A0Q7SJR9|A0A0Q7SJR9_9BURK Tryptophan halogenase; OS = Pelomonas sp. Root1444 OX=1736464 GN=ASD35_12495 PE=4; SV = 1
MNAQLTTAVRRIVVLGGGSAGWLTAATLAAELGGDAPDALQVTLIESPDVPSIGVGEGTWPTMRATLRRIGLSEVDLVRECDAAFKQGSRFDGWLHGGQGDRYYHPFTLPHGYGDAELAGAWLQGGCDQAFAESTGPQPHLCNAHLAPKQTTTPDFGGVVNYGYHFDAVKLGHLLRRHATTVLGVRHVVDHFTAVRAHENGDIAALATREHGDIEGDLFIDCSGLASLLLGKHFGVPFRSEKGVLFNDSALAVQVPHADARAPLASATVATAHAEGWTWDIGLPTRRGIGLVYSSGHTDEAAAERALLGYLKRSGLDHADVSLRRLRFSPGYREQFWHRNCVAVGLAAGFIEPLEASALALVELSAAFIRDEIPAHRADMDLVAKRFNDAFAYRWSRIIDFLKLHYVLSRRDDADYWHDHRKAATQPESLRDLLQLWQHRVPSHNDFYRVEEVFPAASYQYVLYGMQFKPALRALRAQQLAKAEGCIKEVATMTRRLLGGLPRHRDLIQHIHAHGIAAA

SEQ ID NO: 83925 - protein, 504 aa, Asticcacaulis sp.
  REGION 1..504: note = tr|V4R062|V4R062_9CAUL Uncharacterized protein; OS = Asticcacaulis sp. AC466 OX=1282362 GN=AEAC466_06975; PE = 4 SV=1
MDHRIRRLVIVGGGTAGWMTAAAFAKILGTVNYDIVLVESEDIGTVGVGEATIPQIRTYNDLLGIDENTFVRETNGTFKLGIHFVDWKRPGESYIHPFGLYGVDMDGIPFIHFWHRLANMGGNGDWGRFNAETMAMRENKFTRIPKGEASGLPQINYAYQFDASLYAAFLRRYAEARGVTRREGRIVRVGQAPESGNLTALHLENGQSIAGDFFIDCSGFRGLLIEQTLKCGYEDWSEWLPCDRAAAVPSAKPDGPITPYTRSTSREAGWQWRIPLQHRTGNGYVFCSEFISEDEACEKLLTRLDGAPLKDPKVLRFTTGHRRKMWHKNVVAFGLASGFLEPLESTSIHLVQAGIAKLLALFPRTGIAQSVVDQYNRETIADYVNVKDFLIAHYKVTEREDTPFWRRCKHMSVPDSLTARLETFRATGQAAAQQWELFKEVSWFSVLAGQGLMPGDYHPVADVISDDDLRQRLGRLRSQVDQRVKGMMSHDDYIAKFCAAPKAA

SEQ ID NO: 83926 - protein, 527 aa, Fischerella sp.; identical to SEQ ID NO: 83380
  REGION 1..527: note = tr|A0A1Z4TV55|A0A1Z4TV55_9CYAN Tryptophan halogenase; OS = Fischerella sp. NIES-4106 OX=2005456 GN=NIES4106_56580; PE = 4 SV=1

SEQ ID NO: 83927 - protein, 501 aa, Azospirillum sp.
  REGION 1..501: note = tr|A0A239A3Y8|A0A239A3Y8_9PROT Tryptophan halogenase; OS = Azospirillum sp. RU38E OX=1907313; GN = SAMN05880556_101401 PE=4 SV=1
MKPLRRIVIAGGGTAGWITAAMLSHLLNGSATAVELVESEEIGTIGVGESTIPPFITLLRNLGIDEQDFIRQTSASFKLGIRFRDWYRLGSGYFHPFGAIGGQIDVHEFYQCWLRAKAHGHPSALMDFAPAAIMADEYRFMLPFKAQRTMVGAASYALHVDAKRVATYLRRYAEERGAVRTEGRIERVRTRPDGAIEALCLRDGREVTGDFFIDCTGFRSLLVGQTLGVGLIDWSDQLLCDRAVAVQTENTGDTHPFTLSEALGHGWRWRIPLQHRAGNGYVYSSRFLSDEEAVATLRSKLQGRLLTEPAIIPFKTGMRARMWEKNCLALGLAAGFIEPLESTAIHLVYRAVDHLARFFPDQDCDPALAAEFNRRMGAEYEEVKDFIVLHYCLSQRDDTPFWQACRQAPVPASLRARLDLFRASGVLREGLEELFRAVSWQSVYEGMGVRPARYQGLVETLPLSVITETLDRSAPILRAQVKGLPSHDEFLRTHCAAERDF

SEQ ID NO: 83928 - protein, 517 aa, Azospirillum sp.
  REGION 1..517: note = tr|A0A239HGE9|A0A239HGE9_9PROT Tryptophan halogenase; OS = Azospirillum sp. RU38E OX=1907313 GN=SAMN05880556_11232; PE = 4 SV=1
MGDAGPLPSGSWKVCPVQQQIKKILIVGGGSAGWMVAALFSRLFKRLYEITLVESDEIGTIGVGEATIPAIKRFNELLGLDEDDFLRRTQGSFKLGIEFRNWHRQGDSYIHGFGPIGQDLGWLRCHHYWLHQQAQGKAPDFDGLAINTAAARAGKFMRARPDLPDSPLSHIAHAFHFDAGLYARYLREMAEKAGVQRLEGRIGAVHLRPEDGFVQSVTLADGREVAADFFIDCSGFRGLIIEQALKTGYEDWRHWLPCDRALAVPCARQPGEMTPYTSATAHGAGWQWRIPLRHRTGNGHVYASPFMEEAEAEHILLSNLDGPALADPLRIQFTTGKRRQLWNRNCVAVGLASGFLEPLESTSLHLIQSAAIRLVRLMPDGRFDPAVIAEFNRQSDFEYERIRDFIILHYKATARDDTPFWRYCRDMAIPETLQRKIDLFAACGRIFREDEELFAEESWIQVFLGQGIIPRSPDPLVRVQDDAEIAEYLSNITGVIGKCVAVMPGHAAYLERICGVG

SEQ ID NO: 83929 - protein, 501 aa, Azospirillum sp.
  REGION 1..501: note = tr|A0A239F3F2|A0A239F3F2_9PROT Tryptophan halogenase; OS = Azospirillum sp. RU38E OX=1907313 GN=SAMN05880556_10663; PE = 4 SV=1
MTLPYRIVIAGGGSAGWMAAAALVRQLRGTGTAITLVESEEIGTVGVGEATIPPIQAFNRMIGLDETEFVKATRGTFKLGIEFVNWWRQGHRYFHPFGRYGDDFGLVPFHQQWLAARAMGDETPLAAYSLAHAAAASGRFAVPPDGGQSVFATYGYAYHFDAGLYAAHLRTLAEGHGVTRIEGMIDHVARDPESGFVTALHLTDGRVVAGDLFLDCTGFRALLIGEVMQTPYLDWRHWLPCDRAVAVPCARVEPLTPFTRSTARDAGWQWRIPLQHRTGNGHVYCSGFIDDQAAEDALLAHLDGQPLAEPRRLRFVTGRREQAWQGNVVSIGLASGFLEPLESTSLHLIQSAVTKLIHLFPGRDFDPAVRDEYNRRMATEFERVRDFLILHYAQTERDDTPFWRHCAAIDQPDSLKDAIGLFRRTGRLFIRDEDIFHEPSWLAVLLGQGVTPQGRDQLADAVPAAERADILQAMRRVIARTADQLPTHASMVDGPFSWQGR

SEQ ID NO: 83930 - protein, 473 aa, unidentified
  source 1..473: note = Gammaproteobacteria bacterium
  REGION 1..473: note = tr|A0A2N1XZ80|A0A2N1XZ80_9GAMM Tryptophan halogenase (Fragment) OS=Gammaproteobacteria bacterium HGW-Gammaproteobacteria-2 OX=2013798 GN=CVV12_14985 PE=4; SV = 1
PPSCRIRLIESEEIGIVGVGEATIPNIKHFNAALEIDEDEFLKATQGTFKLGIEFVNWGQLGDRYIHGFGKVGPDTSLVGFHHYWLRLKQLGKASGLDAYSINTVAPRQAKFMRYRKDMPGSPLGDIVHAFHFDASLYARWLRGLAEKRGVMRTEGKVKQVLRRAEDGYIEALVMEGGERIDGEFFIDCSGIRALLIGDALGVGYEDWSHWLPCDRALAVPSAPVKPLLSMTRSTAHSAGWQWRIPLQHRVGNGHVYSSLFMSDDEATSILLANIDGEKMADPRLIRFRTGMRRKLWERNCVAVGLSSGFLEPLESTSIHLIQTAVSRIATFFPHQGFDAADIDEYNAQGRLEYQQIRDFLILHYKATERTDSAFWNYTRTMPIPATLQRKIDLYRSNGRLFRDGNELFAEPSWLQVMEGQRIHAQGYHPFAGFMPESELCEFVGGVEAVIGKCVGVMPDHAQFIAEHCAAQR

SEQ ID NO: 83931 - protein, 549 aa, Asticcacaulis sp.
  REGION 1..549: note = tr|V4PF26|V4PF26_9CAUL Uncharacterized protein; OS = Asticcacaulis sp. AC466 OX=1282362 GN=AEAC466_00980; PE = 4 SV=1
MIISRLNGKNGKPPIMTKIASEPASPPHRDVLIVGGGAAGWMTAAYLAKHLGTDRNGGPRITVMESPDIGIIGVGEGTFPTIRNILRTLGIDEAGFMRESHATFKQGIRFDDWEVTPKDGRRSHYFHPFEQPYWSREELNLLPYWLLQDKDKRLPFAEAVTFQKKVADSKLAPKRIHQGNYQGPLNYAYHFDAHRFAGVLAKYAKDLGVHHLSGNLDGVTLDADGAIAHITAKEHGDLKADLYIDCTGFRSEILGKAMGVPFKSIKDTLFTDRAVAIQVPYEKPDSPLESYTISTAHEAGWTWDIALSTRRGIGYVYSSDHTDDDRAEEVLRAYVGPMAEGVEARCIRFNAGYRTQHWVKNCIGVGLSAGFLEPLESTGMVLIESAVNKIVEFFPFRGPLDASAHIFNEAMTKRYETIIGFIKLHYCLTKREEPFWRDNTRPDSIPPHLRELIALWKFRPPSRFDFTLDNESFAFFSYQYILYGMNFETDYEAARGSLQHTDLANHLFARISQFGDQASKDLVSHRQLINAVYKGGFVERPNAPMAVAR

SEQ ID NO: 83932 - protein, 494 aa, unidentified
  source 1..494: note = Xanthomonadales bacterium
  REGION 1..494: note = tr|A0A1M3QS61|A0A1M3QS61_9GAMM Tryptophan halogenase; OS = Xanthomonadales bacterium 66-474 OX=1895868; GN = BGP23_12165 PE=4 SV=1
MTALLLANSAYGARLKVTVLESSQVGVIGVGEGSTPWLRGFFEGLGIEESEWMPECHATYKAGISFDGWSTRPGYESYFHSFASMLDNMTMAPFIDNVHARLDRADVHAHPDRFFISARLARECKAPRPQQSFPFDVWYGFHFDSVLLGRFLQKKAMDRGVQHVVGHVTEVRLAESGDVASLALKDGGTLAGDFYVDCTGFASLLMGKALGTPFVPFKDNLFNNAAIAISKPHDGPIMPKTISSALGHGWVWKIPLTTRYGYGYVYSTDFCPPENAEKELRGHLGLLDADVPARHLEFRPGRVAEPWRRNCVANGLAQSFIEPLEATTLLYVQRTAEMLVAALEQRDLGEGTRRRFNDTLNAGVEGTRDYIVTHFKTNTRNDTDYWRANAANTHLSEPLQQLLRTWLASRPISAGIAQGKFGRGYPIMSWYSLLAGVGLFPGDPRPPTAEEAKYDMAEVDTLLDRSAMNFPDHRTFLGAIPPKPKPSSLQVYFW

SEQ ID NO: 83933 - protein, 543 aa, Asticcacaulis sp.
  REGION 1..543: note = tr|V4PI27|V4PI27_9CAUL Uncharacterized protein; OS = Asticcacaulis sp. AC466 OX=1282362 GN=AEAC466_04810; PE = 4 SV=1
MFLTCRRRLLDGAGFFLRLDTAMTTPKSGHRDAFFVLNGIEMTTTGPLRKIVIVGGGTAGWMVANALSKVLGKSGPAITLIESEEIGTVGVGEATIPPILAFNALLGINEVEFMKETQATFKLGIEFVDWLRIGHRYFHPFGIYGVDAGAVPFEALWQRSRHLGTPRPLNDFSVCARAAAMGRFMRPAGAGGPLAHLAYAYHFDATLYARFLRKYAEAAGVTRIEGRIAHTSQRPDDGFIEAVTTQDGRRIEADFFIDCSGFHALLIGGVMGAKFEDWNHWLPNDRAVAAPSANMAPPTPFTTSTSRTAGWQWRIPLQHRTGNGYVYSSAHSSDQAAQDLLTTNIAGDLLAEPRVIKFRTGRQRAFWIKNCLALGLASGFMEPLESTSIHLVQAGIARLLEMLPNRSCDPADIRRYNRLMTTEYDSIRDFIILHFHATERRDTQYWRSLANMSIPDTLAERIDIYRHSGRVFRESDDLFSKTSWLAVMDGQGLVPQAYDPLAEGVSPEQAQKHMEHIASVQAAAVKTMPSHHNYIAKYCSTAQ

SEQ ID NO: 83934 - protein, 512 aa, unidentified
  source 1..512: note = Mycobacteroides salmoniphilum
  REGION 1..512: note = tr|A0A4R8S167|A0A4R8S167_9MYCO Flavin-dependent tryptophan halogenase RebH OS=Mycobacteroides salmoniphilum OX=404941 GN=rebH PE=4 SV=1
MLEEVVIVGGGTAGWMTASYLKVAFGDRIMVTVVESGRIGAIGVGEATFSTIRHFFDYLGLEEHEWMPSCCATYKLGIRFQDWRKPGHHFYHPFERQRVVDGFSLTDWWLSNPRSDSFDRDCFLMGTLCDNEKSPRRLDGSLFIGNGAEGAAYRTTLSEQETQFPYAYHFDASLLADFLRDFAVRRGVRHVVDDVVDVRQDDRGWITHVRTRAHGGIGGDLFIDCTGFAGLLLGRAMGEPFESYQGSLLNDRAVALRVPTDQDRGYLPPYTTATAQDSGWIWSIPLFGRIGTGYVYAADYCSPEDAERTLRDFVGPAAEGLEANHIRMRIGRSRRSWVRNCVAIGLASGFVEPLESTGIFFIQHGIEQLVKHFPDENWEESLRDSYNRVINRCMDGVREFLVLHYYLAARVDTQYWRDTKSVELPAALSERIEHWRSKLPDAGSVYPHYHGFEPYSYVCMFLGLGGIPARASTAMRHLDATRAQREFDLLAQQASRLRHSLPTHHEYLAQMY

SEQ ID NO: 83935 - protein, 432 aa, Sphaerisporangium sp.
  REGION 1..432: note = tr|A0A366LEB4|A0A366LEB4_9ACTN Tryptophan halogenase; OS = Sphaerisporangium sp. LHW63015 OX=2248750; GN = DP939_44160 PE=4 SV=1
MDPYETVDVVVIGGGPGGATAASTIAAEGRSVLLLEKSPFPRFHIGESLLPYTAGVLEQMGLLEPFANNGYVPKCGAEFTDRTGSFRRVSFEDQGPGRHHQTFQVERAHFDNALLEHAQEAGAQIRNPAPVDELIVEDGRVVGVRYRHEGETREVRAQYVVDASGRSGKVAHAFGLRRSVDQLRMVAIYRHFTGLDEAANPGERGDIQIGNHKDGWVWAIPVWEDTISIGTVMHKDTFRRHGEPEQIFDEHRARIPRIAQRLEGTEPSTKIRIETDYCYLSDEIAGPGWLMVGDAGCFVDPIFSGGVFLAMVTGREAGRTVAAALEHPYRTEQLQASYESFYKTGYDTYFRLIRGFYDYKFNFRQYREDLPDFIEERHVSLLLAGDFWSQGNALARYLKSERRWDTFAPFEYFYGCPVYPDLELLERVEMGV

SEQ ID NO: 83936 - protein, 510 aa, Pelomonas sp.
  REGION 1..510: note = tr|A0A0Q7S0Q3|A0A0Q7S0Q3_9BURK Tryptophan halogenase; OS = Pelomonas sp. Root1444 OX=1736464 GN=ASD35_07420 PE=4; SV = 1
MNNDQAIRRIVIVGGGSAGWMTAAPLSQVFGTQPGGSANPVGCEIVLVESADIGTVGVGEATLPSIRHYNDALELDNAEFMRKTQASFKLGIEFKDWGHVGNRFFHGFGGFGPPILNRSSVAHWMRLNRAGGMPSYEEWSTATVMAQRDRFVPPEGGPPSAANAYSYAFHFDAGLYANFLRDYALARGVKREEGTIVDVSLRPGDGFVTAVTLADGRRIEGDLFIDCSGFRALLIEGVMKAGYHDWTHWLPCDSAQAVPCDKVLPLTPYTTSTARSAGWQWRIPLQHRTGNGHVYCSSYISDEEAGRVLMQNLDGAPQGDPRQLRFKTGMRKRIWEKNVVSVGLSSGFLEPLESTSLSLVIHGVSALVELFPDRQCEPHLVDEYNRRMTRQYESIRDFIILHYKQTERDDSELWRYCAAMPIPDTLAHQIDNFRRNGRVVILDRDSFGEDSWYSLYLGLGMKPEALDPLLAQVDEQPLREHFKRLHMAISKTVEGMPDHAAYLSRLVGTR

SEQ ID NO: 83937 - protein, 510 aa, Kutzneria albida
  REGION 1..510: note = tr|W5WNC1|W5WNC1_9PSEU Uncharacterized protein; OS = Kutzneria albida DSM 43870 OX=1449976 GN=KALB_6284 PE=4; SV = 1
MIKSVVIVGGGTAGWMSATYLKAAFGDRLRVTLVESQRVNRIGVGEATFSTVRHFFDYLGLREQDWMPHCSASYKLAIRFQDWRAKGHHFYHPFERLRVADGFNLAEWWLADRGEDFDRSCYITPHLCEAERAPRLLDGSMFAANLDGSLGRSTLAEQRAQFPYAYHFDADLLAGFLARYGVERGVQHVVDDVVEVVQDQRGWISGVRTKEQGLVEGDLFVDCTGFRGLLINQTLREQFESFTDVLPNDRAVALRVPQDMAATGMRPYTTATAMDAGWIWNIPLFNRVGTGYVYAEEFCSPEEAERTLRQVAAPGRDDLEANHIRMRIGRNRRSWVNNCVAVGLSSGFVEPLESTGIFFIQHAIEQLVRHFPDERWDPALVADYNNRVAHVIDGVKEFLVLHYRAAARDDTPYWKEAKVRKIPDGLAERLELATSHLLDEETIYPYYHGFEMYSWNTMLLGLGWQPERAKPALAHLDPAAARREFAQLRADAEQLVAALPSCREYLATIH

SEQ ID NO: 83938 - protein, 514 aa, Sphingomonas sp.
  REGION 1..514: note = tr|Q1NHT3|Q1NHT3_SPHSS Putative tryptophan halogenase OS=Sphingomonas sp. (strain SKA58) OX=314266; GN = SKA58_00925 PE=4 SV=1
MVRPVRNIVIVGGGTAGWLTAGVIAARHRTRIGQDLSVTLVESPNTPIIGVGEGTWPTLRTTLSRMGISETDLFRQCDAAFKQGAWFARWTDGTASDGYYHPLMLPQNFGQVNLVPHWLARDGDESFCDAVCAQGRICDDGLAPKTMATAEYDALANYAYHLDAGKFAPFLQRHCCEKLGVRHVLADVEQVVLHDDGDIAAVRTTQAGLVEGDLFVDCTGFKALLIEGAMGVPFRDCNDVLFCDTALAMQVPYAAPDSPIASHTISTAQSAGWIWDIGIQTRRGVGHVFSSSHISDEQAERELRAYVGPASDGLNVRKIKIRSGHRETFWKGNCVAVGLAAGFLEPLEASAIVLIELSAKIIAEQMPACREVMDIIASRINATTHYRWGRIIDFLKLHYVLTQRTDSDFWRDNVRAETMPDRLRELLHLWRYQSPWFHDEFDRAEEVFPAASYQYVLYGMGFRTQVPTAALARDAHLAGRAMRENAAATARLRAGLPRHRDLIDRIVAQGLQPV

SEQ ID NO: 83939 - protein, 500 aa, Sphingomonas sp.
  REGION 1..500: note = tr|Q1NHZ6|Q1NHZ6_SPHSS Tryptophan halogenase; OS = Sphingomonas sp. (strain SKA58) OX=314266; GN = SKA58_00610 PE=4 SV=1
MTQPSLPRRIVVAGGGTAGWMTAAALARTLGPVAQVTLIESEQIGTIGVGESTIPPLVAYNRILGIDEADFMRATQATFKLGIQFENWRVPGESYFHSFGGTGKDHWSAGFQHFWMHGAAQGHDAPYDEYCLELKAAMAGRFAHLPDDRMNYAYHLDSGLYAKFLRAMAEGDGATRIEGRIVAVDLDGASGDIAALRLDGDRRIEGDLFIDCTGFRALLIEGALHAGYDDWTHWLPCDGAVAVQTASVRAPVPYTRAIAHDAGWQWRIPLQHRQGNGIVYCSAFMEPQAAQDQLLATVEGDRLVQPNPIRFRTGARRRQWHRNCVAVGLSGGFMEPLESTSIHLIQRAVLRILRMLPAGAISPRDIAEFNDQQMADMEQIRDFLILHYKATDRRDTPFWRHCASMSVPDSLTHKMELFRETGRVFRKNEELFAENSWVQVMMGQGITPQSYHPVAAKLRPQELKHLLTALRDQVSRTVSALPDHGAYVARYCGAQDVAAA

SEQ ID NO: 83940 - protein, 255 aa, Pedobacter cryoconitis
  REGION 1..255: note = tr|A0A327S6D6|A0A327S6D6_9SPHI Tryptophan halogenase; OS = Pedobacter cryoconitis OX=188932 GN=LY11_04361 PE=4 SV=1
MLSKVVERGGKIFPRTKCTNLIQKENGHWELQMKHQTRGDFMINAKFLFDASGRQGHLCRMLDLPIVKYDQLVGVGAFLHFKVPKVIAQEMFIETVKDGWWYCAALPGQRMVVTLFSDADVIKKQQLRQPENWNALLSATKNIKKRIQHAVADEQPWVRNAFSQLTDSSSRSNFLAIGDAAAAFDPISSMGIGFAVSSACNAARAVDYFFSGNADGIKSYQQDIKSIFNQYLDLRKQYYRTEQRWAEEPFWERRI

SEQ ID NO: 83941 - protein, 505 aa, Alteromonas stellipolaris
  REGION 1..505: note = tr|A0A0S1YN77|A0A0S1YN77_9ALTE Tryptophan halogenase; OS = Alteromonas stellipolaris LMG 21856 OX=1160720; GN = AOR13_2898 PE=4 SV=1
MVKTYKILILGGGTAGWMAANLMAKSWSKQGFSITLMESPDIPTVGVGEGSTPYIRRFFEQMDIPESEWMPQCHATYKNGIRFTDWTTKPGFESYFHPFATDIDNPHFNLFKQHVALRRQGLNISVHPDDYFLMTHMTKRKKLPLPTGQFSHTLFYAYHFDAKLLGDFLKKRALCAGVKYLVDKAFEIEKHPNGDIAAIQTHSNQRIEADFFVDCSGFSSLLMQKALDVPFISYRDSLHNDAAVAIPSAAEAPFLPQTLSAAMPCGWRWKIPLTHRTGNGYVYSSDHLSGDEAEQQLRNAAGINNARTAAHHIKMRVGRNQAHWKRNCLAVGLSQGFIEPLEATGLQMTLITIEQFIAHFEKGNFTSRYQENVNNGINAAFDHIRDYVLLHYLANNRNDTQYWRDCRGDVAISDSLRSILEIWSQGGDLEQELQRQNISQYYPSLSWHVILTGMGVFPSAHYQNPSLNQQFQTSKANMKAFFNHCVAQFQSSVSANQQGSVQNVY

SEQ ID NO: 83942 - protein, 530 aa, Kutzneria albida
  REGION 1..530: note = tr|W5WDK6|W5WDK6_9PSEU Uncharacterized protein; OS = Kutzneria albida DSM 43870 OX=1449976 GN=KALB_5897 PE=4; SV = 1
MNDHRINDVVVLGGGTAGWMAAAYLGRALGPSARITVLEAPAIPKIGVGEATIPNLHKVFFDFLGIPEEEWMRECNASFKMGIRFVNWRTPGPGQAEPRPHEGGRDHFDHLFGLLPDHAGLPLSQYWVQRKLAGQTDVPFDYACYRQPPVFDAKLSPRHSDGTRWASYAWHFDAHLVADFLRRFATEKQGAVHLQGTMTSAEVDQRGHITRLHTEDGRTIEGDLFIDCSGFRGLLINQLLREPFLDMGDHLLNDRAVATAVPHDDAANGVEPFTSAIAMSSGWTWKIPMLGRFGTGYVYSSRFSTQDEATEEFCRMWGLDPETQPLNHVRFRVGRNRRAWVKNCVSIGLASCFLEPLESTGIYFVYAALHHLVKHFPDKRFEPVLTEQFNHEIETMFDDTRDFIQGHFSFAPREDTPYWRACKELELAPAYRQKVATYRAGLPVSLPATDESGYYGNFEAEFRNFWSNANYYCMFAGMDFLPEHPLPSLAYRQEASESVDSVFAEIRREQERLLATLPSTYDYLRQLHGK

SEQ ID NO: 83943 - protein, 503 aa, Alteromonas stellipolaris
  REGION 1..503: note = tr|A0A0S1YQG8|A0A0S1YQG8_9ALTE Tryptophan halogenase; OS = Alteromonas stellipolaris LMG 21856 OX=1160720; GN = AOR13_3557 PE=4 SV=1
MSSDSDNSNTSGAKTSPVKRVVIAGGGTAGWMAATALSKLLGKSLSITLVESKDIGIVGVGEATIPPIRTFHKLLGIDEKAFMRATNATFKLGIEFENWREQNHSYIHSFGVTGRECWAGEFHHFWLRAKNLGFGGDFGDYCTELKAAKEGKFAYGERMPMNFAYHFDAVAYGRFLKGLAVEAGVTHIEGDIQHVSKCSQTGCITSIKLSDDKEIAGDLFIDCTGFKGLLIEKALHTGYENWSHWLPCDSALAVQTASTGAPIPYTKSVAHTAGWRWKIPLQNRVGNGLVYCSNYMSDDEAKNTLLDAIEGDTLNEPRIIRFTPGKRRLGWNKNCVALGLASGFIEPLESTSIHLIMTGIVRLMRLFPFDGITQSTVDEYNNKYDSEMAAILDFIVMHYKVTNREDSPFWDHCKSMEIPPSLTHKINLFKQTGRVFLDDGDIFRVDSWTQVMMGQGLLPQQYHRVADEMSETELERFLAGLKQQVDNQVSALPSHHDFLEKYL

SEQ ID NO: 83944 - protein, 512 aa, unidentified
  source 1..512: note = Mycobacteroides salmoniphilum
  REGION 1..512: note = tr|A0A4R8SEX8|A0A4R8SEX8_9MYCO Flavin-dependent tryptophan halogenase RebH OS=Mycobacteroides salmoniphilum OX=404941 GN=rebH PE=4 SV=1
MLEEVVIVGGGTAGWMTASYLKVAFGDRIMVTVVESGRIGAIGVGEATFSTIRHFFDYLGLEEHDWMPSCCATYKLGIRFQDWRKPGHHFYHPFERQRVVDGFSLTDWWLSNPRSDSFDRDCFLMGTLCDNEKSPRRLDGSLFIGNGAEGAAYRTTLSEQEAQFPYAYHFDASLLADFLRDFAVRRGVRHVVDDVVDVRQDDRGWITHVRTRGHGDIGGDLFIDCTGFAGLLLGRAMGEPFESYQGSLLNDRAVALRVPTDQDRGYLPPYTTATAQDAGWIWSIPLFGRIGTGYVYAADYCSPEDAERTLRDFVGPAAERLEANHIRMRVGRSRRSWVRNCVAIGLASGFVEPLESTGIFFIQHGIEQLVKHFPDENWEESLRDSYNRVINRCMDGVREFLVLHYYLAARVDTQYWRDTKSVELPAALSERIEHWRSKLPDAGSVYPHYHGFEPYSYVCMFLGLGGIPARASTAMRHLDATRAQREFDLLAQQASRLRHSLPTHHEYLAQMY

SEQ ID NO: 83945 - protein, 516 aa, Azospirillum sp.
  REGION 1..516: note = tr|A0A239J326|A0A239J326_9PROT Tryptophan halogenase; OS = Azospirillum sp. RU38E OX=1907313 GN=SAMN05880556_11845; PE = 4 SV=1
MDKPVKTVVIAGGGSAGWIAAGRIAARNGTSLAGGVRVILIESAVIGTIGVGEGTWPTMRNTLRKIGIRETDFIRQCDAAFKQGAQFARWTDGSAGDAYYHPLNPPQGAPQINLSGHWQAFARENPLNFAEAVDFQASLCDAGLAPKSITSPEYAGLANYAYHLDAGKFADLLRDHAVEKLGVIHMVDDITEVHQDEAGDLTGLTLRGAGRVDGDFFVDCTGFASLLLGGTYGVPFKDCSDVLFCDRALALQVPYDRPDAPIATHTISTAQDAGWIWDIGLPTRRGTGHVYSSRHMSDEAAEESLRRYLGPAADGLSPRLIKIRAGHRASFWTHNCVGVGLAAGFLEPLEASALMLIETAVDFIADRLPANRAVMDTLSRQFNRAFTHHWDRIIEFLKLHYVLTKRTDTAFWRDNLDPASIPLELREKLELWRYHPPGPADFPHQPEVFSWPSYQYVMHGMGFAADYSGLAQVKAEAASARRAFAQAERARQQALRDLPRHRDLLNRIQQYGLQPV

SEQ ID NO: 83946 - protein, 528 aa, Alteromonas stellipolaris
  REGION 1..528: note = tr|A0A0S1YJT0|A0A0S1YJT0_9ALTE Tryptophan halogenase; OS = Alteromonas stellipolaris LMG 21856 OX=1160720; GN = AOR13_1413 PE=4 SV=1
MAVANQKEANQQATDQQTRDHQEAKHTPVKRVVVAGGGTAGWLAAALLKKVIGEAVNITLVESEAIGTVGVGEATIPPIRLVNQVLGIDEATFLRDTKATIKLAIRFENWKQQGQHYYHTFGAPGKSMAFCHFHHFWLKARQQGLKHDLWDYDLNYLAAEAGKFARINAKDPVLELPFAYHFDASLYAQYLRKLSEGMGVRRVEGKISHVSRHKLSGNVKALHLENGHAIDGDLFIDCTGFRGLLINETLGAGYDDWSHLLPCDSAIAVPSERHENTAPFTRSIAHDAGWQWRIPLQHRNGNGHVYSSRYISDNQAHDTLMANLDTKPLGDPKLIKFTTGRRRQQWYKNVVAVGLSSGFLEPLESTSIHLIQSAIVRLIKLFPHQGISDSAVAEYNAQSKVEFEQIRDFLVLHYCLNEREDSDFWRDMRHLTLPDSLVHKMALFKQNGNLVREQSDLFLESSWLQVMYGQGLVPEDYHGLTNSFSDEKTQAMLASLYKIKREPIASLPTHDAYIQSMIDSANKTSVSF

SEQ ID NO: 83947 - protein, 504 aa, Asticcacaulis sp.
  REGION 1..504: note = tr|V4PD22|V4PD22_9CAUL Uncharacterized protein; OS = Asticcacaulis sp. AC466 OX=1282362 GN=AEAC466_04830; PE = 4 SV=1
MSQEAIKKVVIAGGGTAGWMTAAWFSKILRDDFDEIVLVESEEIGTVGVGEATTPYIHVFNRCLGIDEDAFVRFTKGTFKLGIEFVNWGRQGHAYHHSFGPYGREYGALPFHAIWLRHYLENPQDRLENYSLQSVASLNGRFMRPTGANSPLAEIAYAYQFDASLYARFLRSISEAAGARRIEGKIQTVKLDAEGAIESLCLTDGRIVDGDLFIDCTGFRALLLGEALGVGYIDWSKYLPCDRAIAVPTRREGAPAPFTRSTALSAGWQWRIPLQHRDGNGHVFSSAFMDETKAMDDLFANLGSAPIGDPRPIRFTTGRRETFWKKNCIAVGLSAGFLEPLESTSIMLIQNAILRLQYLFPDKGFAAADTAAYNAAMVREYEDIRDFLILHYKVGVRQDSEFWRYCQQMDIPDGLQHRIDLFSSRGRIPEERGEQFRTPSWLAVMVGQGLCPAAPDPLSLSIPSDRVETWLSDLRSVIGNCLSRMPMHQDFIARYCQAEGLEVA

SEQ ID NO: 83948 - protein, 503 aa, Azospirillum sp.
  REGION 1..503: note = tr|A0A239HXY9|A0A239HXY9_9PROT Tryptophan halogenase; OS = Azospirillum sp. RU38E OX=1907313; GN = SAMN05880556_113132 PE=4 SV=1
MGESLPGEILIVGGGTAGWMAAAALARTLNRQARITLIESGSIGTVGVGEATIPAIRHFNRLLGFNEGDFLAFTQGTYKLGIEFRNWRREGHSYFHPFGVYGSSLDASYTHQYWLRLRQLGEGGELADYSLCSVMAALGRYTAPASANSQRDRDILPSIGSAYHFDAALYAQYLRLYAERLGVVRLDRNIVDVVLRGEDGFIEAVVAEGGERLKADFFIDCTGFAGLLIEKALKAGYEEWTHWLPCDRAWAVPSASDGRIVPYTRSTARDAGWQWRIPLRHRVGNGYVFSSNHLGEEAACQTLLSSLDSAALAEPKLLRFTTGRRRQAWVKNCVSLGLSSGFLEPLESTSIHLIQTGITRLLDLFPGKRIEPAEVAEYNALTQAEYEAVRDFLILHYHVTERTGSPLWNDCRTMAIPDSLRQRIDLFRQRGRVSTRGRALFSDTSWLSVLLGQGIMPETYDPLVDVHALDAIRERMGTMRRRIRQAAEAMPTHEAYLAGARAA

SEQ ID NO: 83949 - protein, 496 aa, Asticcacaulis sp.
  REGION 1..496: note = tr|V4P4U5|V4P4U5_9CAUL Uncharacterized protein; OS = Asticcacaulis sp. AC466 OX=1282362 GN=AEAC466_18635; PE = 4 SV=1
MSAQGVKKVVIAGGGTAGWCAAAALSRLLGPVLDITLIESADIGIIGVGEATIPTVRAFHHLLSVDEQAFMRETDATFKLGIGFENWAREGDQYFHSFGTIGKSPWMGHFYNIWLEGRSRGIGGSLDDYSLETKAAKAGKFQIHKNLPINYAYHFDAVMYGKYLRKLSESGGVKRHEGEIKSVQQQAETGFITSVTLASGEVISGDLFIDCTGFRGLLIEETLHTGYEDWTHWLRTDRAVAVQTQPAGPPLPYTKSIAHADGWRWRIPLQSRVGNGLIYASAHLSDEDAEARLMASLDAPAVNTPRLIKYRTGRRKQIWNKNCVAVGLASGFIEPLESTSIHLFQKSVLDLVQNFPFFGINDTLVAHYNRLAQQEIEYARDFVILHYKLTERSDSAFWRENAGMDVPDSLKERIELFQESGLAFQGPGELFRTDSWAQVMLGQRLEPKGWHRLGALMNEGELNQVFAGLKSTIDDTVAKMLPQDAFLKQYCPTAVV

SEQ ID NO: 83950 - protein, 507 aa, Pelomonas sp.
  REGION 1..507: note = tr|A0A0Q7RU47|A0A0Q7RU47_9BURK Tryptophan halogenase; OS = Pelomonas sp. Root1444 OX=1736464 GN=ASD35_10805 PE=4; SV = 1
MRSQALKKVVIVGGGSAGWITAAPLARLLCRPGQPDHCEVTLVESAEIGTIGVGEATLPTISFYNQLLGIDEAEFVRKTQASFKLGIEFSDWGRVGHRFFHGFGGFGPGIHNRPLWAYWLRLREQDPQLPSYEEWSTATVMARNLRFTRPQPDTPSPAGAFNYAYHFDATLYGNYLREHAQRHGAQRIEGTIVRVETSEENGQVTTLHLSDGRRVDGDLFIDCSGFRALLIDGAMKSPYEDWSSWLPCDRAMAVPCQRTDPMTPYTTSTARSAGWQWRIPLQHRTGNGLVYCSSHLSDDEAAGLLLGNLDGAALDKPRQQRFVTGRRKQAWVKNVVAIGLSSGFLEPLESTSIHLIMEAVGRLTALLPDRSFQPTLADEFNRQMARRYESVRDFIILHYKLTERRDSEFWRHCADMPIPDDLAHQITLFRETGRVAILEPEGFGEASWASILLGLGVVPRRHDPYVDQVDIDIVRRHLASVHSAIRNAVRTMPSHADFLASANGSGP

SEQ ID NO: 83951 - protein, 538 aa, Oceanicola sp.
  REGION 1..538: note = tr|A0A5B8BXY3|A0A5B8BXY3_9RHOB Tryptophan 7-halogenase OS=Oceanicola sp. D3 OX=2587163; GN = FHY55_19665 PE=4 SV=1
MGEPIREVTIVGGGTAGWMTALLLQSMLKGGPEGGVRVTLIESPNIPTVGVGEATVPGMPRTLKQGGIDEREFFRTCNASFKLGVVFGHWNEDAEGNRVDYINPFAHPPAIDGVSAAEYALEFGTGGLDFVQTFSPSVDLAAEAKGPRGRGQMPGPPVGFAYHLDAGKFAGLLKEHCVVRGVVHVLDDLVEVELDERGYVAALQLERGGRHPVEMVIDCTGFRGLIINKALGEPFESYGKYLANDRAMAVQVPHRDPERLDSVTKSTALGAGWAWRVPLFNRIGTGYVFSSAHRTDEEARAEFLAHLGEDGEGAEPRVIPMRVGRNRNAWVKNCVAVGLSGGFIEPLESTAIHMIDTAVRWLVAYFPDRDFADPLRNRFNHLVDELYNEVRDFICLHYALGNRTDDQYWIDAREELEVPDSLAENLELWQYGLPTHHDIRFVSLFSPMTYQAVLLGKRVYETGYGKGKFATGRRLDPAKWEAYLARARAGIGAQVQAAAGHRELLRALRGDVVEENGLLPGLGGGPGMVKGEGEAAIL

SEQ ID NO: 83952 - protein, 505 aa, Asticcacaulis sp.
  REGION 1..505: note = tr|V4QY50|V4QY50_9CAUL Uncharacterized protein; OS = Asticcacaulis sp. AC466 OX=1282362 GN=AEAC466_09975; PE = 4 SV=1
MTAGIIRNIVIVGGGTAGWMAAAALSKVLGTQKYSLTLIESDEIGTVGVGEATIPTIQEFNRMLEIDENTFMRETNASFKLGIRFLNWSAQGSDYFHPFGTYGLDMNGINFTHYWMRYHLAGGSADFGLFNPQTLAARQNKFGRMAEINPKAPNVNYAFHFDASLYAKFLRAYSEEKGVVRREGKINAVAQAPDSGDVESVTLEDGGTINGDLFIDCSGFRGLLIEQTLKSGYTDWSHWLPCNRAVAVPCEKTRPITPYTQSTAREAGWQWRIPLQHRTGNGYVFCDSYLSEDKASELLLQRLDGKAQAEPRVIRFVTGHRTKQWNRNVVAVGLASGFLEPLESTSIHLVQEAVLTLLRYFPGKVITDTLRDCFNRDMLAAYDNVKDFLIAHYKVTKREDTDFWAHCKRMEIPDSVKFRLAAFEEHNHSLVEANELFKEASWFAVLVGQGLRPLSYAPQADVMAKEEFDWRMDRIREGTAALAGVMPLHESYIAGVCASRQRVGT

SEQ ID NO: 83953 - protein, 507 aa, Asticcacaulis sp.
  REGION 1..507: note = tr|V4PIM0|V4PIM0_9CAUL Uncharacterized protein; OS = Asticcacaulis sp. AC466 OX=1282362 GN=AEAC466_05910; PE = 4 SV=1
MTATDRSIRKIVIVGGGSAGWMTAAALSNALQTGCHITLIESEEIGTVGVGEATIPAIKMFNQTLGLDENAFLKRTQGTFKLGIQFVDWGRRGHSYFHPFGTYGRPFDTVNAHHFWQRAFEAGRASSLDDYCMAWAAASRGRFAPPSTDQRNVLSTYDYAYHFDAGLYARFLREYAEARGVQRMEGKVSDVAMDAMSGHVTSVQMEDGRCIEGELFIDCSGFRGLLIEGALKTGYCEWTDWLPCNRAVAVPCAATPEPIPYTRATARDAGWQWRIPLQHRTGNGYVYAADHISDEAAADELMANLDAPTLAAPRYLRFVTGRRRLFWNRNVIAIGLSSGFIEPLESTSLHLIQAGIAKLLAFFPDLGFDPMTRDEYNRVATNEIERIRDFIILHYRLTQRTDSALWRYCAAMGIPDTLAEKIEHFRQHGRLIQRDFELFGPASWLAVQIGQLNTPQKTDPLMAYRTLDAAPWLDKLREAMAAAAAGLPTHGAYIDRYCKAEQDPLSC

SEQ ID NO: 83954 - protein, 536 aa, Streptomyces sp.
  REGION 1..536: note = tr|A0A345HMJ5|A0A345HMJ5_9ACTN Tryptophan 7-halogenase OS=Streptomyces sp. GSSD-12 OX=2282738; GN = DVK44_09645 PE=4 SV=1
MSASGTDNRQANDPGRKKRVVIVGGGTAGWMTASYLVAAFGDRIDVTVVESARIGTVGVGEATFSDIRHFFEFLQLAESDWMPACNATYKLAVRFEDWREPGHHFYHPFEQLGSVDGFPLSDWWLRSPTTSRFDKDCFVLASLCDAGRSPRYLDGKLIDQGFAEQERDETSARSTIVEYQGTQFPYAYHFEAALLAKYLTKYSTQRGVRHISDDVTDVALDEDGFISHVRTAGHGRLDGDLFVDCTGFRALLLNKALGEPFESYQDTLPNDRAVALQVPLDMDREPMRPCTTATAREAGWIWTIPLVSRIGSGYVYASDYTTPEEAERTLRAFIGPAAADVEANHIKMRIGRSRRSWVKNCVAVGLSSGFVEPLESTGIFFIHHAIEQIVKYFPSGRDDHHLRNLYNESIEHVMDGVREFLVLHYVGAKRADNQYWKDTKTRRIPDSLAERIEIWKHKVPDAQTVFPYYHGLPPYSYNCILLGAGGIEVRHSPALDLADDRAALAEFERIRLKAEKLVQELPTQNQYFANMRAGAV

SEQ ID NO: 83955 - protein, 508 aa, Pelomonas sp.
  REGION 1..508: note = tr|A0A0Q7RWB4|A0A0Q7RWB4_9BURK Tryptophan halogenase; OS = Pelomonas sp. Root1444 OX=1736464 GN=ASD35_09980 PE=4; SV = 1
MSLLQDIVIVGGGTAGWMTAAALSTVLRGRYRIRVVESDEIGTVGVGEATIPMIQRFNRVVGIDENEFLRETGGTFKLGIEFVDWGRVGDRYMHGFGRLGQDLWSVPFEQYWHRMRALGRAQPLEQYCITRMAAKANKFMPPRTDFGNSPLADIAYAYHFDAHLYARYLRGLSEARGVLRTEGRITHATRRGEGAHAGHVDAVVLESGERIAGELFIDCSGFRGLLIEQTLQTGFEDWTHWLPCDRALAVPSESVKPLTPYTRSTAHRAGWQWRIPLQHRIGNGHVYCSAHVSDDEAAATLLAHLDGKPLADPRPIRFRTGMRRLAWNENVIAIGLAGGFLEPLESTSIHLIQQAVQQLLDFFPDRGFSAPDIAEFNRHSRFHWERIRDFIILHYHLNQRDDSAFWQACAHMTVPDTLREKLDLYRSHGRIVRRDNELFSEVGWIQVMEGQNLTPLRHHPLAELRDEPDTVEYLEGVREVVAKCVAFMPDHAAYVAEHCAAKPAPHPA

SEQ ID NO: 83956 - protein, 493 aa, Fischerella sp.
  REGION 1..493: note = tr|A0A1Z4TVZ5|A0A1Z4TVZ5_9CYAN Putative tryptophan halogenase OS=Fischerella sp. NIES-4106 OX=2005456; GN = NIES4106_59260 PE=4 SV=1
MSTLPKSTQVLVIGGGPAGSTAATLLAREGFDVTLVEKAVGPRYHIGESLLPSSMEVLELIGVKEKVDAYGFQRKDGAYLEWGSESWSFEFTKLNGKQKHSYQVRRADFDKLLLDHASSQGVKVFEGIEVRELSFNGTRPRNAIWSQTSGGNSSGELSFNFVIDASGRAGLMATRYLKNRRQNNVFQNVAVWGYWKGASKLTKGPEGAIGVGSIPEGWLWAIPLHDGTLSVGVVLHREAYKAQRSASLKEFYLNAIAECPLVAELLTQAELVSSVEAEQDFSYTSESLCGPGYFLVGDAACFLDPLLSTGVHLANFSGMLASASIASVLRNEVTEDQALSFYEKSYRQAYLRFLMLVSFLYDQKRGQKAYYQEAQELTHNDYKADAANAAFVNIVSGMEDLTEVQDGIDYQVTKKISQRVAKSISIDDFRKNYDPEVLDPQIMQAMEGTLSFSKDLSVEAAIDGFYIVTQPRLGLSRVQHKAEELLSSELFHS

SEQ ID NO: 83957 - protein, 513 aa, Pelomonas sp.
  REGION 1..513: note = tr|A0A0Q7SFN1|A0A0Q7SFN1_9BURK Tryptophan halogenase; OS = Pelomonas sp. Root1444 OX=1736464 GN=ASD35_18535 PE=4; SV = 1
MNTRLRQIVVLGGGSAGWLVAGLLAAEHGGPDGPLCITLIESASTPPIGVGEGTWPSMRDTLRRIGISEVDLIRECDASFKQGSRFDGWASGREGDRYHHPFTLPTGCGEADLVAAWLAEHADRPFAEVVCPQTAVCDAGLAPKQAATPQFAAVANYAYHFDAGKFSQLLRRHAVGKRGVRHIVDDVEAVLPAADGSVAALRTRTSGDLAADLFIDCSGLPSLLIGGHHGVPLVEQRDVLFNDAALAMQVPHAEPDAPLASCTIATAWSKGWIWDIGLPQRRGVGAVYASRHATQDEAAEALRHYLRATGAPQPLPAMRPISFTPGYRERFWVGNCVAIGLSSGFIEPLEASALAMVELSVQWISESLPADRAALPTLARRFNEVFAYRWRRVIDFLKLHYALSQRDDSAYWREHRDPASWPEALRELLPLWRERPPSRLDLGRIDEVFPWASYQYVLYGMGFRPESTARPAAAQAAAPHLQAAAALSRRMLGGLPKHRALIDHIIRSGLPHI

SEQ ID NO: 83958 - protein, 432 aa, Mameliella sp.
  REGION 1..432: note = tr|A0A2E9I6D1|A0A2E9I6D1_9RHOB Tryptophan halogenase; OS = Mameliella sp. OX=1924940 GN=CMF72_23155 PE=4 SV=1
MLNGAPLAAYYLKYGAGDLDFVYLFSPCLDLRDGLCGPRPFRAGEFAQGAGFAYHLDAGKFSAFLRDTCIARGAVHIFDNLQDVELDETGKVAALHLEKGGRHDVELVLDCTGFRGLIINKALGGEFISYSKYLVNDRAMAVQVPHLSDDIEPMTRSTALGAGWTWRVPLFNRVGTGNVFSSAHRTDEQARDVLMSWVGPAGEGLEPRVIPMRIGRNRENWVKNCVAVGLSAGVIEPLEPTAIHMIDMAVRALITYFPDTSYAAPLRRRYNRQMERLYDEVRDFICLHYALGNRTDSQYWVDAREELAVSDTLAENMALWRYALPQPGDLDSAVLFSAQVYRAVLLGKRVYDMGYKADNFAAGYALDENRWWDFVAKRRARYAEFADRGANHRHLLREIRGELVGRERRGVERGETVDTPRAMSELSENSML

SEQ ID NO: 83959 - protein, 523 aa, unidentified
  source 1..523: note = Sphingomonas turrisvirgatae
  REGION 1..523: note = tr|A0A1E3LSG1|A0A1E3LSG1_9SPHN Tryptophan halogenase; OS = Sphingomonas turrisvirgatae OX=1888892 GN=BFL28_04410; PE = 4 SV=1
MGGGTAGWMAALLLQRAFPNASLTLLESSAIGTIGVGEGSTPALKSFFDAVGIDEHAWMPTCGATFKSGIRFDDWSRVPGFESYFHPFLTQFDRDHIRALAYNSELRRRGVDVHAHPDLFCYSAYLADRALCPVPPHSFPFDVQYGYHFDANRLAAFMKASAQARGVVCRDGLARHVRRDERGDVSAIELDDGATIAADFFIDCSGFASVITKNALGISYETYGDALFNDRAVTFATPPVPVAASHTTATALPCGWVWHIPQQERTGNGYVYSSAHRSEDQAASELAAHLGVAENAITPRTLRFSTGRATTVWNRNTLAVGLAQGVLEPLEATALALVQLTLARFIRYWRAGQGNARYASQLNDEIADAYANVKDYLHTHYLTSNRDDSGYWRACRANGSAISPRLKAVIETWFSGGDIAPVLHETGLGRHYKLNSWLYLLSGMGIYPRGVALTPASREQLDKVPPASIRDFFERCTLNHLPQADALARLRAGLPAEEGAAATDPDLALERMLGLDFAAASPR

SEQ ID NO: 83960 - protein, 505 aa, Cupriavidus sp.
  REGION 1..505: note = tr|A0A5C8A199|A0A5C8A199_9BURK Tryptophan 7-halogenase OS=Cupriavidus sp. OX=1873897 GN=E6Q40_15220; PE = 4 SV=1
MDMYRKFVVVGGGTAGWIAAATLIQAMKGRVGEVELIESDEIGTVGVGEATIPPIQFLNGLLGIDEIDFVKKTQATFKLGIQFRDWSKLGAEYFHPFGVYGQPIDGVGFHHYWLRLREQGEGGSLDSYALSAVAAKAGKFALPPKELPPGVPGLGYAYHFDAGLYAKYLRDYAETRGVKRTEGKIAKVEQDPQSGFVTGLTLTDGRRVEGDFFVDCSGFRGLLIEQALEAGYEDWSHWLPCDRALAVPCENAYRLTPYTRSTAREAGWQWRIPLQHRTGNGYVFCSSHIGAVAAAQTLLANLDGKALADPRSLRFTAGRRKKSWSKNVVALGLAGGFMEPLESTSIHLIQTGAMRLLSLLPIGGYDPAAEAEFNRLTQIEYEQIRDFIVLHYKATQRDDAELWRYCRDMAVPDSLAHKIELFESRAKIARFDEQLFAEPSWLAVFLGQGIWPRDYDRLADVPTYDEAVSALLRIGRMNADIVTRLPTHDAFIAATCKADSIRSSE

SEQ ID NO: 83961 - protein, 532 aa, Erythrobacter sp.
  REGION 1..532: note = tr|A0A3N5DJN4|A0A3N5DJN4_9SPHN Tryptophan 7-halogenase OS=Erythrobacter sp. HN-E23 OX=2488860; GN = EG799_04360 PE=4 SV=1
MTNSEGIVNINAVDRVVIVGGGTAGWMAAAALSRYFDNGRRKIVLVESDAIGTVGVGEATIPPIASFNAMLDINENDFLRATRGTFKLGIEFVNWGRLGDRYFHPFGTYGQDLHGIKFHQLFLREAARGGPRSIADFSMSTAAAAAGRFGRPAPGAQSLVSQIAYAFHFDAGLYASFLRKMAEKQGTRRREGRIVRVHRNAENGDVTGVELDGGEVVKGDLFLDCSGFRGLLIEEALETGYEEWSRWLPMDRALAMPTANTRSPPPFTRATAHGAGWQWRIPLQHRTGNGHVFCSAYTNADDAETTLRDHAEGEPLADPRLLRFVTGMRRKAWNHNVVSLGLSAGFIEPLESTSIHLIQNGIARLFALFPEREISPLERDEYNRGMRELYEDVRDFIILHYKATQRNDTPFWRYVREMDVPESLTRKMALWRLHGRIFRENAELFSEPSWIAVMLGQNVWPDRYDPIADTLDEHRVASAMAQMREAYHRTAQGLPTQEEFLRQAGAWHEEGPTGAPPSPAPFASFHATGGFR

SEQ ID NO: 83962 - protein, 517 aa, Sphingobium sp.
  REGION 1..517: note = tr|A0A0Q4IQT5|A0A0Q4IQT5_9SPHN Tryptophan halogenase; OS = Sphingobium sp. Leaf26 OX=1735693 GN=ASE85_22075 PE=4; SV = 1
MRKTILIVGGGTAGWLTAGYLARRLGADLPGGVEICLVESAEIGILGVGEGTFPTIRRTLATIGIDEAEMVRRCGASFKQGAKFVHWRHAPGQAGPDHYSHPFQVAESPNGMELLPYWLLGAGGDSNWDDVCGPQKMAMDACRAPKLPSHPDYVAPLNYAYHFDAVTLAAMLRDKAVENGVDHKVDQVTDVFVGEDGAIDGVRTARHGILHADLYIDCTGFRAELIGKALGMPYRSCRDVLFCDSAMAMQVPYDSPVDPIASCTISTAQDAGWIWDIGLEKRRGIGHVFSSAHMDDTAAEDRLRAYVGPASERLECRKFRFEAGYRETNWHKNCVAIGLSSGFFEPLEATGIVFSEIAAGMVANLFPWGGDYETSARQYNLNMRKRYERTLDFIKLHYCLSERRDTPFWIENVDPASVPDSLLELLDRWRFRPPTEMDIDLQVDIFSEMSWQYVLYGMGWKTDLSAKAGVYRYREEAIQAFANVRRQADFAIANLPSNRDLISQAHRGHFGERSAAA

SEQ ID NO: 83963 - protein, 513 aa, Sphingomonas sp.
  REGION 1..513: note = tr|A0A0Q5UXI0|A0A0Q5UXI0_9SPHN Tryptophan halogenase; OS = Sphingomonas sp. Leaf198 OX=1736299 GN=ASG20_02090 PE=4; SV = 1
MHQIRNIVIVGGGTAGWLTAGVLAARHKGQREHGFTVTLVESPNIPTIGVGEGTWPTLRATLRKMGVSETELFRHCNAAFKQGARFNRWTTGAVDDGYYHPLMLPQQFGSLNLAPHWLAEDGHDSFCDAVTPQGRICDEGLAPKTMATPEFDGVANYAYHLDAGKFSHFLQRHCCDTLGVRHVLADVTEVILDETGDIARVETAQGVSIKGDLFIDCTGFAAKLIGEAMGVPFRSCTDTLFCDTALAVQLPYERPDDPIASHTISTAQSAGWIWDIGLPHRRGVGHVFSSSHIDVDAAERELRAYIGPAGKDLPVRKLSIRAGHRETFWKGNCVAVGLAAGFLEPLEASAIVLIELSAKMIAEQMPVCREVMDVVANRFNATTTYRWGRIIDFLKLHYTLTKRTDTDFWRDNVRPESIPDRLRGLMELWQYQSPWIHDEFDRAEEVFPSASYQYVLYGMGARTAVMPGTIEADAELARRARRENHVQTQRMMSSLPGHRDLIDRIVKHGLQPI

SEQ ID NO: 83964 - protein, 512 aa, unidentified
  source 1..512: note = Amycolatopsis antarctica
  REGION 1..512: note = tr|A0A263D591|A0A263D591_9PSEU Tryptophan halogenase; OS = Amycolatopsis antarctica OX=1854586 GN=CFN78_08655 PE=4; SV = 1
MIGSVVIVGGGTAGWMTATYLKAAFGERIGVTLVESEQVSRIGVGEATFSTLRHFFDYLGLDEADWLPKCAGGYKLGIRFENWSKPGEHFYHPFERLRTVDGFTMADWWLELGDRSMPFDRQCFITTALCDNKRSPRMMDGSLFAAGLDGSLGKSTLEEQRAQFPYAYHFDADAVAQYLAKYGTDRGVRHIVDNVENVGQDERGWITHVDTKSHGKIEGDLFIDCTGFRGMLINQTMGGEFDSFSDVLPNNRAVALRVPREEATEMNPYTTATAMSAGWMWTIPLFRRNGNGYVYSDQFITPEEAEQELRDAVAPGRDDLQANHIRMRIGRNKQSWVKNCVAIGLSSAFVEPLESTGIFFIQHAVEQLVKHFPDERWDPRLMRDYNDRVGHVVDGVKEFLVLHYKSAQREDTPYWKEAKIREMPAGLAERLELSGSHLLDDETIYPRYHGFENYSWNAMNLGLGNIPPRARPAIKHLDPANARREFANLKAEGEAMVAALPSCYEYLASIND

SEQ ID NO: 83965 - protein, 507 aa, Sphingomonas sp.
  REGION 1..507: note = tr|A0A0Q5V5L4|A0A0Q5V5L4_9SPHN Tryptophan halogenase; OS = Sphingomonas sp. Leaf198 OX=1736299 GN=ASG20_05120 PE=4; SV = 1
MNDRALRSIAIIGGGTAGWMAAAAVSRVLGTHNVAITLVESEEIGTVGVGEATIPPIQAFNALLGINEDAFVKATMGSFKLGIEFVDWLRPGTRYFHPFGVYGTDIGAVPFEGLWHRLRRQGLADPLEAYSICAQAAKDGRFMRPLADGGNTPLHRIGYAFHFDASLYARFLRTHAEAAGVVRREGRVVDVALRTADGFIEAVTLASGARIEADLFVDCSGFRSLLLGETLGTGFEDWSHWLPNDRAIAVPTASNGPPTPFTRSTARDAGWQWRIPLQHRTGNGYVFSSAHLSEDEATATLLANLDGEPLADPRTLRFRTGRRDAFWVKNCVGLGLSSGFLEPLESTSIHLIQAGIARLLEMLPTRDFEAADIRRYNRLMTAEYDSIRDFIILHFHATERADTPYWDHVRTMAVPETLAERIRIYQATGRVFRESDDLFSKTSWLAVMDGQGLRAEGFDPLAASLSVDDAQARLARIAAVTAAAAARMPPHAEFIARHCAGAIASRT

SEQ ID NO: 83966 - protein, 497 aa, unidentified
  source 1..497: note = Aliikangiella marina
  REGION 1..497: note = tr|A0A545TCU4|A0A545TCU4_9GAMM Tryptophan 7-halogenase OS=Aliikangiella marina OX=1712262; GN = FLL45_08830 PE=4 SV=1
MTKSLIKNVVILGGGTAGWMSAVLIKKVMGSVVNVELVESEAIGTIGVGEATIPPIQLFNSVLGLNEAEFLRETKATIKLAIKFDNWKELNHSYYHTFGAAGKSLAFCHFHHLLQRAQNLGHQSHLWEYDLNYLCCEAEKFAKINTQDPILEMGYAYHFDASLYAAYLRKLSEQMGVKRTEGMVNDVKQHKESGFIESLILKDGQEIQGDLFIDCSGMAGLLTEKKLNTGYEDWSHWLRCDRAVAMPSERFENTLPYTRSIAHTAGWQWRIPLQHRNGNGLVYSSHHYSEDEAVNILTDNLESPSLGDPNFIRFRTGRRRKQWNKNVIAVGLSSGFLEPLESTSIHLIQSAIVRLLHNFPHQGIDESQVAEYNKQSKIEYEQIRDFIILHYHVNERTDSQFWIDVRHMDIPASLKHKIKIFKENGQLFREQEDLFAESSWLQVMMGQGIQPRDYHPLADGVPQDKLFNMLDQIKAIKQEPLAKLPTHDEFLNKLCNT

SEQ ID NO: 83967 - protein, 532 aa, Streptomyces aurantiacus
  REGION 1..532: note = tr|S3ZP19|S3ZP19_9ACTN Uncharacterized protein; OS = Streptomyces aurantiacus JA 4570 OX=1286094; GN = STRAU_2393 PE=4 SV=1
MEDHRIKRVVVLGGGTAGWMSASYLGKALGPDVSITVIEAPQVGRIGVGEATVPNLHKTFFDYLGFTEEEWMRECNASFKMGIKFTNWRTPGTGEATARALGQGEDSFYHLFGLLANSDNLPISHHWTHQKLTGQTDEPFDYACYREPPVMDLNLSPRYMDGTKWTNYAWHFDANKVADFLCRFAVEKQGAIHIQDKMTGAEVDERGFITCVKTETGRVIEGDLFIDCSGFRALLINGVMREPFLDMSDHLLNDSAVATAVQHDDEAEGVEPYTGAIAMSSGWTWKIPMLGRFGTGYVFSSRFQSRDDATLEFCKMWGLDPETQPLNQIKFRVGRNRRAWVRNCVSIGLASCFLEPLESTGIYFTYAALYQLAKHFPDKRFDPILQSRFNAEIETMFDDTRDFLQAHFSFAPRNDTAFWRACKDLELADDIKEKMAMYRAGLPVNMPITDETTYYGNFDAEFRNFWNNSNYYCIFAGLDHMPEHTLPILAARPDMVDRSQAVFEGIKAKQKELIATLPSTYEYLRKLHGKTG

SEQ ID NO: 83968 - protein, 496 aa, Colwellia hornerae
  REGION 1..496: note = tr|A0A5C6Q3P8|A0A5C6Q3P8_9GAMM Tryptophan 7-halogenase OS=Colwellia hornerae OX=89402 GN=ESZ27_16580; PE = 4 SV=1
MSHTIKKVVILGGGTAGWISAALLKKLLGSAVSIELVESEKIGTIGVGEATIPPIQHLNNVLGINEVEFIRETKATIKLAIKFEHWKTQGHSYYHSFGAVGKSPAFCHFHHLLKRDNQLENDEHLWQYDLNYLCAEAGKFAKINSKDPILDMPYAYHFDAGLYAKFLRKLSEKMGVVRKEGIVEQVKQCNESGFIQALKLKSGQEITGDFFIDCSGIAALLIQKKLNTGYEDWSHWLRCDRAIAVPSERAETTLNYTRSIAHESGWQWSIPLQHRNGNGLVYSSNYCSEDKAMDLLMSNLEGKAIADPKIIKFQTGRRYKQWNKNVVAVGLSSGFLEPLESTSIHLIQSAVVRLVHLFPHHGVNDTLVTEYNKQSAVEYDQIKDFLILHYHVNQRENSDFWRDMRNMDIPDSLRHKIEIFKENGRLFRDQNDLFLENSWLQVMIGQGIVPRDYHPLANNMSLAQLQATLKKIKEIKQEPMSKLPSHDDFLKHIMKI

SEQ ID NO: 83969 - protein, 517 aa, Sphingopyxis sp.
  REGION 1..517: note = tr|A0A1L3J9Q7|A0A1L3J9Q7_9SPHN Uncharacterized protein OS=Sphingopyxis sp. LPB0140 OX=1913578; GN = LPB140_02500 PE=4 SV=1
MNKDDKIQSIAIIGGGTSGWSTAALLGAILKDSGVKITLIESSDIPTIGVGEATIPPIFEFLRNIGADEVEFIRQCQATFKLAILFKNWVRQGQQYWHPFGNLGITINQRPFHHYWWKNKTHGHDENFADFCPAIALAEDNKFAFPSPDGNWPGGAVAYAMHFDAGLVAKFLRDHSQKAGVIHHDAKVERSKVRDGEWIDGLILNNGDELTADLYIDCTGFRGLLIEEALQSGYVDWSNWLPCDRAVAVQSEPHETRTPYTIATAKEAGWQWRIPLQNRIGNGYVYSSTFTDDDRAAQSLLDGLDSPKLAEPRFLKFTAGYRKSGWIGNCIAIGLSAGFLEPLESTSIHLIHTGLNRLLDYFPDKNFDPALRRAYNAEIEAEYSHIRDFLLLHYYPNQRHGEPFWDAMRHNKLPDSLAHKMELFAQSGRISSRRKELFSDMSWFYVAAGMEITPKYIDPLADIAPFDEVCNIMGQMKGAMAAYRHAAPTHDAILNMLIDPNEKRRPNFGVGAGWSGR

SEQ ID NO: 83970 - protein, 506 aa, Limnohabitans sp.
  REGION 1..506: note = tr|A0A315DP81|A0A315DP81_9BURK Tryptophan halogenase; OS = Limnohabitans sp. 2KL-1 OX=1100699 GN=B9Z47_13450 PE=4; SV = 1
MQQAPLIRSIVIVGGGTAGWMTAAALATMLKGRYPIRLIESDEIGIVGVGEATIPMIQRFNKVLGIDEAEFMRETMGSFKLGIEFVNWGRQGDRYMHGFGKIGQDLWTTRFDQYWQKMRRLGKAAPLENYAITRMAALANKFMPTPDGVQNSPFNDIAYAYHFDASLYAKYLRKLAEQRGVLRTEGKITQVSQRPSDAHVDAVVLENGERIEGDLFIDCSGFRGLLIEQTLHTGFEDWTHWLPCDRALAVPCASASTLTPYTRSTAHQAGWQWRIPLQHRTGNGLVYCSQYISDDEAASVLLAHLDGKALADPRPIRFTTGMRQQAWNKNVVAIGLSSGFLEPLESTSIHLIQNTISQLVEFFPDQGFNPTQIAEFNRQNRFQMERLRDFVILHYHVNQRDDSAFWQACAHMAIPDTLQHKIDLYKTTGRVLRVDNELFAEDGWLQVMEGQNLRTQSYHPLVDLQSEDSIHEYLESVREVIAKCVSVMPDHADFIAQHCAAPKMNM

SEQ ID NO: 83971 - protein, 502 aa, Idiomarina homiensis
  REGION 1..502: note = tr|A0A432Y6I3|A0A432Y6I3_9GAMM Tryptophan halogenase; OS = Idiomarina homiensis OX=364198 GN=CWI70_07650 PE=4 SV=1
MTQPYHIVILGGGSAGWMTAAALSKVLDRQHYKIILVESSAIGTVSVGEATIPGIREFNQLLQIDENEFLRETQGSFKLGIAFENWQNIGDEYMHPFGPYGITLNGVPFHHYYLRHEREVGAGDAMPLHELNLEWSAALAHKFTRPIADKRSPLGHIKYAYHFDAHAYARYLKKYATARGVVALEDRMQTAKQHPNGAIASLMLEKQGELAGDFFIDCSGFKALLISETLGVSYHDWRKWMPCDSAVALPGEHDAADILPYTRSIAHHEGWRWKIPLQHRTGEGWVYSSRFTDSDKAEREFRETIGNFDSTANHLRWINGRRDEAWKHNVCAIGLSAGFIEPLESTGLQLTQSGIMRLISLLPGKGSMTERAQAFNRYTAEEITNIRDFVMCHYKLTDRDDSEFWRYCRDMEIPDSLQERLDLYHENGSIFRNSNNELFNEISWFSMFHGQGLTPAQVHPIAEQMPAETMQQHLATVQRIFKQSVAQLPSHADFIRKHCQAS

SEQ ID NO: 83972 - protein, 501 aa, Sphingopyxis sp.
  REGION 1..501: note = tr|A0A1L3JAP2|A0A1L3JAP2_9SPHN Uncharacterized protein OS=Sphingopyxis sp. LPB0140 OX=1913578; GN = LPB140_04555 PE=4 SV=1
MKNIVIAGGGTAGWMAAAAFARFLSPNYNIILVESDDISTIGVGEATIPPIRTFNAGLGIDEREFIQKTKGSFKLGIIFDGWGRPDQKYIHAFGDMGRPLGLISYYQYWLRANLAGNISTLWDASPSAQAAYQNLYSHLALKNGGHSGVAWAYHFDAGLYAKFLREYSESRGVRRVEGKIVQVNNNGQNGNVDSLILENGDEISGDFFIDCTGFRALLIGENQGAKFDDWSHFLPCDGAVTVPCADNGPLKPYTISKAHKAGWQWRIALQHRVGNGHVFCSEYMSADEAQAILLAHLDGEPYEEPRHIKFTTGRRRQWVKNCLALGLSGGFMEPLESTSIYLIQTAIARFLSLLPSGPQCEILAQEFERQSQIEWQGIRDFLILHYYANQRKEPFWARCRALEIPQSLKDRINLFQQSGQIFRHDEELFTEAGWVQLMVGQGIMPRAYHPLANKLDDAQLAEFINISGAHARDIAGKMVDHREFINLLLDRKIEPKFTGHL

SEQ ID NO: 83973 - protein, 520 aa, unidentified
  source 1..520: note = Aliikangiella marina
  REGION 1..520: note = tr|A0A545T183|A0A545T183_9GAMM Tryptophan 7-halogenase OS=Aliikangiella marina OX=1712262; GN = FLL45_21850 PE=4 SV=1
MTQPLVKKIVIVGGGSAGWLAAGLLAAEHNACAENGIKITLIESPNVPAIGVGEGTWPTMRETLDKIGVSETDFFRSCDASFKQGAKFCKWVDGKDDDAYYHPLVIPNGYTKTNLVHAWQHHKDKIAFADAVCYQGHLCEQGKAPKQISTPEYASVANYAYHLNAPKLGEFLKQHCTEKLNVELIVDHVIDINNDDDGYIESLTTQQNGRLFGDLFIDCTGLKSLLLGQHYQIPFQSKKDILFNDSALAIQVPYQNEDDPIASHTISTAQSAGWIWDIGLPTRRGVGYAYASDYISDEDAEKELRAYIAEKLDRDRVDELTVRKIQFNPGHREKFWHKNCVAIGMAAGFLEPLEASALVLIELAIAKISLDLPANREVMAIAEKRFNKLFLYRWQRIIDFLKLHYVLTKREDTSYWCDNCKPETIPDSLKEMLTFWKHQPPSPHDFTHINEVFPSASWQYILYGMGFETLPSHTDRKTSDYEKAINFFRETQQTTHQYLDALPSNRELINKILKYGMQSV

SEQ ID NO: 83974 - protein, 539 aa, unidentified
  source 1..539: note = Salipiger bermudensis
  REGION 1..539: note = tr|Q0FQ65|Q0FQ65_SALBH Tryptophan halogenase, putative OS=Salipiger bermudensis (strain DSM 26914 / JCM 13377 / KCTC 12554 / HTCC2601) OX=314265 GN=R2601_10012; PE = 4SV=1
MGQPLSSITIVGGGTAGWLAAVYLRRACAERIRITLIESPNIPTVGVGEATVPQMPFTLRQIGLDERTFFRRCDATFKTGVMFRNWNTDRKGKLVSYLNPFSNAPSLDGVSIGNHFHAFGAGKRDYVSCYSPYAHMAKAFKGPFSFKDPKADPMPKPAYAYHLNAVAFAKLLAEVGTERGIEHVLDDVDDVELDERGYVAALQLRERGRHPVELVIDCTGFRGRIIREALDEPFEDYSDYLGNDRAMALQIPHTNPEKLPPFTSSTALGAGWSWSVPLFNRVGTGYVFSSAHRTDDEARDEFLAHLGAAAPPGSEPRVIPMRIGRSRRAWVKNCIAMGLSGGFIEPLESTAIHMIDQSIRMLLFNMPSTDYEAPVRRRFNRLVDDLYGEVRDFICLHYRMGNREDSAYWIDARTELKITDRLAENLELWQYQLPTQHDLESAQLFTHDTYQTVLFGKRCYENGYGAERLNTPREVRAGSWKAYLRDADIRFAKIVDYKGDHHRLLMALRGELEPGAARKTPAVVAARTGSCLKETPVLF

SEQ ID NO: 83975 - protein, 497 aa, Shewanella sp.
  REGION 1..497: note = tr|A0A4Y5YGT4|A0A4Y5YGT4_9GAMM Tryptophan 7-halogenase OS=Shewanella sp. SM1901 OX=2588449; GN = FH971_13120 PE=4 SV=1
MNKSIKKVVIAGGGTAGWMAAAAFSKLLGKNLDIVLVESDQIGTVGVGEATIPTLHIFHRLLGLKEQDVMAATNATFKLGIQFENWHDVNKDYLHSFGFLGKDCWACGFQHFWLKGQQQNMVSQIGDYCTEHLAARQGRFAVLPNQDYNHAYHMDASLYAKFLRKFAEQHGISRIEGKIADVLQHEDTGNIRALQLENGELIEGDLFIDCTGFKALLIEQTLNTGFEDWSHWLPCDSAIAVQTEAVQKPIPYTRSIARESGWQWRIPLQTRTGNGLVFCSKYISDADATELLLNNIEGSPINQPRVIKFKTGTRRQHWNKNCIAVGLSAGFLEPLESTSIHMIQRSIVRLLQLFPSHGVIQADVDEFNQQTKIEMDNIRDFIILHYKVTDREDSRFWRYCKNMPIPASLQHRIDMFSQSGKVYKYGNELFGESSWIQVMMGQGLEPKEYHPIVDMMEEAELQSFLNSIKATVKRKVETLPAHHDFVEHYCKSTAMQG

SEQ ID NO: 83976 - protein, 496 aa, Sphingomonas sp.
  REGION 1..496: note = tr|A0A0Q5UXG2|A0A0Q5UXG2_9SPHN Tryptophan halogenase; OS = Sphingomonas sp. Leaf198 OX=1736299 GN=ASG20_07600 PE=4; SV = 1
MTIPTPPVPLKTIVIVGGGTAGWIAAAMLARFVPRTTKIRLVESDAIGTVGVGEATIPQIRLLTAALGIDENAMLAATQGTFKLGIEFVDWTGPDSRYMHAFGAVGRGLGVVPFHHHWLRAQASGTAAPLGDYIASARAAADARFDRHPDLAYAYHFDATLLARWLRGLAEASGVDRIEGRIVTAQRDGETGDLTGVALDDGRAVEGDFFLDCSGFRSLLLGETLGVAFEDWSHWLPCDRAMAVACETTAPLLPYTRATARPVGWQWRIPLQHRTGNGLVYAAAHLSDDEAVSRLLANLDGVVIGDPRPLRFATGKRATFWERNVVALGLASGFMEPLESTSIHMVQSAVARLLSLFPSAGDNAAARTAYNRQTHVEYDTVRDFLILHYHANRRPEPFWQRCRDMPLPERLAEKIAQFRAAAILTQDVADLFTEPAWLQVMIGQGIHPVTWSPLAEALSPDHLAGFLADIRERHAATARELPAHADTVARHCMAKR

SEQ ID NO: 83977 - protein, 499 aa, Sphingomonas sp.
  REGION 1..499: note = tr|A0A031I303|A0A031I303_9SPHN FAD dependent oxidoreductase family protein OS=Sphingomonas sp. RIT328; OX = 1470591 GN=BW41_00831 PE=4 SV=1
MDPLAIRSIVVVGGGTAGWMAAAALSHMLTGVEIDLVESEAIGTVGVGEATIPHILYFNRLLGIDEAEFIRQTGATFKLGIEFVDWGRIGDRYFHPFGTYGQEMEGLHFHHFWYRQTRLGHALPLDRFSIGAQAAAAGRFQRPDQARPGSPLGTLNYAYQFDAGRYARFLRERAEARGVRRSEGRITTVRRAAETGHVEAVVLEDGRALGGDLFIDCSGFRGLLIDQTLAAGFEDWSHWLPCDRAVARACARVDAPLPYTRATAVAAGWRWRIPLQARTGNGFVYCSHYCDDEAALRSLDAALDGEPLSNPNVLRFKAGLRRKAWDRNVVALGLAAGFLEPLESTSIHLIQSGIARLLTNFPDRCFNQHDIDYYNRRTRIEYEQVRDFIILHYAATTRDDSPLWRHCRTMALPASLAERIAIFRENGRLYRHDNELFSETSWLAVLHGQGIAPKRQHPLAHQLPEQELDRRMAHIARAMDLTVERMPSHQDILDTIAGG

SEQ ID NO: 83978 - protein, 405 aa, Advenella kashmirensis
  REGION 1..405: note = tr|V8QX47|V8QX47_9BURK Tryptophan halogenase; OS = Advenella kashmirensis W13003 OX=1424334 GN=W822_06095; PE = 4 SV=1
MIGAGPSGSVAAALLRQRGWQVCVLERQHFPRFSIGESLLPYCMEILEEAGLLQAVNEAGFQVKNGAAFTWGDRNTTIDFRDKFTAGPGTTFQVQRARFDQILIQEAEKMGAEVHFGHTVNNLDFTDEHATLSVSTDQNQSYTLQARFVLDASGYGRVLPRLLNLERPSAFPLREAWFTHIQDNISDPDFDREKIVIATHPRDRAIWMWLIPFSQGRCSIGVVGEPSHLAMNGRDPLVFLQDITREIPLLKRLLENAIWDTPVNPLRGYSANVTSLHGSRYALLGNAAEFLDPVFSSGVTIAMHSAKLATALVDKTLHGQTPDWEKDFVQALRVGIETFKTYVSGWYDCRFQDVIYSTQMNQDIRRMIASVLAGYAWDISNPFVEKSERRLNALAEICGEAQLDT

SEQ ID NO: 83979 - protein, 511 aa, Erythrobacter sp.
  REGION 1..511: note = tr|A0A3N5CRH3|A0A3N5CRH3_9SPHN Tryptophan 7-halogenase OS=Erythrobacter sp. HN-E23 OX=2488860; GN = EG799_04365 PE=4 SV=1
MNGDPISRIVIVGGGTAGWMAAAAISRIMGELPDLTITLIESDAIGTVGVGEATIPQLIGFNKLLGVDEREFVRETHATYKLGIEFVDWLRLGHSYVHPFGSYGIDMKGIEFHQFWLRGRALGEAAELDDYSIAVAAAKAGKFLWPRPDQPNSPLARLSYAFQFDAGLYARYLRRRAEAQGVKRIEGRVTDVSQDGETGHVDAVTLESGERVEGELFIDCSGFRALLIGQTLGVPFTDWTDWLPCDRAVAVPCTLAGANEPLTRSTARPAGWQWRIPLQHRIGNGHVYSSTHMSEDEATAILLANLDGRPLAEPRHLRFTGGLRQRAWEKNVVALGLAGGFLEPLESTAIQLVQAGIARLMSLFPTTAFAPVEMERYNRETEEAYTDIRDFLVLHYLASERDDTAFWRYCRNLDPPDGLKEKLAMFRSSGRVIREHNELFTETSWLSVMVGQGVQARGYHPAAALLDEDETRRRLGHIREVIATTVSQMPTQEEFLAQNGSAIPRERRITA

SEQ ID NO: 83980 - protein, 499 aa, Sphingomonas sp.
  REGION 1..499: note = tr|A0A0Q5UFZ9|A0A0Q5UFZ9_9SPHN Tryptophan halogenase; OS = Sphingomonas sp. Leaf198 OX=1736299 GN=ASG20_16880 PE=4; SV = 1
MRDGTGGLMRQEQLRSVLVAGGGITAWCAAAALKRRAPFLDVAILRCTPSRDALADRIACTLPSLLGFHDDLGIGAADGIARTASGYRLGTLFSGWATVLPDYVHAYGRYGRSLGPTAFHLHWVRSVLEGARAAPFDSHSPAAALARAGRFAPPMPETPFADHEYGLTLDLPRYQTMMRAFALHVGVREIVGEIADFVRDTGDGIAAVELASGSRIVADLFVDATGPDAKLRGALDDVRDDWSAWLPCDRVLLAEGSAEPLVLTTAVAHPAGWRWSSGAQSGFAYASGEISDAKAARVLRNAAGTAPGEPIRVRPGTRPHPWLGNCIAIGDAATEVEPLEWCNLHLALSAIDRLIAMLPGRTPTRGEAAEFNRQTLAEAERVRDFLALHYRVAQRDDPLWQAVAAAAVPPASLSHTLAQFTERGRLPFYEEETFARDSWAAVLIGQGVLPRRIDPLVAAVPAAAAQTAMARLTTEIAAALPHIPTHAAYRAAQTRHLLP

SEQ ID NO: 83981 - protein, 494 aa, Acinetobacter sp.
  REGION 1..494: note = tr|G7GD43|G7GD43_9GAMM Uncharacterized protein; OS = Acinetobacter sp. NBRC 100985 OX=1071390; GN = ACT4_021_01340 PE=4 SV=1
MLNLRGMNRVVVVGGGTAGWFAALQLRQLFSASVEIMVISAPQIPIVGVGEGGVLNLLTVLHDLNVDLKDFIAKTGSTLKLGFRYESWRTGQSDDYYYHLFPLATDDFVWNENGYNPFLSGLFNHGIDISKYMASYQFSEEKKPFEEVLEILLEGKNNFGASLHFDTFRVGQYLRDIAIARGILHVEEKVESFQIDTLTGHISSICLEKRNIDCDFLIDASGFARLLIGKQYQSEWCSFSDVLPLNRALPFHLQYGDEPKELVTRATAMSSGWMWQIPLQERIGAGYVFHDEFISDQQAQREVEAWLGCEIKPAKPISFEAGCYKEVWIKNVVAIGLASGFVEPLEATSIGQMLTQLQLLVSFIKENHGIISKQNIDCFNQQNTQFWFGIRDFIRMHYDTGRSDTDFWKFMLTVQQPETYQELKKCWVYRTPRDIDFVQHSMGGVSMFSVASWFAVGAGVGIIKPDATATELYALSPEKKARVAKFLHEFKRNS

SEQ ID NO: 83982 - protein, 519 aa, Sphingobium sp.
  REGION 1..519: note = tr|A0A2L0A9W1|A0A2L0A9W1_9SPHN Tryptophan halogenase; OS = Sphingobium sp. SCG-1 OX=2072936 GN=C1T17_11195 PE=4; SV = 1
MTTDTPSPGRAVILGGGTAGWLAAAYLSRTLKMSNVTLVESSEIGIIGVGEGTFPTIRSTLANLGISEAEFLVRANATFKQGVLFEGWADGSDSYFHPFNLPIGGEDEALLPHWIADTNPTRPSWADAVTVQEQVIRAGRAPKRPDDPDFSGPMNYAYHFDAARFADYLRDISVAAGVQRVEGTVATVERQGNGDIAALLLIDEQRIEGDFFLDCSGFGALLIGRTLGAEFTSCGDTLFNDRALAMQVPYARPDTPVRPYTLATAHDAGWTWDIGLTERRGIGYVYSSRHCSDDEAEATLRRYVGKDGDALTPRQLRFATGYRERQWIGNCVAVGLSAGFFEPLESTGIMLIESALRMIGDFLVPGDRALLDAAARSFNRSMAGRFERIVHFLKLHYCITRRTDTAYWRDNADPATIPEALRDMLAQWRSRPPSRFDFIVDLETFLPPSYHYILYGMGFQTKLAAGAARYPGAADAREAFARVKAASAGAVAHLPDHRALLNRFHADSSHKTIASLQSR

SEQ ID NO: 83983 - protein, 533 aa, Asticcacaulis sp.
  REGION 1..533: note = tr|V4PDD2|V4PDD2_9CAUL Uncharacterized protein; OS = Asticcacaulis sp. AC466 OX=1282362 GN=AEAC466_02490; PE = 4 SV=1
MTPLRKVVIVGGGTAGWMAAALLSKLTRQKAGQKNGQAYERGLEIELVESEDIGTIGVGEATIPAIKRFNHLLELDENDFIRATQATFKLGIEFTDWGHVGNSYIHGFGKIGQDLGWLRMHQYWLKMRGTGQVSDVFADYSINTAAAYENRFMRARDDMKASPFNDIAYAYHFDAGLYARYLRTYAEKLGVKRTEGRIVRVNQRSTDGFIESVRLESGAVVPGDLFIDCSGMRALLIEETLGSGFEDWSHWLPCDRAIAVPCGFRPAQAISRTGSDAPARLPNAELASGLTPYTRSIARPAGWQWRIPLQHRIGNGHVFSSRFMSEDEATAILMANLDGDALAEPRVIRFKTGKRRKVWQKNVVAVGLASGFMEPLESTSIQMVQSALLRIVALFPDMSFAQTQIDAYNTQSDFEYTRIRDFLIAHYKVTTRDDTAMWRFCRDMDVPETLRARLDLWRRAGRYFKDADELFADESWIQVLIGQGLVPDSYDPFVDLRPDEEAVKYLNDIKTVIAKCVAVMPAHADYIEATCKA

SEQ ID NO: 83984 - protein, 503 aa, Sphingomonas sp.
  REGION 1..503: note = tr|A0A0Q5UKV1|A0A0Q5UKV1_9SPHN Tryptophan halogenase; OS = Sphingomonas sp. Leaf198 OX=1736299 GN=ASG20_16885 PE=4; SV = 1
MAKPKTRVVVVGGGTAGWMTAAALSRLLPGQCSVHLIESEAIGVVGVGEATLPHIRAFNERLGIDEADFMARTRATFKLGIEFRDWNRLGDSYIHPFGTFGRGAAGVDFQHYWARLLREGAPLPSLDTVSYACALARAGKFDRPETDPHRLAGTFGYAYQFDALLFAPYLREIAEGMGARRTEGVVVRVERDGDSGDIAAIVLDTGERIEGDLFVDCSGFRALLLGEAMAEPFVDWSHWLPTDRAVAMPCRTRTAVTPYTSAIAMPAGWRWRIPLQHRTGNGYVYASGFVADDDARRALEAAVEGEALAAPRVLRFKAGRRRRSWVGNCVAIGLASGFLEPLESTSIYLVQQAITTLIELFPEPRIAAADRDEFNRVIDLEYDRIRDFLILHYHATTRSDSPFWDYVRTMPIPDTLSEKLDLWRTRARIVKYREGVFLDPSWVAVYLGQGIVPEGWDPRADPVASDALARSLDALRGEIASDVARRPDHRSFIERYCAMAQAA

SEQ ID NO: 83985 - protein, 515 aa, Sphingomonas sp.
  REGION 1..515: note = tr|A0A0Q5PSY4|A0A0Q5PSY4_9SPHN Tryptophan halogenase; OS = Sphingomonas sp. Leaf343 OX=1736345 GN=ASG07_06205 PE=4; SV = 1
MGGKSAATVNTVIVVGGGSAGWLAACRLAAQAKRTGSGVSVTLVESDRIPTIGVGEGTWPTMRNTLAKIGISETEFIRSCDAALKQGARFVGWTDGQPGDAYYHPLNPPAGASEIDLAPYWLGRSTDFADCVDYQAALCEAGLAPKTITSAEYAGHANYAYHLDAGKFATMLREHATGALGVTHVIGDVARANQADNGDILDVEMADGRRIAGDLFVDCTGFAALLIGGVYGVPFESCRDVLFADRAIAMQVPHASDDDPIACHTISTAQDAGWIWDIGLWTRRGVGHVYSSAHTSDDAAEAALRRYVGPAGDDLSVRTIRIDGGHRERFWQNNCVAVGLSAGFIEPLEASALMLIEASMDAIAERLPRTRSAMNLAARQFNATFRHHWMRIIEFLKLHYVITQRTDTDFWQDNVAASSIPDGLEERLEFWRHHSPAPQDFPHAREVFSWPSYQYVLHGMRFASRYPPVGTATPEAAMAAGLITRNERIRGDLIARAPAHRDLLRAVRNYGLQRV

SEQ ID NO: 83986 - protein, 618 aa, Frankia sp.
  REGION 1..618: note = tr|A0A1X1MWL2|A0A1X1MWL2_9ACTN Tryptophan halogenase; OS = Frankia sp. KB5 OX=683318 GN=KBI5_11265 PE=4 SV=1
  VARIANT 267: note = Xaa can be any naturally occurring amino acid
MRDHYDVIIAGGGPAGSTLAALLARTSDLKVAIFEKDEFPREHIGESFAHPLIPVLAESGALAKVLASNCWVKKFGGIYSWARQGPSRAFFDHANWAVDGVHRWALHVNRSEFDQILLEHARDLGVDVTTGMAVTDFAAAANGCQVTLADGTAVSGAYFVDASGRQQSLVTKKPREWLSGYRNIAIWQHYLGGLPAQGLDGDWNIFREKNLSPIGCFAFPDGWCWYIPVPRIVNGERVLTHSIGIVTSPEVLKEPGKDFTDSEVFLXTVRGVPRLADLVAEVTPISDQMMTVTNYSRVNERFADLDRHWILIGDASYFVDPLFSSGVAFAANQAASAALLLRTTLRAELSPGLVRDLWQDYDHEWHGMAEVFALSIDQWYHMIGADNPGSAYWHRRNSSPHLDMPDRSFDALLNTAFTPDLLLIMTRGTGRMSDLAIDGPYQQARAHVMLTEPEPDAVLVAAPGVRMRAGVALDVPGFKAVLPPADLELDTPAAVRAAVAEYWTDPVAAEANGGLGVPSPTASPVPCHRFEFDSDALVDSGSGATGFSVRGVDSHDGAPQLWEILSRGPVVYGELGSRLAPGQRVLLQRLIKAGMVTVKTAARQTTPGTEAAEVTLAD

SEQ ID NO: 83987 - protein, 499 aa, Sphingomonas sp.
  REGION 1..499: note = tr|A0A0Q5UJQ7|A0A0Q5UJQ7_9SPHN Tryptophan halogenase; OS = Sphingomonas sp. Leaf198 OX=1736299 GN=ASG20_15420 PE=4; SV = 1
MNDTSEPPRTRVVVAGGGTAGWIAAAAIVRQLGSLVDVTLVESDEIGTVGVGESTIPTARSFHAFLGIDEAAFMRATQATFKLGIAFENWRQVGDRYFHPFGSIGRSVAIADFQHFWLEARARGFGEAYGDYSLEQQAAGAGLFGHDEQHSLAYAYHLDATAYARFLRALAEPWGVRRVEGCIERVERDGEGGYIAALVLASGERISGDLFVDCTGFRALLTEGTLETGFEDWSEWLATDRALAVQTETVGPPVPYTRAIAHGAGWRWQIPLQTRTGNGLVYSSGHMSDDEAHETLIGALDGRTLFEPRPLRFRSGMRRQAWNRNCIALGLAAGFIEPLESTSIHLIMNAVIRLIQLFPFRGDDHGALASRFNAQSRHEWEHVRDFIILHYHVTQRDDSAFWRDCARMTIPDSLAERIALFTKTAGAWQGQDDLFRIDSWVSVMLGQGVVPRAHHRIASIIKGQELRTSFEDLSRGIASTVRLLPRHCDFLARYCPADG

SEQ ID NO: 83988 - protein, 495 aa, Erythrobacter sp.
  REGION 1..495: note = tr|A0A3N5DMY2|A0A3N5DMY2_9SPHN Tryptophan 7-halogenase OS=Erythrobacter sp. HN-E23 OX=2488860; GN = EG799_12000 PE=4 SV=1
MSERRPPHVVVLGGGSAGWITACLLHRAWHERGGRVTVVESPDIGIVGVGEGSTPQLKAMFDHLGIAEAEWMAACDATFKLGIRFTGWSERPGFQTYFHPFPGPVDLHTEPAFARNCALARRGFAISALPDDYFLAARLAMEGKGPRASDTFPFAPSYGYHFDAYRLGAFLRDWGVRRGVDHLSRTVDDVEMAADGSVAALLCEDGIRIDGDIFVDCSGFRAMIAQGALGARYISFSDNLFNDRAVVMQTMANRDCHPQTDSVAMRAGWRWRIPLTTRAGNGYVYSSRHISDEDAEAELRSAIDAGADVDARIVRMKVGRLEESWQQNCLATGLAQGFIEPLEATALHIVIATALDFARSYEEGGFGPRNRDAFNARTAMRYDGIRDYIVAHYRMNQRSDTAYWRENAANAALSDNLKTMMTAWFTHRDIASVNRETYAEPPYPAMSWLALFAGYGTFPPREKAQGLPPPGSAADPQAITDMLTACTRNFAPATR

SEQ ID NO: 83989 - protein, 498 aa, Sphingomonas sp.
  REGION 1..498: note = tr|A0A031HYZ9|A0A031HYZ9_9SPHN FAD dependent oxidoreductase family protein OS=Sphingomonas sp. RIT328; OX = 1470591 GN=BW41_01308 PE=4 SV=1
MAGEERIRVVIVGGGTAGWMTAAALATLAPGAAEVHLIESAEIGIVGVGEATLPHLRAFVTRLGIDEAAFMAATHATFKLGIEFRDFGAIGDAYIHPFGSYGRALDGVGFHHYWLRRHHAGTVPPIGDYSTAVAAAAALRFTRPGADPHDLANAYGYAYQFDATLFGPFLRSHAEARGAKRTEGRVVSVERDGESGDIAAVTLADGTRIAGDLFIDCSGFRALLIGGTLDEAWEDWSHWLPCDRAVAAPCASPEGGIEPYTRATAMAAGWRWRIPLTHRIGNGYVYASEYLSEGAATDALVAAMESPPLAEPRHLRFRAGRRRRSWVGNVVSIGLASGFLEPLESTSIYLVQMAITQLIEHFPAARVCAADRDGFNTLVDAEYDRLRDFLILHYHATTRDDSPFWDHVRTMTIPDSLTAAMTLWRQTGQVARYTHGLFLEPSWIAVYLGQNIVPEGWDPRADLPDGASLDRALAALRGGIAGAVAAMPDHAAYLGTAA

SEQ ID NO: 83990 - protein, 516 aa, Sphingomonas sp.
  REGION 1..516: note = tr|A0A0Q5Q311|A0A0Q5Q311_9SPHN Tryptophan halogenase; OS = Sphingomonas sp. Leaf343 OX=1736345 GN=ASG07_03425 PE=4; SV = 1
MIAKRRTVTIVGGGTAGWMAAALLSRLLVDGYDIRLIESDEIGTIGVGEATIPSIRTFCGLAGVDQVAMIRATQATFKLGIEFVDWRDRGHSYIHGFGKIGQDLMWLHPHQFWLKYAPRGQAKHFDTYALNCVAARMNRFALPDTRQPESPMAGIDYAYHFDASLFAQFLRTTCEARGVERIEGRIVSVEQRPENGFVDHLTLADGRSVGGDLFIDCSGMRGLLIGQTLGVGYEDWSRWLLCDSALAVPCGSVAPLTPYTRSTARDGGWQWRIPLQHRIGNGHVYSSAHVGDQAAADTLLANLDGKPLADPRPVRFRPGKRERAWEKNVVAIGLASGFLEPLESTSIHLIHTGLLRLISLFPRDDFDARDIAEYNRQTDFEYRDIRDFIIAHYKVTDREDTDFWRYCKTMEVPDSLNERLDLFASSARFFVRNKAELFREESWVQVLLGQGMAMRYDPMVDMIPDDQAIGFLSDIEAVVADCARAMPDHAAYIQRNCSATATPVMRPPTGRLTVRV

SEQ ID NO: 83991 - protein, 509 aa, Sphingomonas sp.
  REGION 1..509: note = tr|A0A0Q5Q200|A0A0Q5Q200_9SPHN Tryptophan halogenase; OS = Sphingomonas sp. Leaf343 OX=1736345 GN=ASG07_01680 PE=4; SV = 1
MQSGTIGEAEGDRRVRSILIVGGGTAGWMTAAALAHAMPRGCRITLVESEEIGTVGVGEATIPPIRLFNETLGIAEADFLRETKGSFKLGIEFVDWGRLGHRYFHPFGGYGKPFDLLPVHQHWLAARAQGCAVPLDDLSMAWGAASRNRFAPPLADPRSVASTFDYAYHFDAGLYAAFLRRYAEARGVVRVEGRVADVALDGEGGQVASVTLDDGRMLAADLFVDCSGFRGLLIEGALKTGYEDWRHWLPCDRAVAMPCATGGDGFTPYTRSTARAAGWQWRIPLQHRTGNGYVYCSEYLSDDEAAATLAANLDGAALGDAWPLRFATGRRRLFWKRNVVAIGLSSGFMEPLESTSIHLIQAGIAKLLALFPTRDMAPMLVDEYNRIAITEYERIRDFLILHYTLTQRDDAPLWRYCANMAVPDTLALKIAHFRDSGRLIARDMDLFGPASWLAVHVGQFNMPVGADPLLGNMADPGASRDFVERLAAAIAGMAGSMPVHRDTVARMVR

SEQ ID NO: 83992 - protein, 504 aa, Frankia sp.
  REGION 1..504: note = tr|A0A1X1N1G7|A0A1X1N1G7_9ACTN Tryptophan halogenase; OS = Frankia sp. KB5 OX=683318 GN=KBI5_06660 PE=4 SV=1
MSASARPEEYDVIVVGGGPAGSTASTLVALEGHRVLLLEKEVFPRYQIGESLLPATIHGICRLLGVADEVEQAKFMPKRGGSFRWGTNPQPWNFLFALSPQLSGPTSYAYQVRRADFDDILLRNAARKGVDVREGVDVREVLREGGQVRGVRWLDGEGISHRATAKWLVDASGNKSALYKEAGGDRHYSEFFKNIALFGYFEGGKRLPGPDAGNILCAAFDEGWMWYIPLSDTLTSVGAVVSRTQADQLRGDQEAALWGFVNRTSVVREMMSDATRVTEGMYGELRTRRDYSYTNTRFWAPGMVLVGDAACFIDPVFSTGVHLATYGALLAARSINSVLAGDLTDERAFGEFDGRYRREYGVFHEFLTAFYDMQANEGSYFWKARKVTEENSTDLEAFVTLVGGVHSKEVALAGRSGEFSTLAERFNRSAADLADAAEKTGTMQTESGERMYHLFGAPVVADVMKEMNQIQARGLRGEATRESPILTGGLITSRNGLRWAEATG

SEQ ID NO: 83993 - protein, 503 aa, Sphingomonas sp.
  REGION 1..503: note = tr|A0A2A2SBP9|A0A2A2SBP9_9SPHN Tryptophan halogenase; OS = Sphingomonas sp. 1PNM-20 OX=1141887 GN=CKY28_15795 PE=4; SV = 1
MTDRSPSPPIRIVVLGGGTAGWMAACLFAHEWPQARVTVIESPDIGIIGVGEGSTPQLRALFAKLGIAEADWMPAANATYKVGIAFTGWSERPGYGRYFHPFASAVDLHTEPQFHASARARRTGRDVPAHPDRFFLNSRLAERGFVPLAPDNFPFEVGYGYHFDAHLVGQVLARRAAELGVEHRQDRVVEVAVGEDGQVSHLLTDGGEAIAGDLFVDASGFRSVIAQAALGGKFLPFASNLFNDRAVVMPTPNGDELNPYTTATALSAGWVWHIPLTSRAGNGYVYSSRYIDPDHAETELRRHLGTLDDPTPARHLEMKVGRVERSWTGNCLAIGLAQGFIEPLEATALHIVQATVEGFIQAYADGGFTPQHRDVFNRTIARRYEGIRDYIVCHYRLNRRTDTQYWRDAATLADLSDDLKAVMTCWFTGGDLPAEVHRLDIARYYAPMSWGCLLAGYGTFPADEKLRPAPPPADLASLDRLLDGCLLNFRSHAQALGSLRASA

SEQ ID NO: 83994 - protein, 547 aa, Idiomarina homiensis
  REGION 1..547: note = tr|A0A432Y5E2|A0A432Y5E2_9GAMM Tryptophan 7-halogenase OS=Idiomarina homiensis OX=364198; GN = CWI70_04685 PE=4 SV=1
MEKRKILIVGGGSAGWMAAAYLNGALNRRGNDHRVDIELLESPDTPRISVGEATIPSMRHLLAAIGIDEMEFMRVTEGTFKQSIKYVNWVHNDNSFYHHPFSSLRAQPIDYAGSDWLRSDRSVPFMETCSIQPLVCEWGRAPVMFGEWRMGARLNYAYQMNAQKFADYLRDFSTARNVVHTMANMAEVKKHANGDIASVTTDKGQEITADIFVDCTGFRSLLLEKEMGVGYEDFGKYLLCDRAVTMHVPYDTHYPGMVRPYTTATALSNGWIWDIPMQTRRSIGYVHSSAFIDEEAAEREMRAYQGGNTDDLPCRFIPFKAGRRHQQWQGNCVAIGLSGGFIEPLESTGLYLSDLGAVLLAEHFPWRREDQEILAARYNRLMTNRYYEILDFINMHYCLTKRTDTEFWRTVQEREHITDRLQAKFEFWRHKPPSAHDFQDQNFAALVGQADGALPPLGSGLMDARSPVDTGGLWNHESYECILYGMEFLQEECDQWFGERRPPTQVNPAILQRLQMARQMLPPHELWLQRALGMKDYPTAARPKGWV

SEQ ID NO: 83995 - protein, 505 aa, Sphingopyxis sp.
  REGION 1..505: note = tr|A0A1L3JEK4|A0A1L3JEK4_9SPHN Tryptophan halogenase; OS = Sphingopyxis sp. LPB0140 OX=1913578 GN=LPB140_04575; PE = 4 SV=1
MTPPKSIIILGGGTAGWMAANLLAHHWSDRGVKITLIDSADIGIIGVGEGSTPQLKAFFDILGVTERQWMPQCNATYKLGINFEGWSNRHGFDRYFHPFQSELDGQILPAFYYNALARRTARNVPAHPDLFFLPTKLARMGNGPIAKNGYPHQLSYGYHFDAHLVGQFLKKLALDRGVRHLDRKINSASLNTMGEIDAIIDEDGGEYRADFFIDCSGFRALLIQKSLNEKFISYGDMLFNDSAVVMPTLPAMAADKGPNNYTGARALSSGWLWNIPLTNRTGNGYVYSSHYQSDDKAEIEFRTEIGALEDKGHVRHLKMKVGRVENSWVKNCMALGLSQGFLEPLEATAIHIVLATMEKFIAQYNNPENTDIADAQAIFNEDIGRRYDGICDYIVAHYKLNQRHDTQYWRDNAQNQNLSPSLKQIITTWFTAGDLTREIGRQNISSYYSSLSWHCLFSGYGIFPMEDKMIPAGDDIRHYDMQEIENFLADHADNFPSHAELLGKL

SEQ ID NO: 83996 - protein, 412 aa, Neisseria flavescens
  REGION 1..412: note = tr|A0A154U3Q8|A0A154U3Q8_NEIFL Tryptophan halogenase; OS = Neisseria flavescens OX=484 GN=TW90_0730 PE=4 SV=1
MSVEFDVAVIGAGPSGSVASALLNKQGFKVCVLEKQHFPRFVIGESLLPHCMEMLEEAGFADAVHAEPSFQFKDGAAFSWGSRYTDFNFTEKFSDGPGTIYQVRRGIFDKILIDEAAKQGVDVRFGHGVTAFDNSGDVARLSVESDTGENYELTAKFVLDASGYGRVLPRLLDLESPSELPPRQAHFTHIDDNITSPKFDRNKILINTHPEHRDVWIWLIPFGDNRCSIGVVGTPDKLAGESEAVLKKFVYECPMLAEILDKAVWENDFPFRSIQGYSANVKTLYGKHFALLGNAAEFLDPVFSSGVTIALHSAKLAADLLGKQLKGETADWQTEFADQLMIGVNAFRTYVNGWYDFRFQNAIYAPNRSPEISRMISSILAGYAWDTNNPFVEKSEQRLSTLAALVGDLKVE

SEQ ID NO: 83997 - protein, 497 aa, Shewanella sp.
  REGION 1..497: note = tr|A0A3N4EMF8|A0A3N4EMF8_9GAMM Tryptophan 7-halogenase OS=Shewanella sp. R106 OX=2487741; GN = EGC77_03470 PE=4 SV=1
MNKSVKKVVIAGGGTAGWMAAAAFSKLLGKNLDIVLVESDEIGTVGVGEATIPTLHVFHRLLGLKEQDVMAATNATFKLGIQFENWHDVNKDYLHSFGFLGKDCWACGFQHFWLKGQQKNIVSEIGDYCTEHLAAREGRFAVLPNQDYNHAYHMDASLYAKFLRKFAEHHGMTRIEGKIADVLQHEDSGNIRALQLENGELIEGDLFIDCTGFKALLIEQTLNTGFEDWSHWLPCDSAIAVQTEAVQKPIPYTRSIARESGWQWRIPLQTRTGNGLVFCSKYISDADATELLLNNIEGKPINQPRVIKFKTGTRRQHWNKNCIAVGLSAGFLEPLESTSIHMIQRSIVRLLQLFPSHGVIQADVDEFNQQTKIEIDNIRDFIILHYKVTDREDSRFWRYCKNMPIPASLQHRIDMFSQSGKVYKYGNELFGESSWIQVMMGQGLQPKEYHPIVDMMEDAELASFLNSIKATVKRKVDTLPAHHDFVQHYCKSTAMQG

SEQ ID NO: 83998 - protein, 498 aa, unidentified
  source 1..498: note = Paraglaciecola polaris
  REGION 1..498: note = tr|K6YEL0|K6YEL0_9ALTE FADH2 O2-dependent halogenase I OS=Paraglaciecola polaris LMG 21857 OX=1129793 GN=prnA; PE = 4 SV=1
MQQDAIKNVVIAGGGTAGWMTAAAFGKLFGKNIKVTLVESDAIPTVGVGEATIPTLHLFHDLLKINEADFMAATNATFKLGIKFDDWYKKQQSYIHSFGHFNHGCWAAGFQHFWLRGKNVNIASEIGDYCPEHLACRLGKFATAPKQERNHAFHLDAGLYAKFLRNIAQQCGVKRIEGKINTVNLDEDNGFIQSLILDNGQHIVGDLFIDCTGFRGVLIEQTLHTGYEDWSHWLPCDSAVAVQTELLGNSVPYTRSIAHDAGWQWQIPLQNRMGNGLVFCSKYISDEDAKTQLLANIQGKTLNTPRVIKFKTGVRRKLWNKNCVAIGLAGGFIEPLESTSIHLIQQSIIRLMQSLPTKRMDPAIIDRFNTSMRGEIDNIRDFIILHYHATARKDSAFWRYCQNIPIPETLRARMEQFAQSAHVYQGSGELFGEASWLQVMLGQGIMPNSYHPIVDLMSEQELIEFLATIKSQTSRRVSSLPDHLDFIRHYCKSPSAHT

SEQ ID NO: 83999 - protein, 412 aa, Neisseria flavescens
  REGION 1..412: note = tr|A0A154UDP6|A0A154UDP6_NEIFL Tryptophan halogenase; OS = Neisseria flavescens OX=484 GN=TW91_1518 PE=4 SV=1
MSVEFDVAVIGAGPSGSVASALLNKQGFKVCVLEKQHFPRFVIGESLLPHCMEMLEEAGFADAVHAEPSFQFKDGAAFSWGSRYTDFNFTEKFSDGPGTIYQVRRGIFDKILIDEAAKQGVDVRFGHGVTAFDNSGDMARLSVATDTGENYELTAKFVLDASGYGRVLPRLLDLESPSELPPRQAHFTHIDDNITSPKFDRNKILINTHPEHRDVWIWLIPFGDNRCSIGVVGTPDKLVGESEAVLKKFVYECPMLAEILDKAVWENDFPFRSIQGYSANVKTLYGKHFALLGNAAEFLDPVFSSGVTIALHSAKLAADLLAKQLKGEAVDWQTEFADQLMIGVNAFRTYVNGWYDFRFQNAIYAPNRSPEISRMISSILAGYAWDTNNPFVEKSEQRLSTLAALVGDLKVE

SEQ ID NO: 84000 - protein, 513 aa, unidentified; identical to SEQ ID NO: 83642
  source 1..513: note = Xanthomonadales bacterium
  REGION 1..513: note = tr|A0A1M3QKJ4|A0A1M3QKJ4_9GAMM Tryptophan halogenase; OS = Xanthomonadales bacterium 66-474 OX=1895868; GN = BGP23_10105 PE=4 SV=1

SEQ ID NO: 84001 - protein, 538 aa, Burkholderia sp.
  REGION 1..538: note = tr|A0A0D0HG01|A0A0D0HG01_9BURK PrnA protein; OS = Burkholderia sp. MSHR3999 OX=1542965 GN=prnA PE=4 SV=1
MSNPIKNIVIVGGGTAGWMAASYLVRALQQQTNITLIESAAIPRIGVGEATIPSLQKVFFDFLGIPEREWMPQVNGAFKAAIKFVNWRKSPERSRDDHFYHLFGSVPNCDGVPLTHYWLRKRELGFQQPMEYACYPQPGALDGKLAPCLSDGTRQMSHAWHFDAHLVADFLKRWAIERGVKQVVDEVVEVRLNDRGYISSLSTKEGRTLEADLFIDCSGMRGLLINQALKEPFIDMSDYLLCDSAVASAVPNADARVGIEPYTSAIAMNSGWTWKIPMLGRFGSGYVFSSKFTSRDQATADFLDLWGLPDNQPLNQIKFRVGRNARAWVNNCVAIGLSSCFLEPLESTGIYFIYAALYQLVKHFPDTSFDPRLTNAFNAEIVHMFDDCRDFVQAHYFASSRDDTPFWLANRHDLRLSDAIKEKVERYKAGLPLTTTSFDDATYYETFDYEFKNFWLNGNYYCIFAGLGLLPDRSLPLLRHRPESIDKAEAMFARIRREAERLRTSLPTNYDYLRSLREGAAGLSRSQPGPTLAAPEIL

SEQ ID NO: 84002 - protein, 416 aa, unidentified
  source 1..416: note = Hyella patelloides
  REGION 1..416: note = tr|A0A563W4Z9|A0A563W4Z9_9CYAN Tryptophan halogenase; OS = Hyella patelloides LEGE 07179 OX=945734 GN=H1P_90018; PE = 4 SV=1
MKIAVIGGGTAGCMIAAHISKYFPEFELYHIYSSTIPSIGVGEGSFPLFREWIHKITGLSFAALQERCKVTRKFGIQFENWGVKHQQFMHNFYPQNVEHAYHISAIEVVKLLQEHISATYLDKKISSIESDGVEIELKFEDNSQLAVDFAFDARGFPKSFESNDYENIPLIPTNAALVRRGPAVISLSATRSIARPHGWIFVIPLTTHTSYGYIYNSSVNSIAEIETDLNKFLQDEKVETSGNAKRLNFPNFTCKTFFDGSLFKVGNAASFIEPLEATSLALVLLEMVLASDFVLKGLYAAKNKREKFDELTIKAINDFLYEKVWETSLFISWHYAEGSRFKTDFWDFAKSNFDREIKNLEKRGLTDDFQKHLQAGSKLDSWQYLGINDTDCERPLFGFFKSLSFHEMGQGIGYYS

SEQ ID NO: 84003 - protein, 523 aa, Colwellia sp.
  REGION 1..523: note = tr|A0A1Y5CU29|A0A1Y5CU29_9GAMM Tryptophan halogenase; OS = Colwellia sp. 39_35_sub15_T18 OX=1856279 GN=A9Q74_17705; PE = 4 SV=1
MAVDNNHILIIGGGTAGWLSAAILAKSLNSNNIDGVKVTLVESPTIPILGVGEGTWPNLRATLHKIGISETDFIRECDATFKQGAEFINWSKIPEPEQSHSYYHPLSTVSHSSYDFNLAPYWLQQDKKTRLPYDRAVASQARICDEGLAPKQIVMAEYSAAQEYAYHLNANKLAEFLKCHCIEKLGVKFISANVTNIALDSDDFITHVDTDHASEKQIAADFFVDCSGAKGLIIKDVYHTAWHDISDVIFNDTALAVQVPYSNKDQKINTHTLATAQEAGWIWDIGLQNRRGVGHVFSSKYISDQKAEQQLIDYLGDDYTEDLTIRKIKLNHGYHEKFWHKNSVAIGMSAGFVEPLEASAIFLFDAAANMLAAQFPRDKAQMKYAEDKFNQQLTMRMQRTVEFIKLHYCISERRDSQYWIDNCDPISIPDNLKQRLAFWQGQVPTKYDFENAWEPFNLDSYLYVLYGMGFETNVANVAAKYTERVKAEHLFNNIDKASLLLIDKLPKQRELIEKVIKYGFTQV

SEQ ID NO: 84004 - protein, 514 aa, unidentified
  source 1..514: note = Amycolatopsis antarctica
  REGION 1..514: note = tr|A0A263D2P8|A0A263D2P8_9PSEU Tryptophan halogenase; OS = Amycolatopsis antarctica OX=1854586 GN=CFN78_17295 PE=4; SV = 1
MVRERHNSSGGAVNSGQEYDVIVVGGGPAGSTVSTLVRKRGHRVLLLEKESFPRYQIGESLLPATVHGIAHLLGVHEELRDAGFTVKHGGTFKWGANPEPWTFDFAVSRRMAGPTSFAYQVERMKFDHILLENARKHGVEVSEQCTVTDVLKSADRAEGVRYTDAEGAVHEARARYVVDASGNSSRIYAAADSRREYSTFFRNLALFGYFEGGKRLSAPSSGNILSVAFDNGWFWYIPLTPEITSVGAVVNQESASLVQGDPAKAMRGFVQSCPLIADMLAEATPVTEGPYGQFRVRKDWSYCNTRFFAPGMVLVGDAACFVDPVFSSGVHLATYSGLLAARSINACLEAGDEGAGEGIGEQAAFEEFEQRYRREYGLFYEFLVGFYEMHESEDSYFWRARKLSDSAGSDIEAFVELVGGVSSGEFDGGGTATERIAAGTRDMTRMVAGAEEHADGAVIGAAAGKLLEQGTALQARALVGSQAGEGRSITPGGLSASADGLSWVRDDGAGVDAR

SEQ ID NO: 84005 - protein, 511 aa, Pelomonas sp.
  REGION 1..511: note = tr|A0A0Q7SNE3|A0A0Q7SNE3_9BURK Tryptophan halogenase; OS = Pelomonas sp. Root1444 OX=1736464 GN=ASD35_18520 PE=4; SV = 1
MQHTNAPLRTGPVRRVVIAGGGTAGWMVAALLSKVLGKGLAIRLVESDEIGTVGVGEATIPTLLTYHQLLGINEQEFMAATQATFKLGIQFENWRNVGEDYVHSFGLTGKDHWTAGFQHFWLAARQRGEQRVPHGDYGDYCLELRAGLENRFAHLPRNGLNYAFHLDASRYAVFLRGISQGHGVQRIEGKIAQVLQHDDGDIRALRLADGSEVEGDFFIDCTGFRSLLLGQTLGVGFEDWSHWLPCDSAVAVQTASVGEAVPYTRSIAHPFGWQWRIPLQHRVGNGLVFASRYLGDDEARAMLLQKIEGEALMQPRVLKFTPGQRDVTWKRNVVAIGLASGFLEPLESTSIHLIQRGITRLMQCFPAGGIHQTDIDEYNRQVRDEIEHIRDFIILHYKVTNRRDAPLWQHCAAMDVPQSLAHRIQMFSDTARVFKAPHELFGENSWIQVMLGQGLTPGAHHPTADLMGDDELGHFLGEIRKQVARQLVQLPRHEDYVRSYAAPVQPQAATA

SEQ ID NO: 84006 - protein, 511 aa, Alteromonas stellipolaris
  REGION 1..511: note = tr|A0A0S1YP84|A0A0S1YP84_9ALTE Tryptophan halogenase; OS = Alteromonas stellipolaris LMG 21856 OX=1160720; GN = AOR13_3252 PE=4 SV=1
MAQSSQHSSKQRIVIVGGGTAGWLSAAIIAAKHNSGPSECGLDITLIESSDIPTVGVGEGTWPTMRNTLKDIGLSEKEVFRRCSAAFKQGGKFVNWVKPQGDAYYHPFTVPLGYGRVEMAPYLDDIANFANATNFQQHVCEQNMAPRTLSEAEYSSAQSNYAYHLDAGAFADLLKEFCKDKLGVSHKVATVDSVKKAHGSDNIESIQLNDGSQYHADLFVDCSGFRSLLLGESLKEPLVSTNDVLFNNSAIALHVPYDGDYEIKPYTQATAQEAGWIWDIGLSSRRGVGHVFSTDFTSDDQAESILRNYVGDTDAKLKARVIRFESGYRKQIWKGNCVGVGLSAGFVEPLEATALMLIEISARYIAEQMPLPQAAMPIVSQRFNKQMQYRWQRIIDFLKLHYIFNQRSEPYWVANRDPSSIPESLKEDLEIWKYRGPQIADFSAAIELFPAASYQYVLYGMGFSPDFSLQSHFYRDQALADKVMSQNKLITQQKLSSLPNHRDYISQWLEG

SEQ ID NO: 84007 - protein, 490 aa, Pelomonas sp.
  REGION 1..490: note = tr|A0A0Q7S9I5|A0A0Q7S9I5_9BURK Uncharacterized protein OS=Pelomonas sp. Root1444 OX=1736464; GN = ASD35_10790 PE=4 SV=1
MTQKFDRIVVVGGGSAGWMTAMALVTGLKGRVNVEVVESEEIGIVGVGEATFPSIRHYNQLVGIDETEFLRATNGTYKLGIRFCDWLEVGRDYFHTFGHFGNLFGSQTLWAQYRRMRLAEPLGLQCVPTVMAMQGRFALPSEQDQFKYAYHFDAVRYAAFLRQLAMQRGARHTQGRIVDVVRRADGGVAAVQLDDGRRVEGDIFVDCSGFRSLLLGGALQEPFVDFSHWLPVDGAWACPTERVGEELAPYTQATALEGGWAWRIPLQNRTGHGHVFASRFIDPERAREQLLARLDGKPVAEPRLLRFTTGHRQRFWVNNVIAIGLSSGFLEPLESTSIYLIQDGISRLMTMLTAGRPLDENDRALFNDGSVRRFARIRDFIILHYCLTRRRDSELWRHVATMELPETLAFRMELWRRYGVLHEYDEEGFDATSWLAIHAGMEHWPERDDPVFAEIPPERALQALQGRRNAIAASVARMPLHHQMLGQVLR

SEQ ID NO: 84008 - protein, 501 aa, Asticcacaulis sp.
  REGION 1..501: note = tr|V4PIA9|V4PIA9_9CAUL Uncharacterized protein; OS = Asticcacaulis sp. AC466 OX=1282362 GN=AEAC466_05135; PE = 4 SV=1
MSESDKTSRRVIIVGGGTAGWMAAACLSKVFGPQNLTVTLVESAEIGTVGVGEATIPMINMFNMILGIDEIDLVKETEATFKLGIEFVDWAQLGQRYFHPFGNYGVNMEGINFFHYWLRLAKHEGAREYGQFNLETLAASQGRCGATADDTPQLKLNKAYHFDARLYALFLRKYSEARGVHRIEGKVCQVELDSEYGHVRHLVLEDNCVITGDLFIDCSGFSGLLIGKALGVPYVDWSHWLPCNRAVAVACEAVEPPVPYTRSTAREAGWQWRIPLQHRTGNGYVFCDAFLQEDRAAEHLLSHLDGAPIAEPRLLKFTTGHRSRMWEKNVVSLGLASGFLEPLESTSIYLVQSALARLMALFPAGDVNPNIRAKFNDDMNSEYERIRDFLIAHYKLTKRDDSPFWNQCRTMDVPDSLTARLDAFEKEGILLEYPFDLFKETSWFAVLVGQGLFPKSYHPLADALPRDAFLRRMTQVRSMVLKRLPTLPPHAQYIAQIKGTQ

SEQ ID NO: 84009 - protein, 461 aa, unidentified
  source 1..461: note = Gammaproteobacteria bacterium
  REGION 1..461: note = tr|A0A2N1Y4U7|A0A2N1Y4U7_9GAMM Tryptophan halogenase; OS = Gammaproteobacteria bacterium HGW-Gammaproteobacteria-2; OX = 2013798 GN=CVV12_04515 PE=4 SV=1
MEQADRAIRRIVIVGGGTAGWMTAASLANTLGTSCRIELIESEAIGIVGVGEATIPPIKLFNRALGIDENTFIKATQGTFKLGIEFVNWTRLGQRYFHPFGQFGAEFDAVPLYQYWLRERARGDDTPLQDYAMAWVAARNNKFAPPLADRQRIQSTYDYAYHFDAGLLIEGDLFIDCSGFRGLLIEDALHTGYENWQHWLPCDRAVAVGSTHGNGALTPYTRSTAQQAGWQWRIPLQHRMGNGHVYCSQFSSDDEATAVLLANLEGEPLGTPRPLRFTTGRRKAFWNRNCIAIGLSAGFMEPLESTSIHLIQSAITRLLALFPDRYCEPLLAQEYNRITGQEYERVRDFLILHYKAIARDDAPLWRYTAAMDIPDTLHYKIDQFRSSGRIVAEPLELFQNPNWLAVLIGQEVWPQHYSALVDLRSSVDAAGKLASLRRISEEASAALPDHAQYIARHCRAG

SEQ ID NO: 84010 - protein, 505 aa, Pelomonas sp.
  REGION 1..505: note = tr|A0A0Q7S0D2|A0A0Q7S0D2_9BURK Tryptophan halogenase; OS = Pelomonas sp. Root1444 OX=1736464 GN=ASD35_06865 PE=4; SV = 1
MRSRSLRRVVIVGGGSAGWITAAPLARMLCGPDGPDHCEVVLVESEEIGTVGVGEATLPTIRFYNQLLGIDETDFVRATQASFKLGIEFCDWGRIGHRFFHGFGGFGPPIHNRPLWSYWLRLRERDPGIESYEDWSTATVMARALRFTPPQPGEPSPANAFDYAYHFDAALYGRYLRDYAVRHGAQRVVGTIVGVKTSEQNGFVEALHLSDGRRVEGDLFIDCSGFRALLIGGAMKSPYEDWSHWLPCDRALAVPCERTDPMTPYTTSTARSAGWQWRIPLQHRTGNGLVYCSSHLSDGEAAQTLLANLDGKPLDDPRPQRFTAGRRKRAWTKNVVAIGLSAGFLEPLESTSIQFIMDSVGRLTALLPDRDFAPSLAEEFNRQMAYRYESVRDFIVLHYKLGERRDSEFWRYCADMSIPDVLAHQLELFRETGRVAIIDPEGFAEPSWASLMLGLGLTPRRRDPYVDLVDLDSVKRHLATVRSAIRRTTQAMPLHAEVLSRIAGG

SEQ ID NO: 84011 - protein, 97 aa, Pseudomonas sp.
  REGION 1..97: note = tr|A0A2N8FLR1|A0A2N8FLR1_9PSED Tryptophan halogenase (Fragment) OS=Pseudomonas sp. FW305-130 OX=2070644; GN = C1X73_34285 PE=4 SV=1
LRAYLGPRGRDLAARKLAIRAGHRETFWKNNCVAIGLAAGFLEPLEASAIVLIELSAKLVAEQMPVCREVMDILAARFNATTLYRWGRIIDFLKLHY

SEQ ID NO: 84012 - protein, 510 aa, Glaciecola pallidula
  REGION 1..510: note = tr|K6ZH11|K6ZH11_9ALTE Tryptophan halogenase; OS = Glaciecola pallidula DSM 14239 = ACAM 615 OX=1121922; GN = GPAL_1330 PE=4 SV=1
MKKLLILGGGTAGWMAANMMNHYLGRNKEDIANSKAWEITVVESPQIGIIGVGEGSTPQLKKFFDLLDITESQWMPACSATFKNGISFIDWSEHTQTNRYFHPFPSPFDRQTAAAFLYHCQMRSRGMDVPVNPDDFFLSAHLAKFKLSPKPLPGKPQVPLNYAYHFDSAKLGAFLCQHAVSNGVRHISSTMESVLQHPDSGIQAIQLASGEQLNADLFIDATGFNSLLLQGVLQEPFETFASNLFNNSAVAIPSNRQDIIAAETKATALSAGWAWQIPLTNRTGNGYVYSDQYLSPEQAEKELRDHIGADMSKDSGAEQKPAKHLKMKVGQVQRHWHKNVVAVGLSQGFIEPLEATALHLVQETVLKLASSLLDPMYTSEPDRIKLAFNESIRKRFNGVRDYIVCHYKMNTRTGSQYWIDNRENNNISTQLADVIDTWRAKKDIASVLEKHTMTQYYPVISWYCLLAGYGSFASASSANKLPSSNMRQLTQYLMRSTTHFASHNASLGLI

SEQ ID NO: 84013 - protein, 499 aa, Alteromonas sp.
  REGION 1..499: note = tr|A0A1J0RW88|A0A1J0RW88_9ALTE Tryptophan halogenase; OS = Alteromonas sp. Mex14 OX=1917157 GN=BM527_15160 PE=4; SV = 1
MNSNPSQSIQKIVIVGGGSAGWMTAASLSNVLKGKCVITLIESDEIGIVGVGEATIPPIRVFNQTLGISEAEFLQRTNGTFKLGIEFVNWGSNGSRYFHPFGTYGRQFDTVSMHHYWLSAHQQGQAKPLDDYAMAWHLARNGKFIHPSGDPKNVLSTFEYAYHFDAGLYVKFLRDYAEQRGVKRIEGKVSHVSKNKDTGFVSSVSLESGQVIDGEFFIDCSGFRGLLIEQALHTGYETWSEWLPCDRAWAVPTAGSADPMPYTRSTAHTAGWQWRIPLQNRVGNGHVFSSAFISEEDARQQLLDNLDSDMLAEPRLIKFVTGRRKRFWNKNVVAIGLASGFIEPLESTSIHLIQAGIAKLLALFPDKSFNQRSIDEYNRIAIAEVERIRDFIILHYKLMERRDTEMWRYCADMDVPDELADKIAHFREFGRITKGEIDLFGNTSWLAVHIGQGNIPQRTDPLVYYSDADYAGWLKKLNQVMTQYAQQAPSHMAYINKIK

SEQ ID NO: 84014 - protein, 521 aa, Xanthomonas arboricola
  REGION 1..521: note = tr|A0A2S6ZWN2|A0A2S6ZWN2_9XANT Tryptophan halogenase; OS = Xanthomonas arboricola pv. arracaciae OX=487851; GN = XaraCFBP7407_07125 PE=4 SV=1
MTDTAPSDPQQRPVRRVVIAGGGTAGWMAAAALSKVLGRHLKIVLVESDEIGTVGVGEATIPSLVTFHRLLEIDEAGFMAATQATIKLGIGFEHWRDVDRHYIHSFGHTGTDHWSAGFQHFWLKGRQRGLARDFGDYCLELRAAQEGRFAHLPNGGMNYAYHLDAGLYARFLRRFSEGFGVQRIEGRIGNVETHAHSGYLTALTLEDGTRVEGDLFLDCTGFAGLLIGKTLGVGTDDWSQWLFADSALAVQTESVGAPVAYTRSRADQAGWMWRIPLQHRVGNGIVYSSRYMDQDSAAQVLQRNLSGRALTQPRALRFTPNQRHRVWEKNCVALGLASGFLEPLESTNIHLIQRGIIRLMQTFPQVINDVDIAEYNRQAVAEITHIRDFVILHYHATDRRDTPFWRDCAAMDIPDTLRHRVELFRQSGRVFHQANELFAENSWVQVMLGQGITPKQHHPVADLMGDAELRHFLETIRTRVDAALARLPAHADFLRRYCPAPPLPEPATRLPADAALATGAR

SEQ ID NO: 84015 - protein, 496 aa, Alteromonas sp.
  REGION 1..496: note = tr|A0A1J0RYQ9|A0A1J0RYQ9_9ALTE Tryptophan halogenase; OS = Alteromonas sp. Mex14 OX=1917157 GN=BM527_09300 PE=4; SV = 1
MYDKAVKKVVVVGGGTAGWISAAVIKRLIGTDLTVTLVESEDIGTVGVGEATIPPIITLNNVLGIDEKEFLRETNATMKLAIKFENWRVKGEDYFHTFGAPGKSYAFCHFHHYFKRAQKLGLTDSIWEYDLNYLACKAGKFAHIKSPDPIIEMPYAYHFDASLYARFLRKKCEAMGVTRKEGIIHDVKQDSESGFITGVTLKDGEHIEGDLFIDCSGFKGLLTQQTLNTGYEDWSHWLPCDRAVAMPSERLEKTLPYTRSISHSAGWQWRIPLQHRNGNGLVYSSNYYTDEQALDILSNNLDTKPLADPNFIRFKTGRRRKQWNKNVIAVGLSSGFLEPLESTSIHLIQSAVVRLIHLFPHEGFKQRQIDEYNKQSKTEYEQIRDFIILHYHVNERTDSHFWKDLRKMDVPDSLTHKIELFRESGNLFREQNDLFLESSWLQVLMGQGIAQGDYHPLANALSEQKLQELMQNIKRIKNEPIGKIATHDDFLKQFCG

SEQ ID NO: 84016 - protein, 506 aa, Pseudoxanthomonas indica
  REGION 1..506: note = tr|A0A1T5K9E0|A0A1T5K9E0_9GAMM Tryptophan halogenase; OS = Pseudoxanthomonas indica OX=428993 GN=SAMN06296058_1483; PE = 4 SV=1
MEQGRVRKVVIAGGGTAGWLAGAALAHQFRDLLDITLLESEQIGTVGVGESTVPPIRNFHRFLQIDEQEFLRAVAGTFKLSISFENWRRHGDRYIHPFGITGQSTLVCAFHHFWLDSLRRGMSSDLGDYCLETLASREDRFDLPQQPQVNYSYHLDAGLYARFLRQRAESHGLKRVEGKIREVRQHPDSGFVQALVLEDDQVIEGDLFIDCTGFRGLLIEQTLKTGYEDWHQWLPADRAVAVQTEPVGPPVPYTRAIAHQAGWRWHIPLQHRVGCGLVYASKHMSDDEATAKLLHDVGAPPIRDPWRVPFRSGRRLKAWNKNVVSLGLASGFIEPLESTSLHLSMTAIVRLIEAFPNEGMPSALIEQFNETSRKEMEHVRDFIILHYHANQRDEPMWQACREMELPDSLSIRLRAWRERAHAWQGANELFRVDSWTHVMWGQGLMPEQAHPLARALPDAELQRFLTGVREPLQRAVAKMPSQQDFITRYCAAPAAVWGSRPRTVSA

SEQ ID NO: 84017 - protein, 518 aa, Massilia flava
  REGION 1..518: note = tr|A0A562PS76|A0A562PS76_9BURK Tryptophan halogenase; OS = Massilia flava OX=871742 GN=IP92_02353 PE=4 SV=1
MAPIRNILIVGGGTAGWLAACFLAKMLGAKADGAVQITLVESPEIGIIGVGEGTFPSIRGTLSLIGIDEARFIRECNATFKQGVRFNHWVRPAGAPGPDHYFHPFSQPSQRPGGPELLPYWLMGAAGNVPFAAAATLQKHVADMSHGPKRVTDGDFLGPLNYAYHFDAGRFAALLCTHAQTLGVRRVEATVEDVTLDGEGAIDSVVTREAGVLRGDLYIDCTGFRARLIGEALGSPFRNISDTLFVDRALAMQVPYERPDAPIPSYTISTAHEAGWTWDIGLHERRGIGYVYSSRHTSDERADEVLRGYIGKASEGRTPRLLKLNVGYRETQWVKNCVAIGLSSGFLEPLESSGIGLIEAATYLVGFLFPHDGNLAPVAKTFNAQMKARYERIVDFIKLHYCLTQRRDNAFWIENADPATIPESLRDQLAMWRARPPHRLDFVTDLEMYPPSSWQYVLYGMEFATTLHANRAALPELDAAKREFQTIAQLCHHAVKDLPPHRALVDHYLRRGEGLRRA

SEQ ID NO: 84018 - protein, 509 aa, Stenotrophomonas sp.
  REGION 1..509: note = tr|A0A2N1GII8|A0A2N1GII8_9GAMM Tryptophan halogenase; OS = Stenotrophomonas sp. Betaine-02u-21 OX=2058301; GN = CXF96_09175 PE=4 SV=1
MNAVDTTQGRIRKVVIAGGGTAGWLAGCALAHQFRDQLDIVLVESEQIGTVGVGESTVPPIRMFHRFLQIDEQEFLRAVAGTFKLSISFENWRRPGDRFIHPFGTIGQGTWATPFHHFWLESLRRGMPSDLGEFCLESAASLEDRFSLQTQPQASYAYHFDASLYARFLRGKAEANGLRRVEGKIREVRQHAHDGAVASLVLEDGQVIEGDLFIDCTGFRGLLTEQTLHTGYEDWHEWLPSDRAVAVQTESVNPPVPYTRAIAHEAGWRWHIALQHRVGCGLVFSSRHMSDDEAQAKLLRDIEGRPLRDPWLVPFRSGRRLKAWNKNVVALGLASGFIEPLESTSIHLTISAVVRLIQLFPLEGISPSLMALYNDVSRQEMEHVRDFIILHYHANQRDEPMWKACREMALPESLQVRLRAWRERAHAWQDPGELFRVDSWTSVLTGQGIQPGPPHPLSRAISDADLRTLLDRIRRPVQQEVAKMPSQAAFIERYCNASAQAWQRGMAVT

SEQ ID NO: 84019 - protein, 505 aa, Xanthomonas arboricola
  REGION 1..505: note = tr|A0A2S7A217|A0A2S7A217_9XANT Tryptophan halogenase; OS = Xanthomonas arboricola pv. arracaciae OX=487851; GN = XaraCFBP7407_01390 PE=4 SV=1
MSQAPIRKIVIAGGGTAGWIAACALSHQFRELLEITLVESEQIGTVGVGESTVPPIRSFHRFLQIDEQEFLRAVAGTFKLSISFEHWRRQGERYIHPFGITGQSTLVCAFHHLWLESQRRGMPGSFGDYCLETVASRVDRFALLREPAVNYAYHLDAALYARFLRTRSEACGVRRIEGRIQQVTLQPDSGDVASLLLEDGQVLEGDLFIDCSGFRGLLIEQALHTGYEDWSHWLPCDRAVAVQTEALGPPVPYTRAIAHEAGWRWHIPLQHRVGNGLVFSSKHLSDDEAHAKLLRDVAAPALKDPWLVPFRTGRRLKAWNKNVVSLGLASGFIEPLESTSIHLTIAAVVRLISLFPGEGIAPSQVQLFNDISRAEMEHVRDFIILHYHATQREEPLWRQCRAMELPESLALRLRAWRERAHAWQAADELFRVDSWTHVLMGQGIVPEQHHPLARALSDRDLRRLLDGIAQPIRHVVEQMPSQQAFIDAYCKAGASVWGLRSQVVT

SEQ ID NO: 84020 - protein, 517 aa, Glaciecola pallidula
  REGION 1..517: note = tr|K7A056|K7A056_9ALTE Tryptophan halogenase; OS = Glaciecola pallidula DSM 14239 = ACAM 615 OX=1121922; GN = GPAL_2039 PE=4 SV=1
MHKPLRKIVIVGGGSAGWLTAGVIAAEHSTDPNVGIEVTLIESADVAPIGVGEGTWPTMRSTLKKMGISETDFLLECDASFKQGSKFSNWRSNTNEHYYHPFTLPHGFNDTNLASFWQPYRHKVSFADAVGVQSHLGEHGLAPKQISTAEYDFYANYGYHLDAGKFAALLQKHCTTKLAVKHIIDHVTQVNSSSNGDIATITTKNNGDITGDLFIDCTGTASLLLAKHYAVPFVSTKHILFNDSALAVHVPHQDSNSPIASFTCSTAQSAGWIWDIGLPSRRGVGYTYSSRHITDVEAEKALRDYITPIMGESAAQSTKIRKIDFSPGHREKFWHKNCVAVGLSAGFIEPLEATALALIELSAKMISEQLPADREAMDLVAKRFNAKFLHRWLNIVDFLKLHYVLSKRTDSAYWREISDAEQLPDTLKEQLLLWKTRAPYHYDATHTEEMFPPASYQYILYGMDFITQPVNTKRVDESKKAQVLFAENVKQTKQLLSSLPSNRELINKIKLYGLPKI

SEQ ID NO: 84021 - protein, 502 aa, Sphingomonas sp.
  REGION 1..502: note = tr|A0A0Q4EX10|A0A0Q4EX10_9SPHN Tryptophan halogenase; OS = Sphingomonas sp. Leaf208 OX=1735679 GN=ASE69_18775 PE=4; SV = 1
MKRVQRLVILGGGTAGWMTAAALSATFGDLVKISILESDAIGTVGVGEATIPTIHWFNQLVGLDEEAFVAATKASFKLGIEFVDWARPGTRYFHPFGRYGVDLGPVPFHQHWLRAKGDGLDRPLSTYSLVAQLAAAGRFAKPVDDPRSILSTLGYAYHFDAGLYARHLRQLAEKRGVVRHEGMLRDIERDPETGFVTALTSDRGERLEGDLFIDCSGFRALLIDETMGAQFEDWSHWLPCDRAVAVPCARIAATTPFTRSTLRPAGWQWRIPLQHSTGNGYVYASSFVSDDEAVATLLSNLDGEALADPRMLRFTAGFRREAWRGNVVAIGLSSGFLEPLESTSIHLIQSGIAKLITLFPDADCDPALARQFNTLFARDMDGIRDFLILHYHATQGHDAPLWQHTRHMTPPPTLVDKMAQYTRAGRLMLSADELFREASWLAVLEGQGVGALGHAPLADTLDAATNRRQLNQIETVIARATPTLPLHDAAIAALVAPQVAAR

SEQ ID NO: 84022 - protein, 521 aa, Xanthomonas arboricola
  REGION 1..521: note = tr|A0A2N9DE41|A0A2N9DE41_9XANT Tryptophan halogenase; OS = Xanthomonas arboricola pv. fragariae OX=487822; GN = prnA_2 PE=4 SV=1
MTDTAPSDPQQRPVRRVVIAGGGTAGWMAAAALSKVLGRHLQITLVESDEIGTVGVGEATIPSLVTFHRLLEIDEAAFMAATQATIKLGIGFEHWRDVDRHYIHSFGHTGTDHWSAGFQHFWLKGRQRGVARDFGDYCLELRAAQEGRFAHLPNGGMNYAYHLDAGLYARFLRRFSEGFGVQRIEGRIGNVETDAHSGYLTALTLDNGTRVESDLFLDCTGFAGLLIGKTLGVGTDDWSQWLFADSALAVQTESVGAPVPYTRSRADQAGWMWRIPLQHRVGNGIVYSSRYMHQDSAAQVLQRNLSGRALTQPRALRFTPNQRHRVWEKNCVALGLASGFLEPLESTNIHLIQRGIIRLMQTFPQVINDVDIAEYNRQAAAEITHIRDFVILHYHATDRRDTPFWRDCAAMDIPDTLRHRVELFRQSGRVFHQANELFAENSWVQVMLGQGITPKQHHPVADLMGDAELRHFLETIRTRVDAALARLPAHADFLHRYCPAPPLPEPATRLPADAALATGAR

SEQ ID NO: 84023 - protein, 505 aa, Sphingomonas sp.
  REGION 1..505: note = tr|A0A0Q4EQ52|A0A0Q4EQ52_9SPHN Tryptophan halogenase; OS = Sphingomonas sp. Leaf208 OX=1735679 GN=ASE69_08000 PE=4; SV = 1
MTLDSPIRRIVIVGGGTAGWMAAAALARLIPTGASVTLIESDTIGTVGVGEATIPPIRAFNAMLGIDEAAFLAATAGSFKLGIEFVDWGAIGERYLHPFGGFGFDIEGVRFHQHWRRRRAAGVVEDIDAYSLCAVAARAGRFAPPSPDPASILSQMAHAYHFDAGLYARFLRGRAERDGVTRIEGEIGDVALDGDTGHVRHVTLAGDRRIEGDLFLDCSGFRGLLIEQALGAGYEDWTRWLPCDRAVAMPTANIGTAITPYTRSTAREAGWQWRIPLQHRTGNGYVYSSAHCSDDEAAATLLDGVDGPPLADPRVLRFTAGRRRKQWIGNVVALGLASGFTEPLESTSIHMVQTGISKLLALFPDQGFSPVEIDTYNRLAETQFDQVRDFLVLHYHATRRTDSPFWREAGARAIPDSLAEKIALWRRRGRLFRWEDDLFAEASWVAVLLGQGIVPEGWDRLADTVDARDVDARFDRLRVMFADAAARMPHHEDYLARTSPARVRA

SEQ ID NO: 84024 - protein, 521 aa, Glaciecola nitratireducens
  REGION 1..521: note = tr|G4QE46|G4QE46_GLANF Tryptophan halogenase, putative OS=Glaciecola nitratireducens (strain JCM 12485 / KCTC 12276 / FR1064) OX=1085623 GN=GNIT_3226 PE=4 SV=1
MKSDINNIVIVGGGTAGWLTAAVLAAHFDTKTKFNITLIESPNIKTIGVGEGTWPTMAATLRRIGISEAQFISECDASFKQGSRFIDWNEGESYYHPFSLPIGYKDINIVDHWLESPSDLSFDEFATNQAGVCQHNLAPKQATTPEYANVLNYGYHLNAGKFATLLKNHSINNLGVKHISADVSSVNAHNATFIESVVLADGTQIEGDLFIDCTGFKRLLIGKSLKVPFKSVKDVLFNDRAMAFQVPYSHENAAINSATHATAHKNGWIWDISLPTRKGIGVVYSSKYGTEQQAFDTAEQYMQKHMPHINIAGLSPNKINIEPGHLETYWKGNCLAIGLSAGFIDPLEATAMILVEFSAKFLREHLPASRNELGLLAKKFNKRMDLHWNNIIDFIKLHYILSNRTDSQYWINHREQNTIPISLQRSLMMWKNRAPWHADVEVAESMFPPASYQFILYGMGFQSKSTLADRRLASEERLHLKKLLSNKHAELQKLCQHLPTNRKLLLDIKQSWMNRVPNVEI

SEQ ID NO: 84025 - protein, 530 aa, Cellvibrio japonicus
  REGION 1..530: note = tr|B3PI15|B3PI15_CELJU Tryptophan halogenase; OS = Cellvibrio japonicus (strain Ueda107) OX=498211; GN = CJA_0354 PE=4 SV=1
MNKKRAALLLRAFFMVDKYLTRQIATMQKNTLNSICIVGGGTAGWMAASLLSSALQGSHIKITLIESPDIATIGVGESTVPSMMEFLRVCRINLKEFVEATSATFKLGIRFDDWLKPGEQYFHPFGRVGQDINGFAFYQAWLKNSVDGYGTRWVDHSPSAIMAEHQRFMLRPSQQQNWVLRSYGYALHLDAILVARYLRDFSQGCGVERIEATVDKVVIDERQFIHTLALNNGITITSDFFIDCTGFKGLLIEEALKVGYEDWTHYLPCNRAVAVQTTNAGTLPPFTIATAREAGWTWRIPLQHRTGNGYVYSSQYCSDDQAIHTLLTAVEGELLIEPRVIPFATGRRKKIWHNNCLALGLAAGFLEPLESTAIHLIYKTLVHFIRYFPDQDFEVYTEQAFNQKINIDYQEIRDFIILHYCTTGRDDTEFWRWCQGMPVPDSLQEKICLFRARGQIEHTPDQFFSQDSWCSILEGMKVRPKKYHPLMDAFDGQGLASTLQESAQSVYETVMQMPMHGDYIQQHCAAKKMM

SEQ ID NO: 84026 - protein, 505 aa, unidentified
  source 1..505: note = Rhizobium fredii
  REGION 1..505: note = tr|A0A2A6LNA1|A0A2A6LNA1_RHIFR Uncharacterized protein OS=Rhizobium fredii OX=380 GN=CO661_30850 PE=4 SV=1
MMLDLTNAKRIGIIGGGIVGWLAAIALRRVFDVDVDISVIEAPTVFPLGPGEGGSLNLIDTLCRNELDLDVFIGEAGATHKLGVLYENWRGGGTPDRYYRMFGGSGIPEIECRVGGFFPLLSARIAAGENLHTCIPGFELITKKASQVEIDELLATGESGLYPSFHFNHAGFERYLRRVGLARGITSRRAVVHGMRLDDRGHVSAFQLGGEELEVDFAVDASGFARLGLGTVLNTRWCSFADVLPTDRAIIFELEPRASSPVTRATAMKAGWMWEAPLNRSISAGYAFSSRYADAAMAIAEVENHCGFRVEAKHELSLDQGYFSTAWVNNFVALGTASGFVEPLEAALAAHTFEALRNLERILANGSGIVPARAIEGYNSANARCWTGVRDFLRLHYDSKRIDTPFWRDLAAAELPEGYANLRACFQKRTPRFIDIQPYVGSGWQSLFHEIDWISVAVPLGVVPQAAACAELRRLSTESRSEVQAYVDRLKGTIAKISSTRGCMH

SEQ ID NO: 84027 - protein, 504 aa, Cellvibrio japonicus
  REGION 1..504: note = tr|B3PC67|B3PC67_CELJU Tryptophan halogenase; OS = Cellvibrio japonicus (strain Ueda107) OX=498211; GN = CJA_2881 PE=4 SV=1
MSDSNNIQSIIILGGGTAGWMTAAALAKVITTRNCSITLIESEEIGTVGVGEATIPQISIFNSVLGIDENDFIKATQGTFKLGIEFVNWKSIGSAYIHPFSTYGTDLHNVQFYHYWQKAFKLGLSPDISDYSLNIQACYHNKFTRPMDVPNSPLAKIAYAYHFDAGLYARYLRRYAEALGVRRVEGKVTQVNKNHDNGFIKSLLLTDGSVHAADFFMDCSGFRGLLIEGALHTGYENWSHYLPADSAIAIPCRRVEPLIPYTRATAHTAGWQWRIPLQHRTGNGHVYSSQFIDDKSALDTLVNHLDGEPLAEPRQLRFVTGKRRKVWNKNCVALGLASGFLEPLESTSIHLVQSVISKFLGLFPRKDSFTAEQEKFNKYMDDEYLGIRDFIILHYKATQRDDSAFWNHCRTMEIPESLQRKLELYRSSSRLYRDNNELFDESSWLAVMHGQGIVAEGYNPIVDAMPVEELENRLRGIRQVISKCLDVIPTQDAYIDKYCRAGQL

SEQ ID NO: 84028 - protein, 503 aa, Cellvibrio japonicus
  REGION 1..503: note = tr|B3PDU7|B3PDU7_CELJU Tryptophan halogenase; OS = Cellvibrio japonicus (strain Ueda107) OX=498211; GN = CJA_3150 PE=4 SV=1
MNTSMKSIKDIVVLGGGTSGWIAAAMLAAHLKPTLCRVTVIESEELGPIGVGESTIPPILHLIHSLGIDEQDFMRETQACYKLGIKFIDWRESRHSYFHPYGSIGKRIENQDFYQCWLKASLAGEHYPLEDFSPCAVMAARERFFPPGQAQNTPIGGAHYAVHLDAKLVAAYLRRYAEARGVKSIQGKCVSSERDQRGFIQALQLQDGTRVDGDFFIDCSGFRALLIGEAMGVELEDWSHYLPCDRALVVKTDVAGSRMPYTTATARKAGWSWRIPLRNGTGHGYVYASRFCSDAEAKSTLLRHLDAARLNEPRLIHFTSGRRKVVWQGNCLALGLAAGFVEPLESTAIHLIVRGMDFFLRYFPDAECEPSLARAYNRRIAADYEEVRDFILLHYCTSRRNDSDFWRWCRQMPIPDSLQERIALFTAHGLVPEASDELFRSSNWQSVFEGMGIRPHKYCPRVDNLDYVQIRETLQLARTAIAKMVEGLPSHDEYLARQFPRGF

SEQ ID NO: 84029 - protein, 502 aa, Cellvibrio japonicus
  REGION 1..502: note = tr|B3PH35|B3PH35_CELJU Tryptophan halogenase; OS = Cellvibrio japonicus (strain Ueda107) OX=498211; GN = CJA_3630 PE=4 SV=1
MSPEPLSPRKLHIVIAGGGTAGWCAAAALSQQLMPLADITLVESDALGTIGVGEASIPPMKAFHRLAGVDEQAFMRATHATFKIGIQFEHWTRPGDSYIHSFGRLGKSAWMADFHHVWLHAKALGLDVKLDDYCLELKAALNGKFVLSDAMPLNYAYHLDATAYARFLRDLCAQRGVKRIEGLIEQVQQHADSGHITHLVLENGQAIAGDFFIDCTGFRALLIGNTLKVAYEDWSRWLPANRAVAIQSELNTPPMPYTRSIAREAGWQWHIPLQHRAGNGLVYCSDYLSDEAAQDRLLHHLPGKPTSALRKIPFQTGYRTEQWNKNCLSLGLSSGFLEPLESTSIYLMMIGITRFIKQFPFDGIAQATIDQFNTVSREEFEHIRDFIFLHYYLNERQDSPYWADYRRRPVPESLQHRMDLFRTTGLAFPPSGDLFTVDSWVQVTLGQHLWPTSYHPIGRMVSDEHLIQSLNNYKNTITRQVDEMPHHAEFIAHYCAADEQPM

SEQ ID NO: 84030 - protein, 530 aa, Pseudoxanthomonas suwonensis
  REGION 1..530: note = tr|A0A0E3Z297|A0A0E3Z297_9GAMM Tryptophan halogenase; OS = Pseudoxanthomonas suwonensis OX=314722 GN=WQ53_11385; PE = 4 SV=1
MENNRIRRVVIAGGGTAGWIAACALTHQFRDLLDITLVESEQIGTVGVGESTIPTIRTFHRLLQIDEREFLSSVAGSFKLSISFENWKRPGDHYFHPFGTTGMNTWSCDFHQFWLESLRRGMKSELGDYCLETVASRVQRFAIFDPAGASTQEWSMRWVQSPTSLERADVSYAYHFDAALYAAFLRRKCEGRGLTRVEGKIREVRQDPENGYIRALVMEDGQVVEGDLFIDCTGFRGLLIEQTLKTGYEDWNNWLPCNRAVAMQIESVEPPVPYTRAIAHEAGWRWHIALQHRVGCGWVFSSAHMSDDEAAAKLAAANNNAPVVREPWIVPFRTGRRLKVWNKNVVSLGLASSFIEPLESTSIHLTLSAVTRLVQMFPFAGIDDANVDRYNDVSRDELEHVRNFIILHYHLNQRDEPLWRECREMKLPDDLAQRIQLFRDTAYAWQGEDELFRLDSWTHVMLGQGVVPREHHPLTRGLGDTDMARLFEAVRQPINRMVAAMPSHEDFLKRYCPADPSVWNLRRAPAQTGA

SEQ ID NO: 84031 - protein, 494 aa, Microbulbifer agarilyticus
  REGION 1..494: note = tr|A0A1Q2M862|A0A1Q2M862_9GAMM Tryptophan halogenase; OS = Microbulbifer agarilyticus OX=260552 GN=Mag101_15470; PE = 4 SV=1
MAQAIKKVVVAGGGTAGWMAAAALSKLMGKQLDITLVESEQIGTIGVGEATIPTLVFFHRLLGIDEAEFLRETQGTYKLGIQFENWRDVGKDYLHAFGVTGRDCWACGFQHFWLRAKELGFAGDFGEYCLERRAAEENKFTHLPNNGLNYAFHIDASRYAAYLRKFSEGFGVKRVEGKIDHVQLHPENGYIRSLKLDSGQEVEGDFFIDCTGMRALLIERALHTGFESWSHWLPCDSAMAVQTEAVEAPIPYTRSIAHESGWQWRIPLQTRVGNGLVYASRYQSDESARTQLLENVQGKTLTEPLSIKFQTGRRRKQWHKNCLAVGLSSGFLEPLESTSIHLIQQNIVRFLRFFPQQEIHQREVDEFNRQSEFDMERIRDFIILHYKVTDRTDTEFWRHCRQLSVPDTLAAKIDMFRETGHVFREGGELFVDSWQQVMLGQGLMPERYHPLVDAMSEQELKGFIEQVKSSVDTNVEKLKDHNVYLREMLAKSAP

SEQ ID NO: 84032 - protein, 498 aa, Caulobacter vibrioides
  REGION 1..498: note = tr|R0CSL5|R0CSL5_CAUVI Uncharacterized protein; OS = Caulobacter vibrioides OR37 OX=1292034 GN=OR37_03974; PE = 4 SV=1
MNQPPVRKVVIAGGGTAGWMAAAALSRQLGPLLDITLVESEDIGTVGVGESTIPTARTFNALLGIDEAAFMRATQATFKLGILFENWGQVGDRYIHSFGQVGKSTWMGGFHHFWLEARAGGFGGDLGDYCLELRAAEQERFSAGDDPRLNYAYHLDAGLYGQFLRRMAEAAGARRVEGKIASVRQRGADGHVEALVMESGAVVEGDLFIDCTGFRGLLIEQTLKAGYEDWSHWLPTNSALAVQTRSIGPAVPYTRAIAHRAGWRWKIPLQHRVGNGLVYCSDHMSDDEAQAMLAAEIEGETLIPPRLIRYRTGKRRKTWDQNVVALGLASGFVEPLESTSIHMIMIGISRLMQLFPFDGISPAVVERYNRLADDELEKIRDFIILHYKLTERTDSPFWDRVREMEIPDSLAQRIALFRESGHLFQAPGELFQVDSWLQVMLGQRLEPRGHHGMGRLMPPAQLKQALDDLKANIARAVARLPPHQAFLDDYCAPLSKSA

SEQ ID NO: 84033 - protein, 447 aa, Streptomyces cellostaticus
  REGION 1..447: note = tr|A0A101N8B1|A0A101N8B1_9ACTN Tryptophan halogenase; OS = Streptomyces cellostaticus OX=67285 GN=AQI88_40245 PE=4; SV = 1
MAKETADVVVIGAGPAGAVSAFVLAKQGHSVVLLEKEPNPRFHIGESLLPYMMGLFERIGLREVVEAQGYVRKFGGEFIDPTEKKFFEGVFRADFTKQGAGRHDNAFQVERRRFDRMLAEQAEAAGAKVVFGANVNDLLMEGDRMVGVRYDLDGESHEVRSSYVIDASGRTGKIAHRFGLRKTLEKLRMVGVFRHYSGLDERHNLGVEGDIQVGAHDDGWVWAIPLSKDTISVGTVMPRDVLRASTPEKVFEEHVARIPRIVARLTGTQPSMDFKIETDYCYHADTVTGPGWLMVGDAGCFGDPMFSGGVLVASATAVRAAETLGQALADPSAEEALFDRYSNYFKTGYDTYIRLIHAYYDGELVAMAADAARSTDRDTLEKYLVRLIGGDFWSEHNSVAQEMRRRKEWDTFEPFQRVYGCPSYPHLDEIDRKERSESRVRRVTAGR

SEQ ID NO: 84034 - protein, 511 aa, unidentified
  source 1..511: note = Sphingopyxis fribergensis
  REGION 1..511: note = tr|A0A0A7PE34|A0A0A7PE34_9SPHN Tryptophan halogenase; OS = Sphingopyxis fribergensis OX=1515612 GN=SKP52_06765; PE = 4 SV=1
MNEAIERIVIVGGGTAGWLAASRLASSRRAKAGRLLVTLIEAPDIPTIGVGEGTWPTMRATLAAIGIGEAEFLVACDGSFKQGSRFDGWLTGEEDDRYLHPFTSPPSAPTAELLAAWQAGASELTFAAAMGAQAHICDLDLAPRQRAMPDYQGAANYAYHLDAGKFAALLASHAVQKLGVRHISDHVVAVARDAGGGIASVATRQNGDVAGDLFIDCSGHASLLIGNHLGVEWIDRSDTLFNDRALAAQVPVAPGSPVASQTVSTAHAAGWIWDIGLPGRRGIGCVYASRFMDDDAAEATLRAYIARALPDAPEVPVRRLSFPTGHRARFWEGNCIAIGLSAGFIEPLEASAIVMIELSLNALLDNFPASRAAMAIHAERFNELFRYRWDRIVEFLKLHYALSRREEPYWLAQRDPAHVPPRLATMLQLWRDQPPSAWDFPRVDEIFSAESHQYILYGMGYPVPADLPASERAAALLAENRQRARSLAAALPANRDYLDALRPDSNAAAAR

SEQ ID NO: 84035 - protein, 530 aa, Caulobacter vibrioides
  REGION 1..530: note = tr|R0CXJ9|R0CXJ9_CAUVI Uncharacterized protein; OS = Caulobacter vibrioides OR37 OX=1292034 GN=OR37_03052; PE = 4 SV=1
MNKPIDDILIVGGGTAGWLTAAYLARRLGGLRPDGVRITLIESSEIGIIGVGEGTFPTIQNTLRTIGIDEAQFMRGAGATFKQGIRFVDWKTAPKDGVHSHYYHPFASPRLLNGGLDLAPYWLLGAAGDIPFSDAVTLQDKVCEAGRAPKRLDDPQYGGPMAYAYHFDAGKLANLLRDVGKLTGVKHLLGNVTAVNKAKDGAIASIATAEHGELTADLYIDCTGFAGALIGKAMGGEWIDKSDTLFVDRALAMQVPYDRPDAPVSTTTISTAHEAGWTWDIGLPERRGAGYVFSSRHTSEDRAEEILRGYVGRAGDGLTPRLLKLKVGHRARHWIKNCVAVGLSGGFLEPLESTGIVLIEAAAYMLARNLPRHGGFEAAARQFNQAMTDRYLRAIDFIKLHYCISQRADNAFWTDNRDPASIPETLRDHLEMWKHRPPNMFDFPNLHESFKYFNYQYILYGMGYPTQVDPAAHDHVALARADFARVQEAGKRAAAGLPDHRLLLNAVHGRGFLSPAPAPGLAEVGETVQR

SEQ ID NO: 84036 - protein, 517 aa, Microbulbifer agarilyticus
  REGION 1..517: note = tr|A0A1Q2M4Q3|A0A1Q2M4Q3_9GAMM Tryptophan halogenase; OS = Microbulbifer agarilyticus OX=260552 GN=Mag101_05845; PE = 4 SV=1
MSDPINSVVILGGGTAGWITAGTLAARFNREQEEPVRVTLVESPTVPTIGVGEGTWPTMRSTLKKMGVRETDFIRECNVGFKQGAKFARWTTGADDDFYYHPLVQPEGFHNHNLATHWLGGNTSESFSNTVCPQEALCEHNRAPKQIGTPEYAAVANYAYHLDAGKFAGFLQRHCTENLGVRHILADVTGIEESETGDIAALKTEAHGKVSGDLFVDCSGFGSRLLGGHYKVPFRSCKDVLFIDSALAVQVPYEREDSPIATHTISTAQSAGWVWDIGLQSRRGVGHVFSSAHTSDSAAYGELARYLKVSEGELDRLGVRKIPIVPGHREKFWHRNCVAIGLSAGFLEPLEASALVLVEISANMLAEQFPASRAAMDVVARRFNETFLYRWDRIIDFLKLHYVLTKRTDSRFWIDNCDPATIPDSLQELLTLWRYQPPWHDDFDRAVEVFPAASYQYVLYGMEFETQPAAHGVSRASLEQAGQLFQQKGKATQQMLAGLEIHRNLVNKICRHGLQQI

SEQ ID NO: 84037 - protein, 516 aa, Caulobacter vibrioides
  REGION 1..516: note = tr|R0EF40|R0EF40_CAUVI Uncharacterized protein; OS = Caulobacter vibrioides OR37 OX=1292034 GN=OR37_03477; PE = 4 SV=1
MSHANPNAIRKIVIVGGGSAGWITAAMLSHYFQNGGCQVELVESEEIGTIGVGESTIPPFLQLIASLGIDERAFIQATQASFKLGIRFEDWKLKGQHYYHPFGAIGGPIGPHEFYQCWLRAKANGHPSELQDFAPGTVMADQWKFMLPFRAQRSLISGASYALHVDARLVAKFLRDFAEARGVKRTEGIVTDVVTRPDGAVAKVVMKDGREVEGDLFIDCSGFRALLIGKTLNAPFDDWSDMLLCDRAVVVQTQNVGDPHPFTLSRAEDAGWRWRIPLQHRAGNGYVFSSRHLGDDEARATLVRNLQGPALMEPMFIPFKTGVRRRLWDKNVVAVGLAGGFIEPLESTALHLIYRGVDFLLRFFPDRDFDPTLAAEYNRRMVADYEEIRDFIVLHYCTTQRDDTPFWRDVRQAPIPESLKERMALFQAHGVLREGVDEMFRNPSWQSIMEGMGVRPRRYQQLVDTAPYAVIAQTLDQSKPMLAAEVAGLPSHGQFLAQNCPAPPPEAAAAPFKTVA

SEQ ID NO: 84038 - protein, 509 aa, Caulobacter sp.
  REGION 1..509: note = tr|A0A0Q6U0E8|A0A0Q6U0E8_9CAUL Tryptophan halogenase; OS = Caulobacter sp. Root342 OX=1736519 GN=ASC62_19650 PE=4; SV = 1
MTPSPIRKIVIVGGGTAGWMTAAGLAAVLKGLPVAIELVESAEIGTVGVGEATVPHIRDYNARLGLDEADFMRKTQATYKLGIEFRDWGRKGDAYVHPFGAFGQPIAGIPFHQHWLRARALAKKGLGEAAPIQAYSLPIMAGLAGKFAPPSPDPRSLGSTFSYAYQFDAGLYALYLRAYSEARGVVRTEGKIATVAQRPDDGFVTGVTLESGQTIEGDLFVDCSGFRGLLIEQTLQAGYDDWTQWLPCDRAAAVPCDSVEPATPLTRATSDAAGWRWRIPLQHRVGNGYVYCSSYISDDEAARVLLEKLDGEAQADPRFLRFVTGRRKQQWLKNVVAIGLSSGFLEPLESTSIHLIQVAISTLLELFPHQGCEQADQDEYNRVMDLEFERIRDFLVLHYHANQREDSAFWNDRRAAPIPDSLAQKIALFRERGVVAAYKDGFFKEPSWLSVYLGQNVLPDGFDPLVEAIDPAQSARLLAELQAAVARTVQSMPEHETFLRSVADARTPA

SEQ ID NO: 84039 - protein, 500 aa, Pseudoalteromonas luteoviolacea
  REGION 1..500: note = tr|A0A167NHI7|A0A167NHI7_9GAMM Tryptophan halogenase; OS = Pseudoalteromonas luteoviolacea CPMOR-1 OX=1365248; GN = N473_07620 PE=4 SV=1
MNSRKIIILGGGTAGWMAANLIAKSWCDKDICISVIESPDIGIIGVGEGSTPQFKAFMDFIEVPESEWMPQCNATYKNGIRFVNWSMRPGFEQYFHPFPAQPDDYSAPAFFHNSFVRRKGVDLEGHPDPFFLATYLAEHAKAPIAAESFPFEINYGYHFDSAKLGLLLAEKAKSFGVEHIQARVQDVRKNTDGTIAALICESGIEVSGDIFIDCSGFSSLLLQQHLQVGFESFSNNLFNDSAVVLPTEQGDVIASETLSIARKYGWSWHIPLTNRIGNGYVYSSRYCNKDQAETELRAALGLLDSDIEARHLNMKVGQVKEHWHKNCVAIGLSQGFIEPLEATALHIVQETVQSFIECYQEENFSCKGRGKHNRMMSQRYQAIRDYIVAHYRVNSRNDTAYWRDNANNNQLSKSLFDVLNTWVQGKNLSDELDRQDIDKYYPSVSWHCLLAGYGIYPEQHQLVAASQAANKYEMSQVREYIRRCGLNFTDHRTQLARFID

SEQ ID NO: 84040 - protein, 518 aa, Caulobacter sp.
  REGION 1..518: note = tr|A0A0Q6UGT8|A0A0Q6UGT8_9CAUL Tryptophan halogenase; OS = Caulobacter sp. Root342 OX=1736519 GN=ASC62_01285 PE=4; SV = 1
MDNTGKISHLVIVGGGTAGWMSAAFFSKVFTPQQMRITLVESAEIGTVGVGEATIPPITFFNKVVGVDEGRMLAATQGSFKLGIEFVGWGDPAGRYLHPFGYYGAPMEGVSFHAYWLRARRLGYKADLAEFSLSCLAAKAGRFDWRVDDPHDPRAAMAHAYHFDASLYAKLLREVAEARGVRRVERTIRGVDLDPLDGTIASLALDDGEALAGDFFIDCSGFRGLLIGDALKVGYDDWSRFLPADRAVAVPSARFEDPIPYTRAIADTAGWRWRIPLQHRTGNGYVYVSDHIGDDAAADVLLASLAREHPDNKALADPRFLRFTTGRRKQSRVKNCAAIGLSSGFLEPLESTSIHLIQHGLIKLAGSFPLAKNDPAAAGIYNRIMGEEMEQIRDFLIYHYHANRRVGEPLWDRLRHMTVPDSLREKMELFRTRGATIFPNQTIFQEPNWLAIMMGQQGEPEGYDPLANLMDERLMAERLQQVRIACLKAVERMPTHAQVLGRFTAADGAKGKSDVEIA

SEQ ID NO: 84041 - protein, 505 aa, unidentified
  source 1..505: note = Sphingopyxis fribergensis
  REGION 1..505: note = tr|A0A0A7PNH2|A0A0A7PNH2_9SPHN Tryptophan halogenase; OS = Sphingopyxis fribergensis OX=1515612 GN=SKP52_12890; PE = 4 SV=1
MSRVGDGRITKVVIVGGGTAGWMAAAALSRTMDNLSIRLVESDAIGTVGVGEATIPAIRLFNALIGIDENEFIRETGGTFKLGIQFHDWGRIGDVYMHAFGQIGRSLGMLPFQQYWLRGRNEGVAGRLGDYSLNETAGRQNRFARLPQIPNTSLDGIAYAFHFDAALYAAYLRKISEAAGVERTEGQIASVRRNGESGHVEAVVLENGTAIEGELFIDCSGFRALLIEEALETGFEDWTHWLPCDRAIAVPSENAGPARPYTQAIAHKAGWQWRIPLQHRTGNGHVFCSDFIGEDEATAILLAHVEGRPLADPRTLRFRTGMRKKAWNANVVALGLASGFLEPLESTSIHLIQNGIAKLLAHFPDRDFDTANIDAYNRRVRFDYERIRDFVILHYHANQRTDAPFWVRCREMGIPETLARKIELFKSQGQIVREGDELFIEIGWFQVLTGQNILPGGYHPMADQLTRDELAGFFADIETIVARTASHLTGHEDFIAQHCAAGVPA

SEQ ID NO: 84042 - protein, 506 aa, Gallaecimonas pentaromativorans
  REGION 1..506: note = tr|A0A3N1PGC6|A0A3N1PGC6_9GAMM Tryptophan halogenase; OS = Gallaecimonas pentaromativorans OX=584787; GN = EDC28_105231 PE=4 SV=1
MTIKNVVILGGGSAGWMSAAMLVKSLGKQLAITLVESDQIATVGVGEATIPPIGLFNRYLGIDEAEFLTQTQGTIKLGIEFENWGREGECYMHAFGELGRDLGITPFIHYWLRARQQGHGRGLWDYSLNYQAAKAGRFIPLPKVPDSPLKGLVHAYHFDAGLYAGLLRRYSEGLGVKRIEGKVVEVALDEGGAISELVLASGQRVAGELFIDCSGQRARLIGEALGGQFEDWGHYLPADSALAVPSENTGEPRPYTRAIAHDVGWQWQIPLQHRTGNGLVYASRYLGDDEARAKLLAAIEGKALAEPRLIRFKTGRQRQQWLKNCVSLGLASGFLEPLESTSLHLVQSGITRLIKLFPRTGIAASAVAEFNRQSAEECEAIRDFIILHYHLNQRPEPFWQAMREMAVPSSLGRRLALFGDCGRVFREGAELFSEVAWQQVLIGQNLLPTDYDPLADSLDGKELEGYLANLATIITATRDKLPRHGDFLARARELAATKGKGLTTKG

SEQ ID NO: 84043 - protein, 528 aa, Microbulbifer agarilyticus
  REGION 1..528: note = tr|A0A1Q2M3G2|A0A1Q2M3G2_9GAMM Uncharacterized protein OS=Microbulbifer agarilyticus OX=260552; GN = Mag101_06145 PE=4 SV=1
MKSIKNVVVVGGGTAGWLAAASLARHLDPLTHHEYTVTLVESPDAPIIGVGEGTWPTMRNTLRNLGIDEFEFIRECDTSFKQGTRFVNWHTRAENGQDASYFHSFELPRGMWPIPPGPYWHHLQKELGLSYAEAISPQPAACMHHLAPKGLDTAQYETVLNYAYHLDAGKFATFLRRHACEKLGVTHLLAHVESVNVSEAGYIESIATKQGEKISGDLFIDCTGFASLLLDKTYHIPFRGVSDTLLVNKAVAMQVPYASEQAPICSPTLSTAQSAGWIWDIGLQTRRGTGYVYSDNHTSPDEAEATLRAYNKEALNKQVVNTNHQAVDVDQLDARQIDLRLGYREKVFHKNCVGMGLSAAFLEPLEASAIFLIEASCNMLTELFPQRMEQLGTLEKKYNAVFTQRWHRVVDFIKLHYFLSRRTDSGFWLDNTDQTTLPDSLKEQLEFWKFYPPTRFDMPSALEPFVRESYEFILYGMEYHADYQWSAGQLPHLENAQANFARIRKLSAEITDVLPSNRALINKIRKMR

SEQ ID NO: 84044 - protein, 510 aa, Mesorhizobium sp.
  REGION 1..510: note = tr|A0A4S0VRI4|A0A4S0VRI4_9RHIZ Tryptophan 7-halogenase OS=Mesorhizobium sp. M00.F.Ca.ET.170.01.1.1; OX = 2500524 GN=EN813_002135 PE=4 SV=1
MVDTESTPAGRIRKVVIAGGGTAGWLAGCALAHQFRDQLEITLVESEQIGTVGVGESTVPPIRTFHRFLQIDEQDFLRAVAGTFKLSISFENWRLPGDRFFHPFGTIGHGTWAAPFHHFWLDSLRRGMPSDLGDFCLESIASRGDRFSLQTQPQASYAYHFDAGLYARFLRRRAEGHGLRRIEGRIAQVRQHAHDGSVQALVLEDGQVIEGDLFIDCTGFRGLLIEQTLGTGYEDWHEWLPCDRAVAVQTEAVAPPVPYTRAIAHEAGWRWHIALQHRVGCGLVYSSRHLSDDEATAKLLRDVGAPPLRDPWQVPFRSGRRLKAWNRNVVALGLASGFIEPLESTSIHLTISAVVRLIQLFPFDGIRASLVQLYNDVSRQEMEHVRDFIILHYHATQRTEPMWKACREMRVPESLQQRLQAWRERAHAWQDPGELFRVESWTSVLLGQGIPPGPPHPLARAVSDADLRTLLKGIQQPVQHAAAQMPTQAEFIAQYCRSGADVWRSMATPA

SEQ ID NO: 84045 - protein, 510 aa, Brevundimonas sp.
  REGION 1..510: note = tr|A0A326L6C9|A0A326L6C9_9CAUL Tryptophan halogenase; OS = Brevundimonas sp. OX=1871086 GN=DI552_00755 PE=4 SV=1
MSQDQRIRRIVIVGGGTAGWMAAAVISRNLAADYAQIDLVESPEIGTVGVGEATIPPLLTLNRLLGVDENEFVRRTQATYKLGIQFRNWGRLGHEYVHPFGAYGADLDGIAFHQHWLRLRGLADVDAIDAYSLPIMAMKAGRFTRTSDDPRHVHSRMAYAYHFDAGLYGGFLREMAMARGVNRIEARIVDVALNPDSGFVEAVVLDDGRRIEGDLFIDCSGFRGLLIEQALKTGYEDWSRWLPMDRALAVPCEAVGAPTLYTRSTAHDAGWQWRIQLQHRTGNGHVYASAFTTEEAARDTLLTHLDGKPLADPRPLRFVTGRRKKAWNKNVVSLGLASGFLEPLESTSIHLIQSGVTTLMSLFPDRRFDQADIDKYNSLMREEYEHARDFIILHYHVGERDDSEFWRHVRATEIPDSLKERIDLFRSRGRVMGRHEDLFAHTSWVAVMLGQGITPEGHDPMADQSPAAEMAARLAQIRAVIRNGVSAMPPHQQFIDRHCRADAPAAKEPA

SEQ ID NO: 84046 - protein, 538 aa, Burkholderia sp.
  REGION 1..538: note = tr|A0A132CD22|A0A132CD22_9BURK Tryptophan halogenase; OS = Burkholderia sp. ABCPW 14 OX=1637860 GN=WS62_27240 PE=4; SV = 1
MSNPIKNIVIVGGGTAGWMAASYLVRALQQQANITLIESTAIPRIGVGEATIPSLQKVFFDFLGIPEREWMPQVNGAFKAAIKFVNWRKSPDRSRDDYFYHLFGSVPNCDGVPLTHYWLRKREQGFQQPMEYACYPQPGALDGKLAPCLPDGTRQMSHAWHFDAHLVADFLKRWAIERGVNRVVDEVVEVHLNDRGYISSLSTKEGRTLEADLFIDCSGMRGLLINQALKEPFIDMSDYLLCDSAVASAVPNADARVGIEPYTSAIAMNSGWTWKIPMLGRFGSGYVFSSKFTSRDQATADFLNLWGLSDKQPLNQIKFRVGRNGRAWVNNCVSIGLSSCFLEPLESTGIYFIYAALYQLVKHFPDTSFDPRLTDAFNAEIVHMFDDCRDFVQAHYFTTSREDTPFWLANRHDLRLSDAIKEKVQRYKAGLPLTTTSFDDSTYYETFDYEFKNFWLNGNYYCIFAGLGMLPDRSLPLLRHRPESIDKAEAMFARIRREAGRLRTSLPTNYDYLRSLREGDAGLSRSQPGPTLAAPEIL

SEQ ID NO: 84047 - protein, 504 aa, Brevundimonas sp.
  REGION 1..504: note = tr|A0A326L0Z8|A0A326L0Z8_9CAUL Tryptophan halogenase; OS = Brevundimonas sp. OX=1871086 GN=DI552_00890 PE=4 SV=1
MANGPIRDIVVVGGGTAGWMAAAALSRLSGNGVTRVVLVESDAIGTVGVGEATIPPIRTFNAMLGLDEADFVRETRGTFKLGIEFVGWTRPGHAYMHPFGAFGADLEGVKFHQAWRRLHDKGLAGPFGDYNICEAAARAGRFGPGDPRNPVTRTTWAYHFDAGLYAAYLRRYSQARGVVRHEGRVVSVEQRPEDGFLSAVMLEDGRRLEGDLFVDCSGFGGLLIEQTLKAGYEDWSRWLPCDSAVAVPCAHRDPGVLDPYTRATARTAGWQWRIPLQHRVGNGHVYSSAHVSDEDARALLLNHLEGEPLAEPRRLTFTTGRRKRAWVKNCVALGLASGFLEPLESTSIHLIQAGVTKLLALFPDRGFDPRDIAEYNRLTDLQIEQVRDFIILHYKANGRVGEPLWDHCRAMTVPESLERRMNLFRHKGRLFRHEDELFAESSWLAVLLGQAVTPQGHDPLADALPLPALDAAAREIRDRVCAVALAMPPQAEVIARFCAAPEAA

SEQ ID NO: 84048 - protein, 521 aa, Caulobacter sp.
  REGION 1..521: note = tr|A0A0Q6TXJ0|A0A0Q6TXJ0_9CAUL Tryptophan halogenase; OS = Caulobacter sp. Root342 OX=1736519 GN=ASC62_08245 PE=4; SV = 1
MTNTNPNAIKKIVIVGGGSAGWISAAMLSHYFQKGGPQKETCEVELIESEEIGTIGVGESTIPPFLQLIASLGVDEREFIQATQASFKLGIRFEDWKRKGEHYYHPFGAIGGPIGPHEFYQCWLRAKANGHPSNLQDFAPGTVMADQWKFMLPFKAQRSLIAGASYALHIDARLVAKFLRDYAEARGVKRTEGIVTDVVTRPDGGVAKVIMKNGHEVEGDLFIDCSGFRALLIGKTLDVPFVDWSDLLLCDRAVVVQTQNVGAPHPFTLSKAEDAGWRWRIPLQHRSGNGYVFSSKHLSDDEARATLVKTLQGEALMNPMFIPFKTGMRQRPWEKNVVAVGLAGGFIEPLESTALHLIYRGMDFLLRFFPDRDCDPALAAEYNRRMTADYEEIRDFIVLHYCTSQREDTPFWRACRDAPIPDSLKERIALFRAHGVLREGVDEMFRNPSWQSIMEGMGVRPRRYQQLVDTVPYEVIQNTLDQSAPMLAAQVAGLPSHGEFLAQNCPAPPPEPIAAPMKTVA

SEQ ID NO: 84049 - protein, 407 aa, Brevundimonas sp.
  REGION 1..407: note = tr|A0A3B9RKH7|A0A3B9RKH7_9CAUL Tryptophan halogenase (Fragment) OS=Brevundimonas sp. OX=1871086 GN=DCG66_10335; PE = 4 SV=1
MDQPRRPLKKICIVGGGTAGWIAAALMAEHFKGRMAEVELVESDDIGTIGVGESTVPPFLEMLKKLGINEQDFIQQTQASFKLGIQFDDWTEKGESYFHPFGAIGVPVDVSDFYPVWLKARMNGYRRPLMDFASAAQMAAHERFMLPFKAQRSPIGGASYAVHVDAKRVARYLRDFAEARGVKRTEGIVEDVMTRPDGFVSGLKLKSGQTVEADFFIDCTGFRALLIGKTLGVGYTDWSEWLMCDRAIAIQTENVGAPKPYTLAQAQDCGWRWRIPLQHRTGNGHVFCSHYMSDDEATARLLAQVEGRPVVNPMVVPFKTGVREKIWDRNVLSLGLASGFIEPLESTAIHLIYRGMDFFFRLMPDLDCDPKLAAEYNRRMTVDYEEIRDFIILHYALTRRDDTPFWR

SEQ ID NO: 84050 - protein, 532 aa, Streptomyces sp.
  REGION 1..532: note = tr|A0A3R9WDZ5|A0A3R9WDZ5_9ACTN Tryptophan 7-halogenase OS=Streptomyces sp. WAC07061 OX=2487410; GN = EF912_10655 PE=4 SV=1
MTGTDSRIQKVVILGGGTAGWMTAAYLGKALQGTVDITVLEAPAIPRIGVGEATVPNLHKVLFDYLGIAEEEWMRECNASFKMAVRFVNWRTGGQGQPDARELENGGPDHFYHPFGILPDSDNVPMSHYWAKRKLEGLTEEPFDYACFREPPVMDAKKSPKWLDGTPSTRYAWHFDAALVADFLRRFATEKQGVHHVQDEMTHAEKDGRGFVKALHTKAGRVLDADLFVDCSGFRGLLINQALEEPFIDMSDHLLCDSAVATAVPHDDEANGIEPYTSAIAMSSGWTWKIPMLGRFGSGYVYSSKFTTKEEATREFSALWGLDPETTKFNHVKFRVGRNRRAWVNNVVSIGLSSAFLEPLESTGIYFITAAIYQLAKHFPDRTFNPELANSFNHEIEVMFDDTRDFIQAHFYYAPRNDTPFWRANKELTLPKNIQEKISAYKAGLAINSPIADESTYYGNFEAEFRNFWTNGSYYCVFAGLGLEPDAPLPILAHKPDSVAGAEALFGKVKQEQNHLLDTLPSTYDYLRKLHG

SEQ ID NO: 84051 - protein, 508 aa, Brevundimonas sp.
  REGION 1..508: note = tr|A0A521MMK0|A0A521MMK0_9CAUL Tryptophan 7-halogenase OS=Brevundimonas sp. OX=1871086; GN = EPO54_05695 PE=4 SV=1
MTTAIPSATAVRRVVIVGGGTAGWMTAAALARLVAPSGVQITLVESEAIGTVGVGESTLPHIRAFNERLGIDEAAFMKATRATFKLGIQFENWGQIGGSYIHPFGDYGAPGGEAPFHHYWLRGRELGDVGPIDDYSLPVVAAREGRFAPPSDDPRSLLSTYRYAYQFDATLYARFLRGMAETEGVRRIEGRIQNVAQDGESGAITKVTLDDGRQIEGDLFVDCSGFRALLIEQTLKAGFTDWSHWLPCDRAVALPCESDQPTVPYTRATALEAGWQFRIPLQHRVGNGYVYSSAFIDDAAALDRLVGRLEGKPLKAPNVLKFTAGQRTRNWAANCVSVGLSSGFIEPLESTSIYLIQIAITKLIELWPTAVIDPATEAEFNRQMDLEYIRIRDFIILHYCATARNDTPFWDYVRTMPLPDTLSEKIELFRARGVVQDYREGLFLHPSWVAVYLGQDILPRRHHPLVDAVSATQLMSSLERLRRMVREASYKLPSQDDYIARYCAHLPL

SEQ ID NO: 84052 - protein, 521 aa, Xanthomonas dyei
  REGION 1..521: note = tr|A0A2S7C7R5|A0A2S7C7R5_9XANT Tryptophan halogenase; OS = Xanthomonas dyei OX=743699 GN=XdyCFBP7245_05625 PE=4; SV = 1
MSYTAPLDPQQRPVRRVVIAGGGTAGWMAAAALSKLLGRQLQITLVESDEIGTVGVGEATIPSLVTFHRLLEIDEATFMAATQATFKLGIGFEHWRDVDKHYIHSFGHTGTDHWSAGFHHFWLKGRQRGVARDFGDYCLELRAAQEGRFAHLPNGGMNYAYHLDAGLYARFLRRFSEGFGVQRIEGRIGEVQTDPDSGYLTALTLQDGTRVEGDLFIDCTGFAGLLIGKTLGVGSEDWSRWLFADSALAVQTESVGPPLTYTRSRADQSGWMWRIPLQHRVGNGIVYSSRYTDQDSARAVLERNLQGRALTEPRALRFTPNQRHRVWEKNCVALGLASGFLEPIESTNIHLIQRGIVRLLQTFPQTINAVDIAEYNRQAADEIAHIRDFVILHYHATDRRDTPFWRDCAAMDIPDSLRHRMELFRRSGRVFHQGNELFAENSWVQVMLGQGITPQQHHPVADLMGDAELAHFLERIRHRVDATVATLPPHADFLRHHCPAPPLPDPAARAPFDAALAAPAG

SEQ ID NO: 84053 - protein, 519 aa, Microbulbifer agarilyticus
  REGION 1..519: note = tr|A0A1Q2M9N3|A0A1Q2M9N3_9GAMM Tryptophan halogenase; OS = Microbulbifer agarilyticus OX=260552 GN=Mag101_04505; PE = 4 SV=1
MDSSEQIKRVLIVGGGTAGWLSACHLAKKLASSSPAGVQVTLVESENIPTIGVGEGTVPAIRDSLRYLGISETEFIRECDATFKQGIKFANWVRPPGTSGADYYHHIFDYPDNQFGDLTPYWLQGAADGSYVDTVAVQGAVCDSGLGPKDMTVPEYEGHTSYAYHLDAAKFARLLTRHGVKKLGVKHLLADVQSVLRDESGDITAVKTVAGEQLEADLFVDCTGFASLLLGQSLGVKFVDKRDVLFADYALAAQIPNQSKDAPIPSFTISTAQESGWIWDIGLSERRGTGYVYSSDHTSHDRAESVFRDYLDDKTGDLSIRRIPMRVGYRETFWQNNCVAIGLSQGFVEPLEATGILVYDAAARMLADIFPANKSAMPIVAKQFNQAVQYSWDCVIDFIKLHYCISGRRDHAFWVDNCDTRSIPDSLQEKLALWKFQPPSAYDFPSKFGIFNLANYQYVLYGMEFETTLSAGSSGWYTRMSEAVSRIQEISMFSKQLLGALPEHRVLIERIKKYGLQKI

SEQ ID NO: 84054 - protein, 519 aa, Massilia sp.
  REGION 1..519: note = tr|A0A0Q7WRR4|A0A0Q7WRR4_9BURK Tryptophan halogenase; OS = Massilia sp. Root1485 OX=1736472 GN=ASD92_07715 PE=4; SV = 1
MRSQPLEKVVIVGGGSAGWLTAALVAAAHQTPAGPALKVTLIESPEVAPVGVGEGTWPGMRETLHRIGVSENDFFRACDASFKQGSLFVGWVDGSDDDAYYHPFELPYGYGETHLAASWQRQHGAVPFADLVSVQPHLCRAGRAPKQATTPEFAAVANYGYHLDAARFGLFLRRHCTEKLGVIHVPDHVVAVHAHDDGDIASVQTKLGGAIEGDLFIDCSGSQALLLGKHYGVPLLPQQHILFNDRACVVQLGYPEPASPIASQTRSTAQEAGWIWDIGLPTRRGIGHVYSSAHTSDAQAEQALLAYVERSGGGAPMLTTPRKLGFEPGYRDHFWHRNCVAIGQSAGFIEPLEASALAMVELSATMLSDGMPANRAVMDIIAKRFNDAFTYRWERVIDFLKLHYVLSRRNASQYWRDHRAPESIPTRLNELLALWRTQPPSRYDLHRIEELFPAASYQYVMYGMGLVPEVDRRIRHCEHADLADGYFRQAAAMTRKMLAGLPGNRELIGHIVHHGMPTR

SEQ ID NO: 84055 - protein, 509 aa, Cellvibrio japonicus
  REGION 1..509: note = tr|B3PBU4|B3PBU4_CELJU Tryptophan halogenase; OS = Cellvibrio japonicus (strain Ueda107) OX=498211; GN = CJA_1159 PE=4 SV=1
MKPLRIAIVGGGTAGWLAANHLAVELKAEPGIEITVIESPEIGIVGVGEGTVPHIKKTLQKFGIPEADMLAACDTSLKNGIRFANWMQPSRQGKAHVYYHPFSSPFPAGYDVTPYYLKYRAALSFGAVSHAPDISELGFSPKRISSVPFEGVVDYAYHFNAYKFGQLLAKNATQRFSVRRKEATICAVTRNEQGNVEALQTKEGESLAYDFFVDCSGFHALLLGNTYQVPFVDISDRLLTDTALAIQVPIKNNQPIPPYTQASAHGAGWIWDIPLTTRRGVGFVYASQCLSENDAIAGLAAYLGELPENMAPRKITMKMGYREKFWVNNVVALGLAGGFVEPLEATSILVTDFAAELFARNLPRDLSALPAVTSYCNKVMAYTWERVIDFIQLHYCISDRRDTEFWIANTHSGNLSEVLAERLAIWRVHSPKKADFFSRFDLFDVDNYLYVLYGMEYPTSPKSMTAYEEQVYREVLLGVRHHSDELARQLVGHRTWLDGFSQAYKQKAI

SEQ ID NO: 84056 - protein, 495 aa, Cellvibrio japonicus
  REGION 1..495: note = tr|B3PBE6|B3PBE6_CELJU Tryptophan halogenase; OS = Cellvibrio japonicus (strain Ueda107) OX=498211; GN = CJA_2713 PE=4 SV=1
MVSAPVSSIVVVGGGTAGWMSAAYLAHWLDKTGIRVSLIESDQIGTIGVGEATVPGIHQFLKGLNIRESEFLRATNATFKLGIEFVEWAGAGKSFFHPFAGYGVPLEDRPFHKTWWSQKKQDYEEGLEAFCLCTQLARAGKFALPSFDQDSKLAWYNYAYHFDASLFAKFLREYAEKRGVSRIEGKVERVQLDATTGYISSLHMESGMVISGDLFIDCTGIPALLIGKTLGVGYEDWSHWLPCDSAVAIQTTRVVDPDPFTRSSARTAGWQWHIPLQHRVGNGYVYSSQFIAHDQARQELLGHLAGEPVTDPRLIRFKTGMRDSFWYKNCVSIGLSSGFLEPLESTSISLIQTGIAKLAAFLVNFEINEKHVAEANRLNRLEYERIRDFIILHYKLNGCDGPFWQYVRDMPIPATLEEKIAIFASSGDIKLIEQESFKEESWISMFYGFGREPLGSVEPQLDVDKARSIMAKMKSAIHKGCQHAMSHAEFLRTVE

SEQ ID NO: 84057 - protein, 334 aa, Brevundimonas sp.
  REGION 1..334: note = tr|A0A2D8FKD4|A0A2D8FKD4_9CAUL Tryptophan halogenase (Fragment) OS=Brevundimonas sp. OX=1871086 GN=CL682_00470; PE = 4 SV=1
MDQPRRPLKKICIVGGGTAGWIAAALMAEHFKGRMAEVELVESDDIGTIGVGESTVPPFLEMLKKLGINEQDFIQQTQASFKLGIQFDDWTEKGESYFHPFGAIGVPVDVSDFYPVWLKARMNGYRRPLMDFASAAQMAAHERFMLPFKAQRSPIGGASYAVHVDAKRVARYLRDFAEARGVKRTEGIVEDVMTRPDGFVSGLKLKSGQTVEADFFIDCTGFRALLIGKTLGVGYTDWSEWLMCDRAIAIQTENVGAPKPYTLAQAQDCGWRWRIPLQHRTGNGHVFCSHYMSDDEATARLLAQVEGRPVVNPMVVPFKTGVREKIWDRNVLSL

SEQ ID NO: 84058 - protein, 501 aa, Brevundimonas sp.
  REGION 1..501: note = tr|A0A354EPY0|A0A354EPY0_9CAUL Tryptophan halogenase; OS = Brevundimonas sp. OX=1871086 GN=DDY79_04435 PE=4 SV=1
MQSSQAIDRIVIVGGGTAGWMAAAALAHVFEGAGKSVTLVESEAIGIIGVGEATIPEILKFNARLGIDEADFLRETKATFKLGIEFDGWRREGERYFHPFGAFGVDMEGVAFHHFWLKACAEGQADPLETYSMAWQAARRGRFVHPQGGPQSPLSSLGYAYHFDAALYAGFLRRYAEARGVVRCEGRVVEVQQSQAGDVSGVVLEDGRLVAGDFFIDCTGFIGLLIEKTLKAGYDDWSAWLPCDSAVAVPCERVEPLSPYTRSTAREAGWQWRIPLQHRVGNGYVYSSSHLSHQDAEDALMARLEGPPLAQPRRLRFATGRRRECWKRNCVAVGLSSGFLEPLESTSIHLIQSAITKLITLFPSQTTDEGLRREFNALMEEEFVTVRDFLILHYKVTQRDGPFWAQVRAMPIPDRLADKIALFEQTGRIVRRDHDIFSESSWLAVAVGQGLAPRGRHPISDVLGRDENRARLAAIRDSIWRTADALPSHADALAATMRPHA

SEQ ID NO: 84059 - protein, 507 aa, Cellvibrio japonicus
  REGION 1..507: note = tr|B3PG13|B3PG13_CELJU Tryptophan halogenase; OS = Cellvibrio japonicus (strain Ueda107) OX=498211; GN = CJA_3467 PE=4 SV=1
MHAIKSLVIVGGGTAGWMAAAFFAKRFTGCAMTITLVESTEIGTIGVGEATVPSMKMFLADLGIDEREFIQNTQATCKLGIDFNGWWQQDTAFFHPFAMFGAKIAHIPFHHYWAYLRAQGQAGPIDDYSLPAQMARANKFALPKDEALDIARFNYAYHFDAGSFANYLSRFAQTLGVKHIEARVTHVLKNADTGNISTLILNNGKEIEGDFFIDCSGFRALLIEENLHTGYQDWSHWLPCDRALALPCAHQGYIPPYTRALACTAGWQWRIPLQHRHGNGYVYSSHYISDDQALAELTQHMHAKPTADPRVIRFTTGMRNKCWNKNVFALGLSSGFLEPLESTSIYMVQTALATLFTYFPTTADNIALSTKVNKILAEHNEKLRDFIILHYHLNQRIGMDFWDACRAAPLPDSLSNRIEEFRATGNIRFNDLDFFQISSWLAMFSGFQLLPQYQHPKILHTNKTLIIQELQQMRNAIQRVVRELPEHHQFIAKNASLTNTAITAESG

SEQ ID NO: 84060 - protein, 497 aa, unidentified
  source 1..497: note = Chromatiales bacterium
  REGION 1..497: note = tr|A0A1F8TSQ8|A0A1F8TSQ8_9GAMM Tryptophan halogenase; OS = Chromatiales bacterium RIFOXYA1_FULL_46_5 OX=1797676; GN = A2203_15605 PE=4 SV=1
MNNEQNRIKKVVIAGGGTAGWMTAAGLTKLLGKNLEVVLVESDDIGTVGVGEATIPTMHIFHRLLNIKESEVMAATNATFKLGIQFENWKTVGEDYIHSFGFLGKDCWACGFQHFWVKGRQKGIATEIGDYCVEHLGARQGRFAVLPNQDLNHAYHMDASLYAKFLRRMSEQHGIKRIEGKIREVQQHMDGNISALLLESGELIEGDLFIDCTGFRALLIEQTLNTGFEDWSHWLPCDSAFAVQTKTTQEPVAYTRAIARDAGWQWKIPLQSRVGNGLVFCSKFMTEAEAKQTLIDNVEGEMLFEPRLIKFKTGTRRQHWNKNCVAIGLSSGFLEPLESTSIHLIHRSIIRLLQMFPSNGIVSADVAEFNRQTKIEMDNIRDFIILHYKATERTDTRFWRYCKDMEIPDTLAHRMELFKQSGKVYKFAQELFGESSWLQVLIGQGLMPEQYHPIVDLMPDSELNDFLMSIKHNVKRTVSQFPTHHEFIQHYCKSSLV

SEQ ID NO: 84061 - protein, 509 aa, Brevundimonas sp.
  REGION 1..509: note = tr|A0A326L0J3|A0A326L0J3_9CAUL Tryptophan halogenase; OS = Brevundimonas sp. OX=1871086 GN=DI552_01905 PE=4 SV=1
MRQLKRILIVGGGSAGWMTAALFSKLFRGRYDITLVESDAIGTIGVGEATIPAIRKFNELIGLDENDFIRRTQGSFKLGIQFVDWLRKGDRYMHAFGVIGRDLGWLRCHQYWLKMRESGGAGDLGAYSINAAAALENRFMRPDPKMRSSPLGQITYAFQFDAGLYARYLRQMSEAAGVVRREGKVCAVQLRAEDGFVESVTLEDGEVIAADLFVDCSGFRGLIIEEAMKTGYEAWTQWLPCDRAIAVPCARTEPFTPYTRATARDAGWQWRIPLQHRTGNGHVFSSRHMDEAEAERVLLANLDGAQLAEPNRIRFVTGKRRRIWNRNCVAVGLAAGFLEPLESTSLHLIQSSLIRLVRLMPDAGFDPANIDEFNRQTDFEYERVRDFIILHYKATERDDTPFWRHCRDMPVPDTLQRKIDLFRANGRVFREDDELFTEESWIQVFLGQGITPRHPDPLVDVTDEAAIDRYLGDIRSVVGKCVARMPPHPDYVARIVQAPQGQAAGASQT

SEQ ID NO: 84062 - protein, 496 aa, Hyphomonas sp.
  REGION 1..496: note = tr|A0A062U7Z3|A0A062U7Z3_9RHOB Uncharacterized protein OS=Hyphomonas sp. T16B2 OX=1280941 GN=HY2_07250; PE = 4 SV=1
MQKVRKVVIAGGGTAGWITAAALSRMLGPLLDITLVESDDIGTVGVGEATIPTHRTFHHLLGIDEREFMRATKATFKLGIAFENWGGIGDTYIHSFGQVGKSSWMGEFYNIWLAAREKGIGEDLDAYCFELQAAKHNKFYTDEKFNINYAYHLDASLYAKFLRAFSEEKGVKRVEGLIGGVEQDGETGFITALKLKSGDRIEGDFFVDCTGFRGLLIEQTLKSGFEDWAHWLPTDSALAVQTRSVGPALPYTRSIAHQSGWQWRIPLQHRVGNGLVFCSQYMQPDAAEEILRNNIEGELLGEPRLIRYKTGRRRKVWNKNCVALGLSSGFLEPLESTSIHLIQIGASRLVQQFPFDGVSEAIANHYNEQSLRELERIRDFIILHYKVTERDDSAFWRDRRDMDVPDSLAQRLDVFRENGLAYQATDDLFRVDSWLQVMMGQRMRPKGYHHMGHMITEDQMRRALGGLSSGIANTVAKMPTHQDFIERYCAIEAEAV

SEQ ID NO: 84063 - protein, 477 aa, unidentified
  source 1..477: note = Empedobacter haloabium
  REGION 1..477: note = tr|A0A5C7BFA5|A0A5C7BFA5_9FLAO Tryptophan 7-halogenase OS=Empedobacter haloabium OX=592317; GN = E7V67_28205 PE=4 SV=1
MVAAGLSKSLGKLLDIKLIESDEIGTVGVGEATIPTLMNFHHLLEIDEREFMAETMATFKLGISFENWRNVGEDYIHSFGTTGTDHWTAGFQHFWHKGRERGLAGDYGDYCLELKASLHNRFAHLPKNGMNYAYHMDAGRYAKFLRRFSERYGVQRVEGKIAEVRKDLICGDIRALRLDSGVELEGDLFIDCTGFRALLIGETMGVGYEDWSHWLFNDSAAALQTKSVGDAIPLTRSIARESGWQWRIPLQHRVGNGIVYSSRYTDDDTAIRTLQANVEGEPLMTPRIIRFKPGQRQQTWKGNCVAIGLASGFLEPIESTSIHLIQRGIIRLMQMFPTDGISQADVDEYNKQAETEIHHIRDFIILHYHVTNRRDTPYWRDAASMPVPASLRHRIDLFRETGRVFRIPNELFAENSWIQVMLGQGIHPRQHHQTADLMGDDELAHFLGSMATSIERTVAQLPSHQQYVQQYCAGTGW

SEQ ID NO: 84064 - protein, 356 aa, unidentified
  source 1..356: note = Sphingobacteriales bacterium
  REGION 1..356: note = tr|A0A4Q3G882|A0A4Q3G882_9SPHI Tryptophan 7-halogenase (Fragment) OS=Sphingobacteriales bacterium; OX = 2044944 GN=EOP48_23225 PE=4 SV=1
NRFSINEHNKINYAFHLDAGRYASFLRARSESRGVKRVEGKIASVQQNSDTGFITSLKLESGQEIAGDLFIDCTGMRGILIEQCLQTGFEEWGHWLPCDSAIAVQTESHEPAVPYTKSIAHHAGWRWQIPLQHRVGNGIVFSSPYLSNDEATNMLLSSMQGKVLTEPRVIKFKTGRRKKSWNKNCIAMGLASGFLEPLESTSIHMIMTAVTRLLQLFPHDEIRQSIVDEYNTQAESEYVRIRDFIILHYKATERDDSPFWRYCKNMEIPADLKHRMNLFKEFGRSNQVEGELFRLDSWTQVMLGQGILPSSHHPIVELMPEQELQHFLSGIATDVDKNIAMMSTHHEFITKYCDIK

SEQ ID NO: 84065 - protein, 322 aa, Caulobacter sp.
  REGION 1..322: note = tr|A0A258K5R2|A0A258K5R2_9CAUL Tryptophan halogenase (Fragment) OS=Caulobacter sp. 35-67-4 OX=1970331; GN = B7Y78_14875 PE=4 SV=1
MAAASLQRHFQGSPLKITLIESSEIGTIGVGEATIPTIRNFYQNLGLSDLDVMRATGATCKLGIRFNDWLKPGSSFLHPFGLFGQDLRGVPFHHYWLRLKALGDESEIGEYSLGASLDKGGKFTQPSRNPPSSLSVFDWALGVKRIDARITRVNLRPEDGFIASVDLDTGATVEGELFIDCSGFRGLLIEEALHTGYEDWSPWLLCDRALAVQSEGSGEPPPYTDVSAQTAGWRWRIPLQHRYGNGYVYSSRHISDDDAMAELKGAVPDPLLHEPRQIRFTPGRRLKAWNKNCVALGLAAGFLEPLESTSIALIETGIEKIK

SEQ ID NO: 84066 - protein, 505 aa, unidentified
  source 1..505: note = Burkholderiales bacterium
  REGION 1..505: note = tr|A0A1F4HSG7|A0A1F4HSG7_9BURK Tryptophan halogenase; OS = Burkholderiales bacterium RIFCSPHIGHO2_12_FULL_69_20; OX = 1797561 GN=A3E25_10125 PE=4 SV=1
MDNKLIDTIVIVGGGTSGWMTAAALAKVLRGKYKIQVVESDEIGTVGVGEATIPMIRRFNQVLEIDEDEFLRETQGTFKLGIEFVNWGRPGERYMHGFGVFGQDLWTVGFDQYWQRMHQAGKALDLEAYSINRMAARANKFMRAQPDLGNSPLADIVHAFHFDASLYARYLRRYSEALGVQRIEGRIVDVLLRGSNGHVDSLQLDDGRRVAGELFVDCSGFRGLLIEQTLQTGYEDWTHWLPCDRAVAVPCESVSELLPYTRSTAHQAGWQWRIPLQNRIGNGHVFCSAYISEDEATAVLMANLDGAPLAEPRTLRFATGMRRQAWNRNVVAVGLAGGFMEPLESTSIHLVQTAIARLLAFFPDRSFNPLDIDEYNRQSRFEFERIRDFIILHYHLNQREDAPFWQHCREMEIPATLQQKIDLYRAHGRIVREGSELFAEVGWLQVMHGQGLRAQGHHPLASLITEPEVAEYLDNVSGVIGKCLQVMPGHAEYVARHCAAPAARR

SEQ ID NO: 84067 - protein, 497 aa, Caulobacter vibrioides
  REGION 1..497: note = tr|R0D391|R0D391_CAUVI Glycine/D-amino acid oxidase, deaminating OS=Caulobacter vibrioides OR37 OX=1292034; GN = OR37_01094 PE=4 SV=1
MNRISRVVILGGGTAGWMTAAALSRCFGRTVRIDLVESEAIGTVGVGEATIPTIHWFNALIGLDEAEFLRATKASFKLGIEFVDWARPGHRYFHPFGRYGVELDQAPFHQLWLKSRADGSSRPLSDFSLATALAAANRFAKPAEDPRSILSTLGYAYHFDAALYASHLRGLAEAAGVVRHEGKVTAVERDPKSGFVVALSTDRGERIEGELFIDCSGFRALLIGEALGAPFEDWSHWLPCDRAVAAPCARSRETTPYTRSTLRPAGWQWRIPLQHRTGNGYVYASAFISDDEAASTLLANLDGELLAEPRFLRFKAGFRRESWRGNVVAIGLSAGFLEPLESTSIHLIQSGIAKLISLFPDRDCDPSLARQFNALFGRDMDGIRDFLILHYHATEQHNQPLWRQARAMAAPDSLSEKIAHYRRSGRLMLSQDELFREASWLAVLEGQGIVAQGYAPLADTLDPASNLRRLDDLAALIARAAPTLPNHDAVIAELVGG

SEQ ID NO: 84068 - protein, 505 aa, Xanthomonas dyei
  REGION 1..505: note = tr|A0A2S7C973|A0A2S7C973_9XANT Tryptophan halogenase; OS = Xanthomonas dyei OX=743699 GN=XdyCFBP7245_03940 PE=4; SV = 1
MHQARIRKVVIAGGGTAGWIAACALSHQFRDLLDITLVESDQIATVGVGESTVPPIRTFHRFLQIEEQEFLRAVAGTFKLSISFEHWRRQGERYIHPFGITGQSTLVCAFHHLWLESQRRGMPGAFGDYCLETVASRVNRFALPREPAVNYAYHLDAALYARFLRTRSEAHGVTRVEGKIQQVTLQPDSGDVAALVLEDGQVIEGDLFIDCTGFRGLLIEQTLHTGYEDWSHWLPCDRAVAVQTEAVGPPVPYTRAIAHEAGWRWHIPLQHRVGNGLVFSSQHMSDDEAQAKLLRDTAATPVKEPWLVPFRTGRRLKAWNKNVVSLGLASGFIEPLESTSIHLTIAAVVRLITLFPADGIAPSQVDVFNDISRAEMKHVRDFVTLHYHATQRDEPLWQQCRDMELPDSLRLRLRAWRERAHAWQGTDELFRVDSWTHVLLGQGIVPLQHHPLAAALSDNDLRRLLDGIAQPIQRVVEKMPSQQEFIERYCKADEQLWGGRRRVAM

SEQ ID NO: 84069 - protein, 512 aa, unidentified
  source 1..512: note = Burkholderiales bacterium
  REGION 1..512: note = tr|A0A1F4HH63|A0A1F4HH63_9BURK Tryptophan halogenase; OS = Burkholderiales bacterium RIFCSPHIGHO2_12_FULL_69_20; OX = 1797561 GN=A3E25_09040 PE=4 SV=1
MNQFTAPGPVPNPGGERPPVRRVVIAGGGTAGWMVAACLSKVLGKALDIRLVESDEIGTVGVGEATIPTLLTFHQLLDINEQEFMAATQATFKLGIGFEGWRDQGQDYIHSFGLTGQDHWTAGFQHFWLKGRDRQLAGDYGDYCLELKAARHNRFAHLPRAGMNYAYHLDASLYAQFLRRFSERLGVQRIEGRITSVQADAASGHIRAIQLDSGARIEGDLFIDCTGFRGLLIGETLKVGYEDWSHWLPCDSAVAVQTASVGEAVPYTRSMAHEAGWQWRIPLQHRVGNGLVYCSQYLPDAQARQRLLDRVQGPTLTTPRLIKFTPGQRQATWRGNCVAIGLSSGFIEPLESTSIHLIQRGIVRLMQLFPAAGISPADVDEYNQQARAEIEHIRDFIVLHYHVTQRDDSPFWRGCRSMDIPPSLRHRIDLFRDSGRVFRTGNELFAENSWIQVMLGQGIVPRRHHPVADLMGDAELAHFLDGIRAQVDRTLAQLPQHEAYVRQYCGVAAAPR

SEQ ID NO: 84070 - protein, 496 aa, Microbulbifer agarilyticus
  REGION 1..496: note = tr|A0A1Q2M8A2|A0A1Q2M8A2_9GAMM Tryptophan halogenase; OS = Microbulbifer agarilyticus OX=260552 GN=Mag101_15440; PE = 4 SV=1
MNNKVVKNLVILGGGTAGWITAALMCKVLGKSINITLVESDKIGTVGVGEATIPPIINFNQALGLDEKEFLRETKGTIKLGIQFENWLKRGDSYMHAFGTIGKNFPFCDFHHFWVRHRQNGGTESLWDYSLNYQAAKNNKFSPLGQIKGTNLPGISYAYHFDAGLYAQFLRKYAESKGVTRIEGTVDEVKLNPESGYVEKLVLEGGREVPGDLFVDCTGMAALLIHKALGVGYDDWSHWLPCDRAQAVPSALVKPIVPYTRSIAHEAGWQWRIPLQHRTGNGLVYSSRHWTDEQAREVLMSNLDAEPLADPKVIRFRTGRRREAWRKNVVAIGLSSGFLEPLESTSIHMIQTAATRLIKCFPHRGIRAEEVAEYNRQSQVEIERIRDFIILHYKANQRRDSEFWRQCEEMAVPDSLHEKMELFRRSGKAFRDFDDLFTEVAWQQVLIGQGVMPEDHHVIADGLSDSQLTDLMESLQTLIQGTVKQLADHDDFLASL

SEQ ID NO: 84071 - protein, 500 aa, unidentified
  source 1..500: note = Sphingomonas carotinifaciens
  REGION 1..500: note = tr|A0A1G7RMY0|A0A1G7RMY0_9SPHN Tryptophan halogenase; OS = Sphingomonas carotinifaciens OX=1166323; GN = SAMN05216557_11229 PE=4 SV=1
MSDPLRSIVIVGGGTAGWMAATYLARRLSHLRPDITVIESPAIGTVGVGEATVPAIRDFLAAVELGEPEVLRETEGTIKYGIRFVDWQTKGHAFFHPFGLYGVPAGGVPFHHHWLRARAVGDATPLDAYCLATQLADHGLFLAPPDRPENDLGHFNFALHFDAVRFAHLLSRLAIANGVRHVPARIDAVIRDPQSGDVSGVRLESGAVVHGDLWIDCSGFRSLLLGEAMGVPYRDWREWLPCDRAVAMPCAPAGATMHPRTTATALPAGWQWHIPLRHRIGNGYVYCSDHVSDDEAEQTLRDRLEGAPLGNANRLRFTPGHRAEVWHRNVVGVGLASGFLEPLESTSISLVQSGLQRLVQLWPQRDIDPRLAAVYNRQSVLEFERIRDFLLIHYMFNRRIGEPFWDRMRAIEPPDHLRMKLDSWRACGEFVRYEWESFQDPSWLSLYAGLNQLPAHHSMLADAYPMPALSGHLASIRASIARVLAHGERHDRFLARVAAG

SEQ ID NO: 84072 - protein, 508 aa, unidentified
  source 1..508: note = Empedobacter haloabium
  REGION 1..508: note = tr|A0A5C7BES6|A0A5C7BES6_9FLAO Tryptophan 7-halogenase OS=Empedobacter haloabium OX=592317; GN = E7V67_28220 PE=4 SV=1
MAHPIRHIVIVGGGSAGWLTAGVIAADHRGHAPDGLRVTLIESPDVAPIGVGEGTWPTMRDTLARIGVSETAFFRECDAAFKQGSRFDGWRGSEHADYYFHPFVLPQGYGETDLIGPWQREFSHVPFADLVSFQPHLCVQGRAPKQATTPEFAAVANYGYHLDAGKFGVFLRKHCLERLGVHYVPDHVTGIASDESGDIAALQTRAHGALAGDLFIDCTGMQSLLLGQHYGIGLVDQRHVLFNDSALAVQVPYLNEDSPIASQTTSTAQRAGWIWDIGLPTRRGIGHVYSSAHTSDDEAAADLCAYLGTDATPRKLTFQPGYRRTFWHRNCVAIGLSAGFIEPLEASALALVELSAALVSDDLPATRATMDAVARRFNDAFTYRWERVIEFLKLHYVLSRRPGAYWDDHRDERSIPVRLQELLALWRHRPPSRLDFHRIEEVFPSASWQYVLYGMGFTPEPGGTRRTDPTVAAQYYREAADLTRRMLGALPSNRALIDHIRRHGLQKI

SEQ ID NO: 84073 - protein, 511 aa, Massilia sp.
  REGION 1..511: note = tr|A0A0Q7XUT5|A0A0Q7XUT5_9BURK Tryptophan halogenase; OS = Massilia sp. Root1485 OX=1736472 GN=ASD92_13825 PE=4; SV = 1
MMSKPIEHVVVVGGGSAGWLTAGVLAAEHPRLTVTLVESPGVPPIGVGEGTWPSMRETLQRIGVSEAAFFRECDAAFKQGSRFDRWVDGSDGDVYFHPFSLPQGYGEANLVAAWQRAHRGVPFADLVSYQPHLCVQGRAPKQPQTPEYAGVANYGYHLDAGKFGVFLQKHCVDKLRVRHVLAHVVDILSTDDGDIAALRTREAGLIEGDLFIDCTGMASLLLGRHYGVPLVSQRDVLFNDRALAVQVPYPTDDTPIASQTTSTAQSHGWTWDIGLPARRGVGYVYSSAHVDDDAAEQTIRAYLASTGITGEIPAPRKIAFDPGYRARFWERNVVAIGLSAGFIEPLEASALALVELSAGWLADDLPATRAQMDAIAARFNEAFTYRWERIIDFLKLHYVLSKRTDTDYWLDHRAARTQSPRLRELLALWRTRAPSRRDFPRIEEIFPSASWQYILYGMGFRPELTARASDLPERADQYFREAARLTARMLPQLPANREMLHHIRQFGMPPG

SEQ ID NO: 84074 - protein, 494 aa, Gallaecimonas pentaromativorans
  REGION 1..494: note = tr|A0A3N1PCU5|A0A3N1PCU5_9GAMM Tryptophan halogenase; OS = Gallaecimonas pentaromativorans OX=584787; GN = EDC28_102136 PE=4 SV=1
MDNKITKVVIAGGGTAGWMAAAAFGKLMGKRLDITLVESDDIGTVGVGEATIPTLQLFHRLLGIKEPELMAATNATFKLGIQFENWYQQGQNYLHSFGFLGQGCWACGFHHFWKKGQELALVSEIGDYCAEHLAARQGRFAVLPGQDANHAYHFDAALYARFLRQLAENHGVKRLEGKIAKVRQCPQSGNLQALQLESGEQVAGDFFLDCTGFRALLIEQTLHAGFDDWTHYLPCDSAIAVQTENIGAPLPYTRAIAHHSGWQWRIPLQSRTGNGLVFCSSYMTDDDAIKLLLENIKGAPINAPRVIKFRTGSRRAHWKKNCVALGLASGFLEPLESTSIHLIQRSIIRLLQMFPSQGLIEADMLEFNRQTMEEMTNIRDFLVLHYRATARTDSPFWRHCAAMDIPDSLARRISLFRESGAVYKYSQDLFGESSWVQVMMGQGIVPARYHPIVDMLDIKELGDMLDKLRAKARHEAGRFPPHQDFINHYCKAAP

SEQ ID NO: 84075 - protein, 514 aa, unidentified
  source 1..514: note = Burkholderiales bacterium
  REGION 1..514: note = tr|A0A257CM19|A0A257CM19_9BURK Tryptophan halogenase; OS = Burkholderiales bacterium PBB6 OX=2015568; GN = CFE46_05665 PE=4 SV=1
MSPKALRRVVIVGGGTAGWMTAAPLAQLLCGPTGAPGCEVVLVESDQIGTIGVGEATLPTLRQFNQALGVDEAHFLSHTKATFKLGIEFKDWGRLGHRFFHGFGDFGPPIEGRSAYIQWLRLQRAGGMPPLESWSVASVMARQHRFVPPSGDRPSPSNAYGHAYHFDAGLYAAYLRDVATRHGAQRMEGTIVDVEVDGGTGFVQAVRLADGRRVEGDLFIDCSGLRALLIEGVMKAGFDDWSAMLPCNSAQAVPSERSGPLLPFTVSAAKSAGWTWRIPLQHRTGNGHVYSSGFTSDDAAAAALLDGLDSAAIGEPRTIRFTTGMRRKSWVRNVVAIGLSAGFLEPLESTSIHLILDAVGRLIHLLPDRDCQPALAAEFNRKTTIQFEAVRDFIILHYKLTQRTDTEFWRYCAAMPVPPALAEQIELFRATGRVSVRDPDGFLEPSWLSIYEGHGLRPTSFDPLAHRVPEAPLRQHFARLQQAIGQMVTSMPQHADTVAHWAAAGAARGHKVGG

SEQ ID NO: 84076 - protein, 506 aa, Caulobacter sp.
  REGION 1..506: note = tr|A0A0Q6U1C5|A0A0Q6U1C5_9CAUL Tryptophan halogenase; OS = Caulobacter sp. Root342 OX=1736519 GN=ASC62_08250 PE=4; SV = 1
MQDNRIRKLVIVGGGTAGWMAAAALRRHFQGGPLEITLVESSEIGTIGVGEATIPTIRGFYQRLGLSDIEVMRATGATCKLGIRFNGWAGEGQSFIHPFGLFGQDLRGIPFHHYWRKLAQAGEPTDIADYSLGASLAAAGKFMAPPRNPASSLSIFDWALHFDASLFAQLMRRVAEDNGVRRIDAKVTKVNLRPEDGFVASLDLHTGETLEGDLFIDCSGFRGLLIEEALRTGYESWSDVLFCDRAYAVQSEGVGDPMPYTDVTAQSAGWRWRIPLQHRYGNGYVYSSRHVSDEDALAELKAAVPDPPLHEPRQIRFNPGRRKQAWNKNVIALGLASGFLEPLESTSIALIETGVEKIKALFPDKDFAPELVDEFNDWSKREMERVRDFIILHYWANKRGDTAFWRDCNTITLPDTLQRKVELFRQRGHFVRYRWEMFQPASWMAIYAGFGLLPEMVDPALDGIDPKTLSAPLAEMRKAVREVVAAAPPHGAFLEEYCRPVPIAAQ

SEQ ID NO: 84077 - protein, 515 aa, unidentified
  source 1..515: note = Burkholderiales bacterium
  REGION 1..515: note = tr|A0A1F4HIM2|A0A1F4HIM2_9BURK Tryptophan halogenase; OS = Burkholderiales bacterium RIFCSPHIGHO2_12_FULL_69_20; OX = 1797561 GN=A3E25_09025 PE=4 SV=1
MGDAVRRVVIIGGGSAGWLVAAVLAVDHAAATAEGLQITLLEAPGIPPIGVGEGTWPSMRDTLRKIGLAEADLVRDCDAAFKQGSRFDGWVSGAAGDHYSHPFALPQGYTEADLVGTWLARHADQPFAEVVSFQPRLCAHGLAPKQVTTPEYAAVANYGYHFDAGKFGLLLRRHCTEQLGVRHVCDEMIGVQSHANGDIASLQTRAHGALAADLFIDCTGLPSLLLGQHYGVPLVSQRQVLFNDRALALQVPYPQPDSPIASQTLATAQGNGWIWDIGLPTRRGVGHVYSSAHCSDDAAEQALRRHIRASGGPDDLPAARQLRFEPGYRAEFWHRNCVAIGLSSGFIEPLEASALALIELSVHALSAQMPATRAAMDIVARQFNEAFSYRWERVIDFLKLHYALSQRRDTDYWRDHTAAASMPERLRELLTLWRHRPPSHYDLACIEEVFPSASYQYILYGMGFRPEAGSRRREDPALAERCFQEAAALAARMRPALPGNRALITHIQRHGLPKI

SEQ ID NO: 84078 - protein, 504 aa, Microbulbifer agarilyticus
  REGION 1..504: note = tr|A0A1Q2M4N1|A0A1Q2M4N1_9GAMM Uncharacterized protein OS=Microbulbifer agarilyticus OX=260552; GN = Mag101_05870 PE=4 SV=1
MNRKKLIVVGGGTAGWMAALMLQKAVGDSWTIELIESSKRGIIGVGEGSTPALKSFFEDLEIPEDEWMQACSATYKSGITFDRWSEKSGFTSYFHPFYSHFDRDHAKALIHNSHLRRSGKDVHAHPDVFSYNHYLAKNRLSPVVPHHFPFEVQYGYHFDAGLLAQYLKKVALIRGVHHRDALITEVDLSTSGDIAAVIDEKGERHEGEWFIDCSGFAALLIGDTLKTPFTSYADTLWNDSAVTLAMPPDAEPPCETVSTALKNGWAWRIPLQSRVGYGYVYSSRYCTREEAEEELRAHAGADASVDARHLSMNIGRREEHWVKNCVAVGLSQGFIEPLEATSLALTQQTITRFIHAFREGNTGEEFREIFNTSVNKSYDDVRDYISVHFLTNSRTDSQYWVDSREKPGPASKALSAVFSCWFDNGDLPGLLKHLKIDGAYSNFSWHYILCGMGVFPAAETLTSPSPKDLSGIDFEQIRDFFARCTLNHQSHIEALKFSGLKRLL

SEQ ID NO: 84079 - protein, 121 aa, unidentified
  source 1..121: note = Sphingobacteriales bacterium
  REGION 1..121: note = tr|A0A4Q3B6W5|A0A4Q3B6W5_9SPHI Tryptophan 7-halogenase (Fragment) OS=Sphingobacteriales bacterium; OX = 2044944 GN=EOP53_20175 PE=4 SV=1
MTNKSSKPKKILIVGGGTAGWMAANLIASRWHDIEICLLESTEIGIIGVGEGSTPHLKFFFDAIGISEPEWMPRCNATYKNGISFVNWSSVPGFGSYFHPFPAQTDDFTVPIFFNNIKARI

SEQ ID NO: 84080 - protein, 503 aa, Caulobacter sp.
  REGION 1..503: note = tr|A0A0Q6U570|A0A0Q6U570_9CAUL Tryptophan halogenase; OS = Caulobacter sp. Root342 OX=1736519 GN=ASC62_19635 PE=4; SV = 1
MIENHRLRRVVIVGGGTAGWMTAAALGRFLKDGYTQVTLVESEAIGTVGVGESTIPQINMFNRMLGLDENEFVKKTKATFKLGIDFVDWQRIGHSYHHPFGPYGVDMEGVSFHAYWLKARAMGLDDDLGAYSLQTVGSRQSKFMRPNGQANSPLGQIAYAFQFDAGLYARFLREYAEARGVVRQEGRIATVQQDGETGFVTSVSLENGQVVEGDLFIDCSGFRGLLIEQTLKAGYEDWSQWLLNDRAVAMPCALAGSMAPVTRATARPYGWQWRIPLQHRLGNGYAYCSRFISDDEATADLLGNLDGEPLAEPNLLRFTAGRRKTSWDKNVVAIGLSAGFMEPLESQSIHLIQVGISRLLAHFPDRHFRQADTDRYNRTMTFEYEKIRDFLILHFKATERNDTPYWDYLREMPIPDYLTDKIELFRGSGRIFRENEELFNDTSWFAVMIGQGITPESYDPMVDSMDEALFRSRMAEIKAVIARSAEVMPDHMAFIAEHCAAEG

SEQ ID NO: 84081 - protein, 503 aa, Massilia sp.
  REGION 1..503: note = tr|A0A0Q7XV12|A0A0Q7XV12_9BURK Tryptophan halogenase; OS = Massilia sp. Root1485 OX=1736472 GN=ASD92_13810 PE=4; SV = 1
MENNNQQGRGRPIRRVVIAGGGTAGWMAAAALARTLGKVVDIKVVESDDIGAVGVGEATIPSLVHFHRLLDIGEQEFMAATQATFKLGISFESWRARGEDYIHSFGMTGTDHWTAGFQHFWLKGRDRGLASDYGDYCLELVASQEKRFGHLPNQGINYAYHLDATRYARYLRRFSEHFGAERIEAKIAKVDTDPATGHITALVLDAGTRVEADLFIDCTGFRSLLLGQTMGVEYEDWSQWLFNDCAIAVQTESTGPAVPLTRSMAHDWGWQWRIPLQHRTGNGVVFSSRYTDEATARATLLGNIEGKVLTEPRVIRFTPGQRKKVWVGNCIGLGLASGFLEPIESTSIHLIQRGIVRLLQTFPTYGIQQADVDEFNVQTEEDIRTIRDFIILHYKVTNRRDTPYWHDAASMPVPDSLQHRIDLFRGGARVFREGNELFAENSWVQVMVGQGLTPERWHPSADLMGDDELRGFLDGIRNGVRRTVSQLPPHQQYVERYCPAGKP

SEQ ID NO: 84082 - protein, 500 aa, unidentified
  source 1..500: note = Sphingomonas carotinifaciens
  REGION 1..500: note = tr|A0A1G7QPA5|A0A1G7QPA5_9SPHN Tryptophan halogenase; OS = Sphingomonas carotinifaciens OX=1166323; GN = SAMN05216557_108164 PE=4 SV=1
MTGSSTRSVVIVGGGTAGWMAAAALARFLPPDHRIRLVESDAIGTIGVGEATIPALRIFNHMLGIDEDAFLRATQGTFKLGIEFAGWSGDGSRYTHAFGTIGRALGLVPFHHYWLRAGRPGSLWDHSAAAQAAAAGRFARDHGRPDLPSGIAWAFHFDAALYAAFLRRHAEAAGVERIEGRITGVERDGETGHIAAVHLEGDRRVAGDLFVDCSGFRSLLLGETLGTAFEDWSHHLPCDRAIAVPTARLDPLSPYTRATAHPAGWQWRIPLQHRTGNGIVYASAHLSDDEATARLLAGCNGAPLAEPRPLRFTTGRRRAAWVGNCVALGLAAGFMEPLESTSIHLVQSGIARLLEYWPGKTLADADIAAFNRRTEAEWLAIRDLLILHYHANARPEPFWQARRDAPPPDSLAERLALFRANGRILREGDELFTEVGWLQVLIGQGVQPLGHHALADAIPPADLADFLALARTHAAAVAARMPAHDAFIAAHCAAPVSKAA

SEQ ID NO: 84083 - protein, 505 aa, Limnohabitans sp.
  REGION 1..505: note = tr|A0A315D1C0|A0A315D1C0_9BURK Tryptophan halogenase; OS = Limnohabitans sp. Bal53 OX=1977910 GN=B9Z50_16725 PE=4; SV = 1
MHNPLIQTLVIVGGGTAGWMTAAALSTVLRGRYKIRLVESEDIGIVGVGEATIPMIQRFNTIVGIDETEFIQATQGSFKLGIEFVNWGQQGDRYMHGFGPIGQDLWTVRFDQYWQKMKALGKAHELGAYSITRMAAQANKFMPPRHDLANSPLNDIAYAYHFDASLYAQYLRKISESRGVLRTEGKITQVTQREHDGHITAVVLESGEKIEGELFIDCSGFRGLLIEQTLKTGYEDWTHWLPCDKAMAVPCTSAASLTPYTRSTAHQAGWQWRIPLQHRTGNGHVFCSQYISEDEAASVLLANLDSKALADPRLIRFTTGMRKQAWNKNVVAIGLSSGFLEPLESTSIHLIQSTISQLIEFFPDQGFNPTDIAEFNRQSRFHFERIRDFIILHYHLNQRTDSEFWKACAHMAIPETLQHKIDLFKATGRVLRTDGELFTEAGWLQVMAGQNLHPQQHHPLVDLQSEDNIHEYLESVREVIAKCVDVMPDHADFIAQHCAAPKITM

SEQ ID NO: 84084 - protein, 506 aa, Brevundimonas sp.
  REGION 1..506: note = tr|A0A521MF26|A0A521MF26_9CAUL Tryptophan 7-halogenase OS=Brevundimonas sp. OX=1871086; GN = EPO54_09815 PE=4 SV=1
MDDPRIRSVVIVGGGTAGWMTAAALVQHFRTAPLKITVVESSDIGTIGVGEATIPTIRRFYGQLGLRDDDVMRATQATCKLGIRFLDWSGPGSDFIHPFGLYGQDVKGIGFHHYWLKQRRAGDAAPLAAYSLGAALAAGGKFTLPSPHPPSQLSVFDWALHLDAGLFAQHLRAYAEAGGCARIDARIRSVELRPEDGFVRALTLDDGREVEGDLFVDCSGFKGLVIGEALGVGFEDWGRWLPCDAAYAVQSENRPGDAPAPFTRVTARSAGWQWGIPLRHRAGNGLVFSSAHLSDDQALAELMPHLLGDPLTEPRRIPFRPGRRSQAWAKNCVAIGLSSGFLEPLESTSIALIETGIERLKALFPDRRFAQPILDEFNDQTAREMERVRDFIILHYKLNRRTDTDFWRDCREMPVPETLERKIALWTARGQFVRYRWEMFHPASWLAIYDGFGLYPDHHDPAVDAMDPAYLARSLAEMRANIADLVARTPEHAQFLAGLDPAASAA

SEQ ID NO: 84085 - protein, 423 aa, Caulobacter sp.
  REGION 1..423: note = tr|A0A258KGH2|A0A258KGH2_9CAUL Tryptophan halogenase (Fragment) OS=Caulobacter sp. 35-67-4 OX=1970331; GN = B7Y78_11510 PE=4 SV=1
EFVDWHTVGQSYLHAFGPVGRPLGLAAFHHYWNRRRLQGHDESLWDYSLNALAARAGRFDRLQTAGGGYLEGLAHAFHFDAALYAQYLRRYAEAQGVRRVEGKIVGVSQHPETGFVTGLSLQDGRNVGGEFFIDCSGFRGLLIEETLKTGYDDWRSWLPMDSAIAVPCASVTPLTPFTRATAREAGWQWRIPLQHRTGNGHVFCSDYIDAAQATDVLMRNLDGAPLADPRQLTFTTGRRKRFWNRNVVAMGLASGFMEPLESTSIHLVQSALSRLIALFPNADFNTVEIDEYNRQTALEYEYIRDFLVLHYKATTREDTPFWRACKAMEIPDTLKARIELFAQSGRIFSKEDDLFKEASWVQVLIGQGVLPGAAHPLTGVVTDQQLDEYMANIRQIMGRAVEALPDHADFIARQCAAASRPAA

SEQ ID NO: 84086 - protein, 507 aa, Caulobacter vibrioides
  REGION 1..507: note = tr|R0CWF6|R0CWF6_CAUVI Uncharacterized protein; OS = Caulobacter vibrioides OR37 OX=1292034 GN=OR37_03478; PE = 4 SV=1
MGEGRIQKLVIVGGGTAGWMAAAALRRHFQGGPLEITLVESAEIGAIGVGEATIPTIRGFYRSLGLSDAEVMRATQATCKLGIRFNGWLREGESFIHPFGHFGQDLNGVPFHHYWRKLAEGGEPTDIADYSLGASLARAGKFMPPPRDPASTASVYDWALHFDASLFAQLMRRVAEDNGVRRIDARIVKVNLRSDDGRVASLDLSNGQTLEGDLFIDCSGFRGLLIEEALGAGYEDWSDLLFCDRAWAVQSEGVGEPMPYTDVTAHAAGWRWRIPLRHRHGNGYVYASRYISDEDALAELKAAVPDALLHEPRRITFTPGRRKKVWNKNVIALGLASGFLEPLESTSIALIETGIEKIKALFPDRDLAPELADEFNDWSRREMERVRDFIILHYWANRRGDTAFWRDCNAVALPDDLKRKVELFVQRGHFVRYRWEMFAPTSWMAIYAGFELLPQGIDPALDGVDAKALGPPLARMRQAVREAVASAPTHGAFLDQFSRPAAMTAAR

SEQ ID NO: 84087 - protein, 498 aa, unidentified
  source 1..498: note = Chromatiales bacterium
  REGION 1..498: note = tr|A0A1F8UJP9|A0A1F8UJP9_9GAMM Tryptophan halogenase; OS = Chromatiales bacterium RIFOXYA1_FULL_46_5 OX=1797676; GN = A2203_04680 PE=4 SV=1
MTPIKKVVILGGGTAGWLSAALLKKVLGGVVDIELVESDAIGTVGVGEATIPPIRLLNQVLGINEAQFLRETKATIKLAIKFENWRTQGDSYYHSFGAPGRSLTFCHFHHLWLRARQQFGDMTPIWQYDLNYLCAEAGKFAPITAKDPILELPYAYHFDAGLYAAFLRKFSEPMGVVRTEGMVDQVTQHHNGHIKSLLLKDGREINGDFFIDCSGFVSLLLQRKLGVGYDDWSHFLPCDRAWAVPTERFEQTVPYTRAIAHEAGWQWRIPLQHRNGNGMVFSSAHYTEQQALDVLMGNLQSTPLADPKLIKFKTGRARKQWHHNVLAVGLSSGFLEPLESTSIHLVQSGIVRLLKMFPHNGIEPATVAEYNKQSEAEFVYIRDFLLLHYHVTERTDSQFWRDMRQLQIPDSLKHKIELFQADGSIFREQHDLFHDGSWLQVMLGQGLMPRDYHPLADSFSDEQLKDMLKSIKAIKQEPLAKLFSHDEFLRRAVGASAN

SEQ ID NO: 84088 - protein, 82 aa, Cellvibrio japonicus
  REGION 1..82: note = tr|B3PK72|B3PK72_CELJU Tryptophan halogenase; OS = Cellvibrio japonicus (strain Ueda107) OX=498211; GN = CJA_0734 PE=4 SV=1
MIDAIFKETGKIFREQDDLFHDASWLQVMLGQGIMPDDYHPIANSISDSQLQEMLVNMKKIKENLSATMPSHDQFIENLCKV

SEQ ID NO: 84089 - protein, 410 aa, Caulobacter sp.
  REGION 1..410: note = tr|A0A258KFR8|A0A258KFR8_9CAUL Tryptophan halogenase (Fragment) OS=Caulobacter sp. 35-67-4 OX=1970331; GN = B7Y78_11100 PE=4 SV=1
MNTNPVRKVLIVGGGTAGWMTAAALSKVLKGVEITLIESDQIATVGVGEATIPPINTFNQILGIDEADFMRSTKASFKLAIEFVDWTAPGSRYLHPFGGFGLDIEAIKFHQFWLKAQSQGSTQPLDDFNLSATAAKLGKFMLPSKDPGQVLSSLKYAFHFDAGLYARYLRDYAEKRGVIRREGKVVDVCLRGEDGFIASVTTDGGEVIEADLFIDCSGFRGLLIEQALDTGFEDWGHWLPNDRAVAMPCDTGGDGLTPYTRATADKAGWRWRIPLQHRTGNGYVYSSQHLSDEDAVARLRATLDGPARAEPNFIKFRAGRRKQIWVKNCVAIGLASGFLEPLESTSIHMIQAGITKLLALFPDKGFDPIEIAEYNRLTILQTELIRDFIILHFKANERPEPYWQRAREMA

SEQ ID NO: 84090 - protein, 524 aa, unidentified
  source 1..524: note = Empedobacter haloabium
  REGION 1..524: note = tr|A0A5C7CNX0|A0A5C7CNX0_9FLAO Tryptophan 7-halogenase OS=Empedobacter haloabium OX=592317; GN = E7V67_05060 PE=4 SV=1
MQPIRNILIVGGGTAGWLAAGFLARTLGTQGGGTAITLVESKDIGIIGVGEGTFPSIRGTLSVLGIDEGRFIRECSATFKQGVRFNHWVRAPGARGPDHYFHPFSQPSQRPGGPELLPYWLQGAAGADVPFAAAVTMQKHVADMSHAPKRSGDADFVGPLNYAYHFDAGAFATLLASHAQSLGVRRVEATVDQVKLDDTGAIAAVVTREAGELAADLYVDCTGFRARLIGEALGSPFRNINDTLFVDRALAMQVPYERPDSPIPSYTISTAHEAGWTWDIGLHERRGIGYVYSSRHTSDDRADQLLRQYIGPASDGREPRLLKLNVGYRETQWVKNCVAIGLSGGFLEPLESSGIGLIEAATYLVSYLFPYDGNLAPAAKLFNAQMKARYERIVDFVKLHYCLTQRTDNAFWIENAHASTIPESLREQLAMWRARPPHRLDFVTDIEMYPPSSWQYVLYGMEFPTRQMAHPAALPDMTAARREFQTIAQLSHHALADLPTHRALVEHYRRGGTMAAAPARRLYV

SEQ ID NO: 84091 - protein, 424 aa, unidentified
  source 1..424: note = Sphingomonas carotinifaciens
  REGION 1..424: note = tr|A0A1G7GEM9|A0A1G7GEM9_9SPHN Tryptophan halogenase; OS = Sphingomonas carotinifaciens OX=1166323; GN = SAMN05216557_101847 PE=4 SV=1
MNRQNRVRSVTILGGGPVAGIAALGFAQALPGARIDWIMRPVDPAALTDRLPATLPSSAPVLEQLELDEADLVAYAGATHRLGERFLGWGPADYITSEGQPMPLGVAGALHHHHALAPRHPLHRYRPAAVLADAGRFVHPTAPDGPLGFHDYGLRFDPDAITPFLADRATRAGVRIASGDGVDADLIVDATGPASAPDWIDWTDALPATTLTLAETTGTAPDPCDTYRATDTGWQATWPLAQRTLTGTATLGTGPIRPGRRAEPWQGNRLALGDAAAVMGPLCWTGFALALANLSLALSLLPGRDMPPLLLAEYNRRASLRADRLADLLSAHHHLAGHAPPRPGLAHTLAQFARRGFLPHFEEESVGPERWLAVLAATIRPARPDPIALSAPAPAPLDHLHATLAALPARLPPYPAYLARMRHA

SEQ ID NO: 84092 - protein, 502 aa, unidentified
  source 1..502: note = Burkholderiales bacterium
  REGION 1..502: note = tr|A0A1F4HJ91|A0A1F4HJ91_9BURK Tryptophan halogenase; OS = Burkholderiales bacterium RIFCSPHIGHO2_12_FULL_69_20; OX = 1797561 GN=A3E25_03050 PE=4 SV=1
MPDPNRSLRNIVVVGGGSAGWMAAAALSRAVHRDCTITLIESDEIGTVGVGEATIPPIQTFNQMLGLDEAEFLRRTQGTFKLGIEFVDWARQGHRYFHPFGPHGHQFDLSPQHQYWLRGRHQPGMPGLDEHSLAWVAASRGRFDKPSRDPRTVQSTYDYAYHFDAGLYARFLREVSEARGVQRLEGKITEVLLRADDGFVDLLRLADGRTVAGDLFIDCSGFRGLLIEEALHTGYEDWTHWLPCDRAMAVPCAPAGPLTPYTRSTAREAGWQWRIPLQHRTGNGYVFCSQYLSEDEAASQLLARLDGQALADPRPLRFTTGRRKQFWNKNVVALGLASGFMEPLESTSLHLVQSGISRLLALFPDRDFDPLVIAEFNRIAINEFERIRDFIILHYKLTTRDDSPLWRYCAAMRIPDTLQYKIDHFKRYGRLVTEGMELFGPASWLAVQVGQQNWPVRHDPIIDLRNVDGDAILARMRQAMVQAAEAMPTHEAFIRGYCGARA

SEQ ID NO: 84093 - protein, 501 aa, unidentified
  source 1..501: note = Sphingomonas carotinifaciens
  REGION 1..501: note = tr|A0A1G7GES2|A0A1G7GES2_9SPHN Tryptophan halogenase; OS = Sphingomonas carotinifaciens OX=1166323; GN = SAMN05216557_101848 PE=4 SV=1
MTQPISHVVIVGGGTAGWMAAAAAARFLDDGQRRITLVESDAIGTVGVGEATIPPIIGFNRLLGLDEGRFLSATGGSYKLGIEFVGWDTGEDRYFHPFGHHGRDFDGLNFHQAWLKLRDRDGIGPIDDYAMAAAAAHAGTFAPPVADPRSPLSGLAYAYHFDAGRYAAFLRAQAEAGGVTRIEGRIERVERDPASGHVAAVVLGDGRRVAGDLFIDCSGFRSLLLGQAMGVPFVDWSHWLPCDRALAVPTRRTDPVLPYTRATARPAGWQWRIPLQHRTGNGHVYASAFMDDAEAERLLLANLDAEPTDTPRRLSFRAGRYQRMWEGNVVALGLAGGFLEPLESTSIHLIQNGISKLFALFPDKRFTAVERDRYNRFMTDAYDGIRDFIILHYHATRRDDTPFWRHVRTMTIPDTLAEKIALFREKGRIFRYDDELFAVPSWVAVMIGQNIMPDGYDPIVDALDEDRVADALRQMRRANATLARTLPPHAAVLARVGEAAG

SEQ ID NO: 84094 - protein, 505 aa, Caulobacter sp.
  REGION 1..505: note = tr|A0A0Q6TR24|A0A0Q6TR24_9CAUL Tryptophan halogenase; OS = Caulobacter sp. Root342 OX=1736519 GN=ASC62_18035 PE=4; SV = 1
MADQPYRKFVVVGGGTAGWIAAATLIQALKGKVGEVELIESDEIGTVGVGEATIPPIQFLNGLLGIDEFDFIKKTQATFKLGIQFRDWGKLGDQYFHPFGPYGEPFEGVGFHHYWLRLRAQGEGGSLDDYAMATVTARMGKFAVPPKELPPGVPGLGYAYHFDAGLYAKYLRAYAEARGVKRTEGKIAKVELRPEDGFVSGLTLADGRRVEGDFFVDCSGFRGLLIEQALEAGFEDWSHWLPCDRALAVPCESVSPMTPYTRATARAGGWQWRIPLQHRIGNGHVYCSSFISDDEAAATLLANLDGKPQADPRPLRFTAGRRKKSWSKNVVALGLAGGFMEPLESTSIHLVQTGAMRLLSLLPFGGYDPAAELEYNRLTQIEYEQIRDFIILHYHATERTDSPLWNHCRTMAIPDSLAHKIELFRNRAKIARFDDQLFAEPSWLAVFLGQGIAPRDYDHLADVPDYAVVASRLRGVGQKIAGIASGLPSHDAFIAATCKADPLAS

SEQ ID NO: 84095 - protein, 505 aa, Massilia sp.
  REGION 1..505: note = tr|A0A0Q7XNM0|A0A0Q7XNM0_9BURK Tryptophan halogenase; OS = Massilia sp. Root1485 OX=1736472 GN=ASD92_20480 PE=4; SV = 1
MSDKAIRKIVIVGGGTAGWMTAAPLALKLGASCEIVLVESPEIGTVGVGESTLPTIRYFNHALGIDGTDFVRRTKATFKLGIDFCDWGHLGNRFFHGFSDFGPTIENRPAFMYWLRLARDNPDMPSYEEWSISTAMAHENKFVPPHGDQPGPTNAYSYGFQFDAGLYALYLREYAMARGVQRVEGTVGHVEQHPETGFITALQLKDGRRIDGDLFVDCTGFRGLLIEGVYKSGYEDWSAMLPCNSAQAVPSALADQLTPYTRATAKPAGWQWRIPLQHRNGNGHVYCNAFMSDDEAGRVLLDGLDTEALDTPRQLRFTTGRRRKSWVKNCVAVGLSSGFLEPLESTSINIIELAVGWLIQYFPDRDCNQELADEFNRLVAQRYEFVRDFIVLHYKLTNRTDSEFWRYCADMPIPDTLQHQIDLFRSAGRITIYDREGFQADSYAAILLGHGIRPERTDPLIDRMDQARLLDHFRKVHATIRQVVGAMPGHAALVAQITGEPIRKS

SEQ ID NO: 84096 - protein, 498 aa, Hyphomonas sp.
  REGION 1..498: note = tr|A0A0F2RDX0|A0A0F2RDX0_9RHOB Tryptophan halogenase; OS = Hyphomonas sp. BRH_c22 OX=1629710 GN=VR74_14195 PE=4; SV = 1
MDVSNPGMKRVVIAGGGTAGWMTAAAMGKVLSKVADITLIESDQIGTVGVGEATIPTLVTFNRLLGIDEADFMKRVSATFKLGIAFENWTDLEHRYIHSFGITGKDHWTAGFQHFWKRGRDLGVASEFGDYCLELVAAEEGRFAHLPKLGLNYAYHVDSSAYALFLREMAVGFGVKRIEGRIDRVQRSESGDLSCLSLDNGQEINGDLFIDCSGFRALLIGDALGVGYDDWSHWLPCDRAIAVQTESVGLPRPYTRSIAHEAGWRWQIPLQHRTGNGIVFASRYMEEEAARLQLLESVEGKLLSEPRLIKFRTGTRRAHWHRNCVSIGLSSGFIEPLESTSIHLIQRSIMRLLQMFPRGDISSADVAEFNKQTFYELDHIRDFIILHYHLTNRNDTDFWNHVRTMDIPDTLRHRMQLFRDTGRTFRANDELFAENSWTQVMLGQGILPESHHPVVDMMTPDEVRLFLNHITENVRRTVADLPVHDDYIKKYCNASGSA

SEQ ID NO: 84097 - protein, 508 aa, Cellvibrio japonicus
  REGION 1..508: note = tr|B3PKX2|B3PKX2_CELJU Tryptophan halogenase; OS = Cellvibrio japonicus (strain Ueda107) OX=498211; GN = CJA_2485 PE=4 SV=1
MSGVPLMNGQSNPPKILIVGGGTAGWMAANLMAHCWVASGVEVSLLESPDIGIIGVGEGSTPQLKRFFGYLGIAEQEWMPACHATYKNGIRFKGWSSKPGYGEYFHPFDSDIDLHTQPAFFYNCDVRRHGVDVYAHPDRFYLSAHLAEHHKGPLPAPNFPFNIGYGYHFDSGLLGQFLRNRAVGLGVNHIQAKVQSVQRAGSGELVSVTTDQGHIITADFFVDCTGFNALLIQKTLGVPFKKFADNLFNDAAVAMPSPQGAVIGSQTLSTAMRYGWAWEIPLTHRIGNGYVYSSAFCSADEAETELRRKLGLLDADVQARHLKMNVGRLEQHWSYNCLAVGLSQGFIEPLEATALHIVQETIQGFIDAWELGGFTPANRDAFNQRINARFEGVRDYIVAHYVCNSRSDTDYWLANRSHQAISDNLRAVLQTWVNAGNVVEQITRREMDKYYLPMSWYTLLSGYGLFPDRQALQPGTAKAHRYRLDDIDAFIAGCSLNFQEQAALLQRG

SEQ ID NO: 84098 - protein, 520 aa, Hyphomonas sp.
  REGION 1..520: note = tr|A0A0F2RBW0|A0A0F2RBW0_9RHOB Uncharacterized protein OS=Hyphomonas sp. BRH_c22 OX=1629710 GN=VR74_14185; PE = 4 SV=1
MSELKHVVIIGGGTAGWITAGILAADHRAFADDGLEITLVESPNIPSIGVGEGTWPTLRDTLQRIGISEAEFLSVCSASFKQGSRFDGWVDGGANDTYYHPFDAPPGEDDFDPVSLWRASGDTPFADAVSSQAALCRNGRAPKQAQTPPYAAVANYAYHLDASALAALLTEHCVKRLGVKLIRDDVVDTALSADGSVDFVETREHGRIGGQLFVDCTGQQALLIEKVMGAQATDVSDVLFNDRAWATRVPYTDPQAEIASQTNSTAMPAGWVWDIALQNRRGVGYVFSSRHISEDAAQEQFLAYLEGASAGAKIDVDGLRLLKFRSGYRETPWVRNVVAIGMSQGFVEPLEASAIVMVELSAAMLSDTLPPRIAQMASTAARFNSRFAYRWARIVDFLKLHYVLSKRMEPFWSDHRDEVTWPKRLRELMQRWKDMPPSREDFVQSQEIFPAASYAYVLYGMGFPVPDRPHLRRKDSPERAQRRLSEIAERTEKMLGGLPSNRDLLNQVCGHKLVSEIGLR

SEQ ID NO: 84099 - protein, 491 aa, unidentified
  source 1..491: note = Sphingomonas carotinifaciens
  REGION 1..491: note = tr|A0A1G7P6M1|A0A1G7P6M1_9SPHN Tryptophan halogenase; OS = Sphingomonas carotinifaciens OX=1166323; GN = SAMN05216557_10682 PE=4 SV=1
MSERRRVVIAGGGTSGWLTAAALGQQLGSVLDITLIESDEIGTIGVGESTIPTARAFHRLIGIDEQRFMAETGASFKLGIAFEDWGRVGDRYFHAFGETGRGTWMGAFHQFWLQAREQGFGGDLGAYCLELQTAEAGRFGAGGQGPELSYAYHLDAGLYARHLRGVAEGAGVRRVEGLIERVERDGDIQALVLRSGERIEGDLFIDCTGFRALLIGQAMGAAFVDWSEWLPTDSAVVTQTRAVGPAVPYTRAIAHGEGWRWQIPLQHRVGNGLVYDRAHLSDDEARARLLSAVEGEVLIEPRTIRFKAGRRTQAWRGNCISIGLAGGFVEPLESTAIHLVMIAVTRLLQMFPFDGDCTALAKRFNDQAAADLERIRDFIVLHYVLTERDDTAFWRRARTMAIPDTLRERIALFRDNAMAYQEGEELFRVDSWVQVMIGQGVVPRHHHRMGAIMGEARLRQVLDDMRAQVARQVATLPVHQAFLERYCPYPR

SEQ ID NO: 84100 - protein, 503 aa, Massilia timonae
  REGION 1..503: note = tr|A0A1S2N777|A0A1S2N777_9BURK Lycopene cyclase family protein OS=Massilia timonae OX=47229 GN=LO55_2297; PE = 4 SV=1
MENQAIKDIVIVGGGTAGWMTAAALSSMLNGRYHIRLVESDEIGIVGVGEATIPMIQRFNRVVGIDENEFMRETMGSFKLGIEFVNWGRIGERYMHGFGRMGQDLATVPFEQYWHKMRGLGKAAPLEEYSITRMAAKAGKFMPARQDVPNSPLRDIAYAYHFDASLYAKYLRKLSEARGVVRIEGKIARATRREPDGFVDAVELDNGQRIEGELFIDCSGFRGLLIEQALETGYEDWTGWLPADRALAVPCESVPAITPFTRATAHKSGWQWRIPLQHRTGNGHVYCSRFISDDEAAATLLANLDGRALAEPRLIKFQTGMRKQAWNRNVVAIGLSSGFLEPLESTSIHLIQSSIARLVELFPDRRFSDVDRDEFNRQSRFEYERVRDFIILHYHLNQRTDSAYWTECANMAIPETLRQKMDLYRSRGKVVRVDNELFSEVGWLQVFEGQNMPLDGYHPLADTQSEADIAEYMESVREVIRKCVDVMPSHDEYIAKHCAARTA

SEQ ID NO: 84101 - protein, 505 aa, Massilia sp.
  REGION 1..505: note = tr|A0A0Q7WK22|A0A0Q7WK22_9BURK Tryptophan halogenase; OS = Massilia sp. Root1485 OX=1736472 GN=ASD92_07700 PE=4; SV = 1
MQQNNPENIGRKPVRRVVIAGGGTAGWMAAAIISRILGKTLDITLVESDEIGTVGVGEATIPSLIQFHQLLELNEADVMRATQATFKLGISFENWRAPGEDYIHSFGLTGVDHWSAGFQHFWHKGRQRGLASDFGDYCLELRSAQLGRFAHLPNDVMNYAYHLDATLYARFLRKYSEGFGAKRVEGKIDQVMLDAASGHVTGLKLGNGALIEGDLFIDCTGFRSLLLGQTMGVEYDDWSQWLFNDTAIAVQTELMGEPVPMTRAIARGAGWQWRIPLQHRVGNGHVFSSKYMDGEEAMQILLDNLHGEPLTQPRMIKFKPGQRKQSWKGNVVAIGLSSGFLEPIESTSIHLIQRNLIRLMQMFPADGICRSDIDEFNTQVQREIAHIRDFIILHYKVTSRADTPYWEAARNMEVPASLQHRIDLFRETGRVFRTEGELFTESSWLQVMLGQGIMPEQHHQSADLMGDAELSQFLGSIRQKIERTVQQLPSHQAYVQRFCRAERPS

SEQ ID NO: 84102 - protein, 515 aa, Microbulbifer agarilyticus
  REGION 1..515: note = tr|A0A1Q2M2X0|A0A1Q2M2X0_9GAMM Tryptophan halogenase; OS = Microbulbifer agarilyticus OX=260552 GN=Mag101_05030; PE = 4 SV=1
MKKIIILGGGTAGWMAAAAMARFVLPRGIEVTLIESDQIGTVGVGEATLPHLRSFNELLGIDENVFVRETQATYKLGIEFANWARQGDSYIHPFGEYGRGLNGIPFHHLWLKARANDNAEALDNYSLPVIAALKNRFEFPSEDLRSILATYSYAFHIDAGLYARYLRKFACDLGVKRIEGKVDRVEHHADGNIAALHLENGQSLAGDFFVDCSGFRSLLIGQELGSPFIDWSHWLPCDSAIAVPSEAPAGELRPYTRAEAHTAGWRWQIPLQHRMGNGIVYAQRYMQDDEAQNLLMQGLPGAATNEPRQLRFQAGRRQESWRKNCLAVGLSSGFLEPLESTSIYLIQIAITKFIGLLPANHVASQRPQRNEFNRQMALEYERIRDFLILHYCATERDDSPFWRYCRDMELPGSLQNKMALYRQSGHIADYKNGLFLEPSWLAVYQGQRISPKQYSPRADTIESDELAALLKNYAALVRRATSDMPLHSDVVDRQCGPRPTRVPSTSMSLYRSVGK

SEQ ID NO: 84103 - protein, 433 aa, Caulobacter sp.
  REGION 1..433: note = tr|A0A258KGF3|A0A258KGF3_9CAUL Tryptophan halogenase; OS = Caulobacter sp. 35-67-4 OX=1970331 GN=B7Y78_09030 PE=4; SV = 1
MRKTQATYKLGIEFRDWGKKGESYIHPFGAFGQAIGGVAFHQHWLRARARGQADDIQAYSLPIVAARLNRFAPPSSDQRSLGSTFSYAYQFDAGLYAQYLRAYSEARGVTRTEGKIQDVALRGEDGFVEAVTLESGQRIEADLFIDCSGFRGLLIEQALKTGYEDWTQWLPCDRAAAVPCDSIEPPTPYTRATSDEAGWRWRIPLQHRVGNGYVYCSSYISDDEAARVLVSKLDGKAQADPRFLRFTTGRRKKQWNRNVVAIGLASGFLEPLESTSIHLIQVAITTLLELFPERGCAGADQDEYNRVMDLEFERIRDFLVLHYHATQRDDSPFWRDKAAAPIPDSLAYKMELFRDRGMVVKYRDGFFLEPSWLAVYLGQNILPRGYDPMADSIDPDEAARKLAELKAAVRRTAEAMPGHQAFIERFCGARGAA

SEQ ID NO: 84104 - protein, 513 aa, Caulobacter sp.
  REGION 1..513: note = tr|A0A0Q6U9A2|A0A0Q6U9A2_9CAUL Tryptophan halogenase; OS = Caulobacter sp. Root342 OX=1736519 GN=ASC62_13410 PE=4; SV = 1
MQPLKKILIAGGGSAGWMTAALCSRLFQGLYEIVLVESEEIGTVGVGEATIPAIKKFNELLGLDEDDFLRKTQGTFKLGIQFRNWWRKGESYLHGFGVIGQDLGWLRSHQYWLRMRELGRAPVFDNLAINNAMALQDKFMRARADMTESPIGHIAHAFHFDAGLYAKHLSTYAQARGVTRREGKIVDVTLRSEDGFVQSVTMDDGEVIAADFFVDCSGFRGLIIEQALKTGYEDWTHWLPCDRAIAVPSERSEHFTPYTRSTAHDAGWQWRIPLQHRTGNGHVYSSQYIDDDEAERVLLANLDGAQRANPLRLRFTTGKRKKIWNKNCVAVGLASGFMEPLESTSLHLIQSAVIRMVRLLPDAGFDQATIDEFNRQSDFEYERIRDFIILHYKATERDDTPFWRSCRDMEIPATLRRKMDLFAANGRVFREDDELFTEESWIQVFLGQGIIPRGYDPLVRVHSDEDIARYLANIETVISKCLNVMPSHAEFVARACQAPPLAASLAAAPVPTS

SEQ ID NO: 84105 - protein, 499 aa, Caulobacter sp.
  REGION 1..499: note = tr|A0A0Q6TXC8|A0A0Q6TXC8_9CAUL Tryptophan halogenase; OS = Caulobacter sp. Root342 OX=1736519 GN=ASC62_07725 PE=4; SV = 1
MDQQTIRKVVIAGGGTAGWMAAAALARQLGPLLDITLVESEDIGTVGVGESTIPTARTFNALLGIDEPEFMRATQATFKLGILFENWGEVGDRYIHSFGQVGKSTWMGGFHHFWMQAKAQGFGGELGDYCFELKAAEQNKFFTGEESPLNYAYHLDAGLYGRFLRGMAERDGVRRVEGKIASVRQRSTDGYVEALVMESGDVVEGDLFVDCTGFRGLLIEQTLKAGFEDWGQWLPTNSALAVQTRSTEPAVPYTRAIAHKAGWRWKIPLQHRVGNGLVYSNAHMSDDEAKDLLMGEIEGETLIEPRLIRYRTGRRRKTWDKNVVALGLASGFVEPLESTSIHLIMIGVTRLMQLFPFAGVSQAVVDRYNRQADDELEKIRDFIILHYKATERTDSPFWDQVREMDIPDSLAQRIELFRQSAQVYQAPGELFQVDSWLQVLLGQRVTPQAYHQMGRLMPPQQLKQALDDLKRNIAGAVTRLPQHQAFLDGYCAPPVSRSA

SEQ ID NO: 84106 - protein, 501 aa, Microbulbifer agarilyticus
  REGION 1..501: note = tr|A0A1Q2M2Y0|A0A1Q2M2Y0_9GAMM Tryptophan halogenase; OS = Microbulbifer agarilyticus OX=260552 GN=Mag101_05020; PE = 4 SV=1
MTTPSPVKRVVIVGGGTAGWMTAAALAKVTQGTDSKIQLIESESIGTVGVGEASIPSLITFNKMLGIDENQFMAETKGTFKLGIDFVGWGAEGDRYFHPFGTYGRGINSIDFQHWWLQSYNQSNSPDLEEYSLAAQSAFAGKFTRMQPMPDAPFDALTYAFQFDAGLYAQFLRKFSEDLGVERIEGVIEDSQKNPESGYIESVRLTSGERIHGDLFIDCSGFRSLLIRQALGTKFVDWSSWLPCNRAVAVACERSSAPEPFTRSTARSAGWQWRIPLQHRNGNGYVYCNDYISDDEATATLLENLDGVAEGNPRQLKFTTGHLESFWEKNCIAIGLSAGFLEPLESTSIHLIQSAIQKLIALYPSQNFEEDKRRIFNERTILEYQRIRDFLILHYRANRRPEPFWRALAAMEAPPHLARKLTSYQQAGNIFREDDELFSVPSWLAVMHGQGIRTESCHPLTSKMDASFVKERLQEIRDGIQYVVGAMPSHGEYLDRYCKVK

SEQ ID NO: 84107 - protein, 508 aa, Pseudomonas sp.
  REGION 1..508: note = tr|A0A1B8V2N0|A0A1B8V2N0_9PSED Uncharacterized protein OS=Pseudomonas sp. AU11447 OX=1843184; GN = A6723_011730 PE=4 SV=1
MLNLSNYRRVAVVGGGSAGWFAALELRKLFLDQVEVVLVESEALGIIGAGEGSLPNFNRALDRYEIDRAEFMRETRSTYKLGLTLEGWRTGKKDDIFFHPFSFHSDGVDLNAWIEPNGSYPLASILLNQDLQLHHFPDAWRLYRDGASQQQAEAYLQEQLKFYAVPPMAFHFDARKLAEYLREVALKRGVKRVNARVESVRLNERRHVTHLILENGELEVDFVIDASGLHRLIIDKALHSPWESYSDHLLLNQALPFFIPAQGAHPSLVTRAIAMKNGWMWCIPTQDRLGVGYVYSNQHTDKEGALHEAQAYWGTEIEPVNHFAFSAGHFKEVWIGNVMAVGLSSGFVEPLEATSIGQTLVQLARFNQVVSACDGLIPQQLIDQFNRDITRHWDGIRDFLFLHYDTPRQDTEFWKAASSATPPSTYAELKRTFALRPPRDVDLEPYRGGTFSLFGPTSWMSVAAPLGVLTRKATAADLVPLSKEQRWNIGEFLAKVEPRMTAEAAMST

SEQ ID NO: 84108 - protein, 514 aa, Sphingobium chungbukense
  REGION 1..514: note = tr|A0A0M3ARV2|A0A0M3ARV2_9SPHN Tryptophan halogenase; OS = Sphingobium chungbukense OX=56193 GN=YP76_13610 PE=4; SV = 1
MVHPVRNIVIVGGGTAGWLTAGVIAARHGSRLGNDFTVTLVESPNTPIIGVGEGTWPTLRTTLSRMGISETDLFRECDAAFKQGARFARWTTGERDDGYYHPLMLPQNFGQVNLAPHWLAGAGDESFCDSVCSQGRICDDGLAPKTIATAEYDALANYAYHLDAGKFAPFLQRHCCEKLGVRHVLADVEQVLMKEDGDIRAIRTTQAGEIEGDLFVDCTGFKALLIEGAMKVPFKDRNDILFCDTALAMQVPYERPNSPMASHTISTAQSAGWIWDIGLPTRRGIGHVYSSNHISDEEAERELRAYIGPLAEGLSARKIAIRSGHRETFWKGNCVAVGLAAGFLEPLEASAIVLIELSAKIIAEQMPACREVMDIIASRFNATTHYRWGRIIDFLKLHYALTKRTDSDFWRDNVRDETMPDRLKELRLLWRYQSPWFLDEFDRVEEVFPAASYQYVLYGMGFRTEVDRSALARDTHLADRARRENRNMTAKLRAGLPRHRDLIDKIVTHGLQPV

SEQ ID NO: 84109 - protein, 504 aa, Alteromonas sp.
  REGION 1..504: note = tr|A0A1J0RVH7|A0A1J0RVH7_9ALTE NAD(FAD)-dependent dehydrogenase OS=Alteromonas sp. Mex14 OX=1917157; GN = BM527_13880 PE=4 SV=1
MNKLPQEIVIVGGGTAGWMTACYLAKAAELMEVKRNVPVHAPKITLLESSVVSTVGVGEGSTPYLRLFFEFLGVSEFEWMHRCNATYKMGINFEHWTTTAQTKTKRSSFTDTDCYFHPFFSSLDIPTADMYFSAVNKHRKGAAHDTNPSHYFTAAHMVEKGIPPDAICPSANIDYAYHFDAGLLGDFLKDYALNKGVCHQIGTVASVQTQNHNITTLELDDNKTLSADFFIDCSGFRGLLGKQALSRTFTSYADTLFNDAAVAIASDATLSPETELQTRSIALSNGWQWHIPLINRTGNGYVYSSHFCTAAQAEEELRLAVEPSNTPKQARHIKMTVGRLDEHWKGNCLCIGLSQGFIEPLEATALMLVQYALHLFIDCWQSDSPRKIESYNAEMNRMFDGIRDYIAAHYYLNTRDDSPYWLACREEMKVPDTLSYLLNAWDRGANFEQALDEVDNKLVYLRPSWYCIFAGMKRFSNDLVPHQQPNTLAIRTAQQSVENAFREK

SEQ ID NO: 84110 - protein, 499 aa, Glaciecola pallidula
  REGION 1..499: note = tr|K6ZEX7|K6ZEX7_9ALTE FADH2 O2-dependent halogenase I OS=Glaciecola pallidula DSM 14239 = ACAM 615 OX=1121922; GN = prnA PE=4 SV=1
MKKQQRKIKKVIIAGGGTAGWMAAAALSKLIGNNLDVSLIESDEIPTVGVGEATIPTLHVFHQLLGISEQEFMAATNATFKLGISFENWRDVSKDYIHSFGFLGQGCWAAGFQHFWLKGRERGIASQLGDYVPEHLGAREGKFAVLAGQELNHAYHLDAGLYAKFLRKIAEKYRTKRIEGKIAKVTLDEESGYIDSLTLASGQVVEGDLFIDCTGFKGLLIEEALHTGYDDWSHVLPCDSAIAVQTKTVGKPVPYTRAIARDAGWQWRIPLQNRTGNGFVFCSKYMSDEEATKTLLDNIEGERLNEPRVIKFKTGQRRKHWNKNCIAMGLSSGFIEPLESTGIHLFQRAIVRLLLMFPSQGIKQSDIEEYNVQTKEEAENIRDFIILHYHLTERKDTAFWRYCSSMDVPNSLKHRMSLFRESGQVFKKADELFGETSWIQVMMGQGLMPEQYHPIVDMMSDNELRDFLNNIKSRVKRQVENWPDSNDFIKHYCPSSVNT

SEQ ID NO: 84111 - protein, 492 aa, Amycolatopsis sp.
  REGION 1..492: note = tr|A0A229TAU0|A0A229TAU0_9PSEU Tryptophan halogenase; OS = Amycolatopsis sp. H5 OX=1905142 GN=CF165_12685 PE=4 SV=1
MSVEQFDVVVAGGGPSGSTVATLVAMQGHRVLLLEKEVFPRYQIGESLLPSTVHGVCKMLGVSEELAAANFPVKRGGTFRWGARPEPWTFSFSVSPRITGPKAFAYQVERAKFDHILLKNARSKGVDVREGCTVTEVLEDSERITGVRYTDADGNEREVSATFVIDASGNKSRLYSKVGGSREYSEFFRSLALFGYFEGGKRLPEPYSGNILSVAFDSGWFWYIPLSDTLTSVGAVVRREDADKIQGDRESALNALIAECPLISEYLSGATRVTSGNYGELRVRKDYSYQQPSYWRPGMILIGDAACFVDPVFSSGVHLATYSAMLAARSINSVLDGDMDEKTALTEFEARYRREYSVYYEFLVAFYEMHVDEESYFWSAKKVTKDVEHTEIESFVDLVGGLSSGEAVLAAKTRIAEHSAEFAAAVDQMAGGDDANMVPLFKSHVVRQVMQEGGQEQMRVVLGEDAEPELPLFPGGLVTSPDGMKWLPHRPV

SEQ ID NO: 84112 - protein, 516 aa, Streptomyces sp.
  REGION 1..516: note = tr|A0A2B8AWY0|A0A2B8AWY0_9ACTN Tryptophan halogenase; OS = Streptomyces sp. Ru87 OX=2044307 GN=CRI70_15260 PE=4; SV = 1
MLNRVVIVGGGTAGWMTASYFKAAFGDRIDITLVESGNVGAVGVGEATFSDIRHFFEFLGLKEKDWMPACNATYKLAVRFENWREQGHYYYHPFEQMRSVNGFALTDWWLKEKPTERFDKDCFVMSSVIDAGLSPRHLDGSLIDQPFDEGAEEMHGLTMSEHQGKTQFPYAYHFEAALLAKYLTQYSVDRGVKHIIDDVSHVDLDERGWITGVRTGEHGDLTGDLFIDCTGFRGLLLNKALEEPFISYQDTLPNDSAVALQVPMDMEKRGIRPCTTATAQDAGWIWTIPLMGRVGTGYVYAKDYLSPDEAERTLREFVGPAAADVEANHIKMRIGRSRNSWVKNCVGIGLASGFVEPLESTGIFFIHHAIEQLVKNFPGPDWDATYRNRYNDAVSHVMDGVREFLVLHYVAAKRQDNQYWKDTKTRAVPDGLAERLEKWKTQLPDSETIFPYYHGLPAYSYMCVLLGMGGIDVKPSPGLALTDSAAAQREFADIREKTRQLTETLPKAYDYFSQWH

SEQ ID NO: 84113 - protein, 506 aa, Sphingomonas sp.
  REGION 1..506: note = tr|A0A258S9Z5|A0A258S9Z5_9SPHN Tryptophan halogenase; OS = Sphingomonas sp. 28-62-20 OX=1970433 GN=B7Y43_16730; PE = 4 SV=1
MASARIGEIVIIGGGTAGWMAAAALARFVGAQASIRVIESDEIGTVGVGEATIPQLKLFNAGLGIDEAAFVRATNATFKLGIEFDGWRTPGARYIHAFGGIGRGLGLIPFHHYWLRHRAEGGSEALWAFSASAQAAAQHRFAPLQDQPGQAPSGMDYAFHFDAGLYAAFLRRFAEGLGVRRTEGRIADVVLNGETGFVEAVTLAGGARISGDLFIDCSGFRGLVIEQALASGYEDWSHWLPCDRALAVPSARTAPLTPFTRSTARDAGWQWQIPLQHRTGNGHVYCSAFMADEEAAQQLLSKLDGKPLADPRPLRFATGKRRQMWVKNCVALGLAAGFMEPLESTSIHLIQSGIARLLQLFPAAGFDSADIAEFNRQADFEWASIRDFLILHYHANARDGAFWAACRDMTIPDSLAHKLALFKANGRIFREHEELFTELGWVQVLIGQGIDPAGYHPLADQLSRQELAEFMTLARQHTDRVVVALPDHAAFIARHCAAPAVETVAA

SEQ ID NO: 84114 - protein, 195 aa, unidentified
  source 1..195: note = Alphaproteobacteria bacterium
  REGION 1..195: note = tr|A0A2N3BDP8|A0A2N3BDP8_9PROT Tryptophan halogenase (Fragment) OS=Alphaproteobacteria bacterium HGW-Alphaproteobacteria-5 OX=2013668 GN=CVT83_04255 PE=4; SV = 1
MDKADRAIRRIVIVGGGTAGWMTAASLANTLGTNCRIDLIESDAIGIVGVGEATIPPIKLFNHALGIDENAFLKASKGTFKLGIEFVDWTRLGQRYFHPFGQFGAEFDAVPLYQYWLRERARGDDTPLQDYAMAWVAARNNKFAPPLTDRQRIQSTYDYAYHFDAGLYAQFLRAYAESRGVQRSEGKVVDVSLRA

SEQ ID NO: 84115 - protein, 514 aa, Pseudoxanthomonas indica
  REGION 1..514: note = tr|A0A1T5IQ13|A0A1T5IQ13_9GAMM Tryptophan halogenase; OS = Pseudoxanthomonas indica OX=428993 GN=SAMN06296058_0148; PE = 4 SV=1
MSERAPQSITIVGGGTAGWMTAAALSATLPRGYTIRLIESEQIGTVGVGEGTIPHIHLFNQLLRLDEADFIRSTQGTFKLGVQFKDWRRVGERYMHGFGSSLGPGLNLLPFHQYWVKARHAGRAQALDRYVLAASAGPAGKFMTSARDVPATSPLANISYAYHFDAGLYARYLRSYSEQRGVQRSEGIVRQVKQTDNGDIASVVLDNGEEIAGDLFIDCSGFRGLLIEETLKTGYHDYSQWLPCNRALAVPTENAGPPTPYTRSTARQAGWQWRIPLQHRTGNGYVYCNDFISDDEATATLLANLDGKPLKDPMPLRFVTGRRKQFWNRNVVAIGLSSGFLEPLEATSIYSIQTGITKLLALLPQDRDYAVLAERYNTQMSFDFDRIRDFLILHYKANQREEPFWQRCAAMEIPQELQEVIDLFADSGRFFRQGEEMFAEMSWVQVLIGQGVLPRHWHPLVDQVPDEDVWRFIDSVGSTIERCVEAMPMQQAFIDRHCAAPRLAMDLPREPVSA

SEQ ID NO: 84116 - protein, 390 aa, Corallococcus sp.
  REGION 1..390: note = tr|A0A3A8IVT3|A0A3A8IVT3_9DELT Tryptophan halogenase; OS = Corallococcus sp. CA049B OX=2316730 GN=D7W82_13365 PE=4; SV = 1
MSEDSCDVAIIGGGPAGAALAVALRRRAPSLSVTLVERTTYDAPRLGETLPPDVRLPLSRLGVWEGFLRDGHLASRGTSSCWGRAEPGFHDTMMSPWGSAWHLDRARFDERLSLEAFRQGARVLRAATLVDSESLGRSGYRLRLAHGAADPSTLRARFVVDATGGKATFASARGARRLVSDRCFAVYGAFQLPGDAAFPTHALVEACPEGWWYSALLPRGRVVVALIGDGDSLRGLRWATPASWMNLLRQAPATRARLDVCDFAGEALVAVPVLVGQLDRARGEQWLAVGDAACTYDPLSSQGITKALDSALLAADALERCLRGDADALQDYESTLNTRFQDHQRTRAAYYRQEQRWPQAPFWKNRWEALPAPAAPPAQLLRPHSTEVNP

SEQ ID NO: 84117 - protein, 503 aa, Pseudoxanthomonas indica
  REGION 1..503: note = tr|A0A1T5JY06|A0A1T5JY06_9GAMM Tryptophan halogenase; OS = Pseudoxanthomonas indica OX=428993 GN=SAMN06296058_1180; PE = 4 SV=1
MTEEVTEFPHKAVKRVVIAGGGTAGWMAAAAISRMLGRVLDITLIESEEIGTVGVGEATIPTLVTFHRLLEINEQEFMAATQATIKLGISFENWKDRDHRYIHSFGVTGQDHWMANFVHFWMRGREEGLASRYEDYCVELRAAEENKFAHLPRKGMNYAYHMDASLYAKFLRRFSEGYGAKRVEGKIVEVNQDDASGYITSLKLADGNVIEGDLFIDCTGFRALLIGKTLNVGFTDWSHWLLNDSALATQTTAVRDAVPYTRAIAGNAGWQWRIPLQHRVGNGIVYCSRYISDDEAKQEFLGSLEGEVIKDPWPIRFRPGQRQKCWSKNVVALGLAGSFIEPLESTTIHLIQRGITRLLNCFPHVITPEIVNEYNARLDTELQHVRDFVVLHYCVTNRRDNAYWRTVGSMELPPSLRQRIELFRETGNVFPVPTELFAENSWIQVMMGQGITPRQHHPIAEVMSFDELRQFLDSIRASTANTVRQIPAHMDYLRSYCPADKPF

SEQ ID NO: 84118 - protein, 504 aa, Sphingomonas sp.
  REGION 1..504: note = tr|A0A0Q4F6N2|A0A0Q4F6N2_9SPHN Tryptophan halogenase; OS = Sphingomonas sp. Leaf208 OX=1735679 GN=ASE69_00165 PE=4; SV = 1
MANHPLRIVIVGGGTAGWMAAATFARFLETGYEIDLIESDAIGTVGVGEATIPQIHLFNDALGLDEDAFLRATGGTFKLGIEFVDWFKPGHRYMHAFGDVGRDVGLLPFHQYWLRARSLGLAGDLGAYSLNTHAALAERMQRGPARTARTLPSMPYAYHFDAGLYARYLRRYSETRGVNRIEGKIVQVTRDGESGDVSGLVLENGTTVAADLYIDCTGFRGLLIEEALATGYEDWTHWLPCDRAIAVPSARSEKFTPYTRSTAHAAGWQWQIPLQHRTGNGVVFSSAHMSEDEATATLLAGLDTPAKADPRTIAFRTGRRKRMWNRNVVALGLAAGFMEPLESTSIHLIQSAISRLLKLLPGRVIADADRTEFNRQSDFEYERIRDFIILHYKATARDDTPFWRQCRDMAVPDTLAAKIDLWRGNGHIVREHEELFTEVGWLQVLAGQGIMPAGHHPLADAISTSDLGEFLDTIDKLNAREAGQMQDHAAFVAQHCASPVGLGA

SEQ ID NO: 84119 - protein, 498 aa, Sphingopyxis sp.
  REGION 1..498: note = tr|A0A0W1F456|A0A0W1F456_9SPHN Tryptophan halogenase; OS = Sphingopyxis sp. HIX OX=1759074 GN=ATE62_13785 PE=4 SV=1
MTQPIQRIVIAGGGTAGWMAAAAIARTMGRAVSVTLVESEAIGTIGVGESTIPPLVNFNRLLGINEADFMRATQATFKLGILFDNWKEEGHRYFHSFGLTGKDHWSAGFQHFWLHGRTRGHEQSYDDYCMELVAAMAGKFAHLPNDGTNYAYQLDSGLYARFLRQMAEGDGTVRIEGRIGHVELDPASGDIAALILDGERRVEGDLFLDCTGFRALLIEGALHAGFEDWTHWLPCDSAIALQTPNIRPPVPYTRAMAHDAGWQWRIPLQHRTGNGLVYCSRYLGRDEALERLLGNVEGEVLTEPNFLRFTTGIRRRQWVRNCVAVGLSGGFMEPLESTSIHLIQRSVLRFIRMLPLGRPSARDIAEYEEQQLQDNLQIRDFLILHYKATNRRDSAFWRQCADMEIPDSLAQKIELFRETGRVFRKNEELFAENSWVQVMMGQGIEPQSYHPVTTKLSDDELDRLLGMIRQQVADTVAKLPDHHAYVARYCGADVPQAA

SEQ ID NO: 84120 - protein, 89 aa, Xanthomonas oryzae
  REGION 1..89: note = tr|G7TJG7|G7TJG7_XANOB Tryptophan halogenase; OS = Xanthomonas oryzae pv. oryzicola (strain BLS256); OX = 383407 GN=XOC_4109 PE=4 SV=1
MGSDDWSRWLFAASALAVQTEAVGPPVTSTRSRADQAGWMWRIPLQHRVGNGIVYSSRYMDQDSARAVLERNLTGRALTEPPPLRVTPN

SEQ ID NO: 84121 - protein, 513 aa, Devosia psychrophila
  REGION 1..513: note = tr|A0A0F5Q235|A0A0F5Q235_9RHIZ Tryptophan halogenase; OS = Devosia psychrophila OX=728005 GN=SAMN04488059_11612; PE = 4 SV=1
MTRQPHFVVVGGGTAGWIAAFIIQDAARRKGLDARISVIEPSSIPTVGVGEATTAAFRVLLMHFNIDEFEFFRKTEATFKLGIRHEDWRRKGFTYYGPIDDPHQVIKAPPGAASDYLNVYAIAAGKPITDMHLFGPLLEQKKAPYARKADGSLIPLGPFHHAYHFDQAKVGRFFASKSQGVDIIDAVVSGVHRHPETGDITALELDNGTKVEADFFIDATGFRKQLIVKEMQAPWISYAHELPVNRALPFWLDIKPGDEIANYTRAWAMDSGWMWQIPTQTRYGCGYVYSDEFSTPEQAKAEVERLLGREIEVRSDIRFQIGRLENAWVGNVLAVGLSSSFLEPLESTSIHGTIVQMMLFADRYLKHPADLTPADRADYNARVGRQVDDFRTFVNTHYLVERDDTPFWREVRASRIHPETKQRLQYWQHHMPRHEQFPDTLFGLPHIQTQLHYPVLTGLGLLDQNLARQEMDKDPKLRQFARETYDSLVKEYRAAAQKALGHAEFLQAVRDMA

SEQ ID NO: 84122 - protein, 522 aa, Alteromonas sp.
  REGION 1..522: note = tr|A0A1J0RXJ0|A0A1J0RXJ0_9ALTE Tryptophan halogenase; OS = Alteromonas sp. Mex14 OX=1917157 GN=BM527_17840 PE=4; SV = 1
MKESHFQAPLTSIVVAGGGAAGWLTAAILAAEHNIKNNDRVSVTLVESPDVKILGVGEGTWPTMRDTLRKIGISEADFIASCDASFKQGTRFVNWKSTESENVYDHPFSLPAGFFEGEVGAWWLSHGHQHQKSTFSEMFSTQSLLCNFSKAPKQVQTPPYAAVANYGYHLDAHKFAELLKKHCIERLGVNYVNDHIEHIKEDAEGYIASLQCKSEEIHGDLFVDCTGFSATLIGKHFNSPITDVSHGLKNNSAIAVQAGYVDENVDIASATLSTAHENGWIWDIGLPHRKGVGCVYSSEFASEEKAAETLKAYLTSCKKTKDVSESDFRKITFSPGYRKTAWVKNCVAVGTSAGFVEPLEASALVMVEMSARFISEHLPNHREIMPSVSKRFNSNFTRRWERIVDFLKLHYVLSERKDSPYWRFMTNLDNASEQLKDWLLEWQYRPISLTDFCYADELFPAASYMYVLYGMKAPEQFAINFSRYSDSVMGQTLNAVKANEKLSQKHVAALPTNRELIKAIRA

SEQ ID NO: 84123 - protein, 521 aa, Xanthomonas oryzae
  REGION 1..521: note = tr|A0A0M1MIR6|A0A0M1MIR6_9XANT Tryptophan 7-halogenase OS=Xanthomonas oryzae OX=347 GN=EYR26_01570; PE = 4 SV=1
MSDTLPSDPQQRAVRRVVIAGGGTAGWMAAAAMSKLLGRHLQITLVESDEIGAVGVGEATIPSLVTVHRLLEIDEAVFMATTQATIKLGIAFEHWRDVDRHYIHSFGHAGTDHGSAGFQHFWLKGQQRGVARDFGDYCLELRAAQEGRFAHLPNGGMNYAYHLDAGLHARFLRRFSEGFGVTRIEGRIGQVETDAESGFLTALTLQDGTRVAGDLFLDCTGLAGLLIGKTLGVGSDDWSRWLFADSALAVQTEAVGPPVTSTRSRADQAGWMWRIPLQYRVGNGIVYSSRCMDQDSARVVLERNLTGRALTEPRPLRVTPNQRHRVWEKNCVALGLASGFLEPLESTNIHLIQRGIIRLLQTFPQVINAVDIAEYNRQAAQEITHIRDFVILHYHATDRRDTPFWRDCAAMDIPDALRHRVELFRQSGRVFHQANGLFAENAWVQVMLGQGIVPQQHHPVADLMGDAQLSRFLDTIRARVEAALVRLPAHADVMQRYCPAPPPPEPAARVPAPPVMATPAR

SEQ ID NO: 84124 - protein, 511 aa, Sphingopyxis sp.
  REGION 1..511: note = tr|A0A0W1FDV1|A0A0W1FDV1_9SPHN Tryptophan halogenase; OS = Sphingopyxis sp. HIX OX=1759074 GN=ATE62_07450 PE=4 SV=1
MAKRSILIVGGGTAGWLTAAYLARFFDLPRNPRLAITLIASDEIGSIGVGEGAFPTIRSTLQFIGIDESQFVRSTTATFKQGIRFDDWVRTPAPGTSSHFLHPFEPPYHGDGHSLVSYWLLQDPATRPAFAEAMTIQNRVAEARRAPKRPGEGAFDGPLNYAYHFDAARLAEVLSAQARALGVTHLQGTLTDVALDGTTGAIDHIVTAEHGTLSADLYIDCSGFRAELIGALGAPFRSVGDRLFTDRALACKIPYDDPAAPLESYTIAAAHEGGWTWDIGLAGARGVGCVYSSAHLSDDRAADILATYTGGRSHDVKVRSIPFEAGYRTTPWVKNCVAVGLSGGFLEPLESTGLVMIETAAAMIAEMFPLGGPMGAPARRFNELMSARYANIVNFLKLHYCLSRRNEPFWRDNGDPASIPDRLKELLEEWRYRPPGRFDFILDLESFAFFNYQYILYGMEYRTDLSPVREEFPDVAEAERIFARIRNFGDRAASELPAHRALIDQINAEAA

SEQ ID NO: 84125 - protein, 503 aa, Gordonia sp.
  REGION 1..503: note = tr|A0A1V4Q7K5|A0A1V4Q7K5_9ACTN Tryptophan halogenase; OS = Gordonia sp. i37 OX=1961707 GN=B1964_10255 PE=4 SV=1
MSEVTTESVDVVVVGGGPGGSTTATLLAKSGRRVIQIEKETFPRYQIGESLLPSTIHGVCKLLGCYEKVRDAGFMHKRGGSFRWGTNPVPWNFLFAISPEFAGEGSYAYQVERMKFDHILLENSAENGVDVRQNCRVNGVDTDETGRVTGVRYLDADRVEHHVRARFVVDASGNTTRLSSRAGGERVYSEFFQNVAVFGYFEGGKRFSAPDAGNILCAAFDEGWIWYIPLSDTLTSVGVVVAKDKAQHVLNAQEQTLQHYIDRCEIVRDMLADATRVTEGTYGEIRIRKDYSYANTRFWGNGMVLVGDAACFIDPVFSTGVHLATYSGVLAARSINSVLDGTMSEERAFGEFEGRYRREYAVFYEFLSAFYDMEQSEDSYFWKARKVTNFDRNDMTAFVSLVAGGYSGEDALTDPSSIVSRFRRSSDALTEAARATGGMDTDSGQRMGHMFGAPVVREVMEEMNALQARGAVGDRATEPPLLEGGLVPSADGLAWAEPVQIAV

SEQ ID NO: 84126 - protein, 479 aa, Sphingomonas sp.
  REGION 1..479: note = tr|A0A0Q4EW81|A0A0Q4EW81_9SPHN Tryptophan halogenase; OS = Sphingomonas sp. Leaf208 OX=1735679 GN=ASE69_06130 PE=4; SV = 1
MTAAALAAVAGRSVAEVHLVESEEIGIVGVGEATLPHIRAFNTRLGIDEAEFMRATGATFKLGIEFCDWARIGDSYTHPFGAFGHDVDGVGFHHYLSRAGQIATLPDYSLPVVAARHAKFAPPLHDPRSLLSTFGYAYQFDATRYAPFLRARAERQGVTRTEGRVVDVERSATGDVVAVMLDDGQRITGDLFIDCSGFRSLLLGQAMGEPFEDWSHWLPCDRAVAVPCADAGTLKPYTTATAMPAGWRWRIPLQHRVGNGYVYSSAHIDDGAAQDALLRSIESTPLADPRMLRFKAGRRARSWVGNVIGVGLAGGFLEPLESTSIYLIQLAITQLLELFPATPISPIDRDAFNRVVDLEYDRIRDFLILHYHATTRDDSLFWDHVRTMDVPDTLAEKMTLFRQRGRVMTYREGVFLEPSWIAVYLGQGVVPKGYDQRADRPSDAALVQALARLRTETRDAVMTMPDHAAYIAQSGAAAA

SEQ ID NO: 84127 - protein, 517 aa, unidentified
  source 1..517: note = Novosphingobium barchaimii
  REGION 1..517: note = tr|A0A561HST4|A0A561HST4_9SPHN Tryptophan halogenase; OS = Novosphingobium barchaimii OX=1420591 GN=FHW33_104119; PE = 4 SV=1
MTTDYPSSGRVVILGGGTAGWLAAAYLSRTLNMRDVTLVESSEIGIIGVGEGTFPTIRTTLAGLGISEAEFLARADATFKQGVLFEGWATGSDSYFHPFNLPVGGEDEALLPHWIADGSQTRLPWADAVTVQEQVIRAGRAPKRAEDPDFSGPMNYAYHFDAARFADYLRDISVAAGVTRIEGTVATVERTADGDIAALALADGRWVEGDFFLDCSGFRALLIGQTLGADFTSCSDSLFNDRALAMQVPYAQPGAPVRPYTLATAHEAGWTWDIGLSERRGVGYVYSSRHCSDDEAETTLRRYLGSEGESLTPRQLRFETGYRETQWIGNCVAVGLSAGFFEPLESTGIMLIEAALKMIGEFLVPGERSAREAAARSFNRLMAARFERIIHFLKLHYCITRRTDTAYWRDNADPASIPEALQDMLAQWRHRPPSRFDFVVDLETFLPPSYHYILYGMGFETQLAAGIQRYPGAQEAREVFARVRTAHAGARGALPDHRALLDHYHARMGAAPAKVSR

SEQ ID NO: 84128 - protein, 514 aa, unidentified
  source 1..514: note = Lacimicrobium alkaliphilum
  REGION 1..514: note = tr|A0A0U3AFV1|A0A0U3AFV1_9ALTE Uncharacterized protein OS=Lacimicrobium alkaliphilum OX=1526571; GN = AT746_17610 PE=4 SV=1
MSQRQRIIILGGGTAGWMTAAALVRYLPASEFDICLLESSQIGTVGVGEATIPHIRQFNQWIGLDESQFIQSTGATYKLAIRFQGWGKEAASYFHPFGFSGEDLNGLPFHQYWLWLRQHQQAGLKPYDHYSMAVLMAQGGHFSYPQEQPDDPLSAYNYAFHMDATLYAKLLRERCIEQGVEWLDARVEAVSQHCSGDIRALKLDDGREVEGDLFIDCSGFAGVLIEQHLHAGYENWQRWLPCDRALAVPSDANSNPPVYTSSRATAAGWQWRIPLQHRTGNGLVYCGEFMSDQQAEETLLSGLQEMALNDPKSLRFVTGRRRHSWVKNCVAIGLSSGFLEPLESTSLYLIQVAIQQLLACFPGTQIGDTERQYFNRTMELEYQRVRDFLILHYKLNRRPEPFWQHCAQMEIPDSLAERLAMYRETGHLLEYRQGLFQPASWLAVALGQGEYPGNLDARLDSQSQASAMAWFSDYQQKLQQMAAQMPKHADALQQNMAAREPPAINSLYGFRSGR

SEQ ID NO: 84129 - protein, 506 aa, Xanthomonas arboricola
  REGION 1..506: note = tr|A0A2N9D8S2|A0A2N9D8S2_9XANT Tryptophan halogenase; OS = Xanthomonas arboricola pv. fragariae OX=487822; GN = prnA_1 PE=4 SV=1
MIPAPLRNIVIVGGGTAGWMAAAAFARVLGPGFKVQLIESEQLGTVGVGEATVPHIKAFNNLLGIDEAEFVRQTQGSFKLGIEFVDWQRPGTSYIHGFGTQIGHPLGLLPFHQYWIKQHARGKAQPLGAYTLNTVAAVRGKFMTSAGDVPANSPLANIAYAYHFDATQYARFLRNYAEQRGVTRIEGLVEQVQLHADSGHVQSLQLASGQVVSGDLFIDCSGFRGLLIEEALHTGYHDFTHWLPCDRALAVPSENVGPPTPYTRSTARTAGWQWRIPLQHRSGNGYVYSSAHISDDEAAATLLANLDGKPLADPRPLRFTTGRRKQFWNRNVVALGLASGFLEPLESTSIHLIQAGISRLLELFPREGISPVLVQRYNDRLAFEFDRIRDFLVLHYHATERDDSAFWRHCRTMPITPELQTTLDLFRDSGRFYRNAEEMFAEISWVQVMVGQGILPRGYHPLVDQVPDHDAERFLASVAQTIGHCVDVMPTHQQFIDRYCKAAAPR

SEQ ID NO: 84130 - protein, 509 aa, Xanthomonas oryzae
  REGION 1..509: note = tr|A0A5E8KWU4|A0A5E8KWU4_9XANT Tryptophan halogenase; OS = Xanthomonas oryzae OX=347 GN=ADT27_08615 PE=4 SV=1
MIPAPLRNIVIVGGGTAGWMAAAAFARVLGPTFTVQLIESEQLGTVGVGEATVPHIKAFNNLLGIDEAEFVRQTQGSFKLGIEFVDWQRPGTAYMHGFGTQIGHPLGLLPFHQYWIKQHARGKAQPLGAYTLNTVAAARGKFMTSAGDVPANSPLANIAYAYHFDATQYAHFLRRYSQRRGVTRIEGLVEQVQLHPESGHVQSLQLASGQTVHGDVFIDCSGFRGLLIEEALHTGYHDFTHWLPCDRALAVPCEKVGPPTPYTRSTARAAGWQWRIPLQHHTGNGYVYCSAHISDDEAAATLLANLDGKPLADPRPLRFITGRRKQFWNRNVVALGLASGFLEPLESTSIHLIQSGISKLLELFPREGISPVLVKRYNDRSAFEFDRIRDFLLLHYHATEREDSAFWRHCRSMPITPELQTTLDLFRDSGRFYRNAEEMFAEISWVQVMVGQGILPQGYHPLVDQVPDRDAEGFLASVAQTIAHCVDVMPPHQQFIDRYCKAAALPCGG

SEQ ID NO: 84131 - protein, 505 aa, Xanthomonas arboricola
  REGION 1..505: note = tr|A0A2N9D6X2|A0A2N9D6X2_9XANT Tryptophan halogenase; OS = Xanthomonas arboricola pv. fragariae OX=487822; GN = LMG19146_01263 PE=4 SV=1
MSQAPIRKVVIAGGGTAGWIAACALSHQFRELLEITLVESEQIGTVGVGESTVPPIRSFHRFLQIDEQEFLRAVAGTFKLSISFEHWRHQGERYIHPFGITGQSTLVCAFHHLWLESQRRGMPGSFGDYCLETVASRVDRFALLREPAVNYAYHLDAALYARFLRTRSEACGVRRIEGRIQQVTLQPDSGDVASLLLEDGQVLEGDLFIDCSGFRGLLIEQALHTGYEDWSHWLPCDCAVAVQTEALGPPVPYTRAIAHEAGWRWHIPLQHRVGNGLVFSSKHLSDDEAHAKLLRDVAAPALKDPWLVPFRTGRRLKAWNKNVVALGLASGFIEPLESTSIHLTIAAVVRLISLFPADGIAPSQVQLFNDISRAEMEHVRDFIILHYHATQREEPLWRQCRTMELPESLALRLRAWRERAHAWQAADELFRVDSWTHVLMGQGILPEQHHPLARALSDRDLRRLLDGIAQPIRHAVEQMPSQQAFIDAYCKAGASVWGLRSQVVT

SEQ ID NO: 84132 - protein, 509 aa, Xanthomonas oryzae
  REGION 1..509: note = tr|A0A0M1K727|A0A0M1K727_9XANT Tryptophan halogenase; OS = Xanthomonas oryzae OX=347 GN=ADT25_18185 PE=4 SV=1
MIPAPLRNIVIVGGGTAGWMAAAAFARVLGPAFNMQLIESEQLGTVGVGEATVPHIKAFNNLLGIDEAEFVRQTQGSFKLGIEFVDWQRPGIAYMHGFGTQIGHPLGLLPFHQYWIKQHARGKAQPLGAYTLNTVAAARGKFMTSAGDVPANSPLANIAYAYHFDATQYAHFLRRYSEQRGVTRIEGLVEQVQLHPESGHVQSLQLASGQTVHGDVFIDCSGFRGLLIEEALHTGYHDFTHWLPCDRALAVPCEKVGPPTPYTRSTARAAGWQWRIPLQHRTGNGYVYCSAHISDDEAAATLLANLDGKPLADPRPLRFTTGRRKQFWNRNVVALGLASGFLEPLESTSIHLIQSGISKLLELFPREGISPVLVQRYNDRSAFEFDRIRDFLLLHYHATERDDSAFWRHCRSMPITPELQTTLDLFRDSGRFYRNAEEMFAEISWVQVMVGQGILPQGYHPLVDQVPDRDAEGFLASVAQTIAHCVDVMPPHQQFIDRYCKAAALPCGG

SEQ ID NO: 84133 - protein, 495 aa, unidentified
  source 1..495: note = Colwellia beringensis
  REGION 1..495: note = tr|A0A222GBS6|A0A222GBS6_9GAMM Tryptophan 7-halogenase OS=Colwellia beringensis OX=1967665; GN = B5D82_17130 PE=4 SV=1
MTNLKTKVVIAGGGTAGWLSAFSLVTRLGSVLDITLIESDQIGTIGVGEATIPTMRTYHRLIGIDEQEFMAETQATFKLGIQFDNWGQQNDSYFHSFGEIGQRSWMAEFHEFWMEAKAQGFGGSLEDYCLELKAAKANKFATQAGNKPVNFAYHFDATAYAHYLRKKSETAGVKREEGFIERVKKDATGNISSLTLSCGKEILGDVFIDCTGFKGLLIGEHLNVGFEDWSHYLAADSAIAVQTKTVEEPRPYTQSIAHRAGWQWRIPLQGRVGNGIVYSSKYLSDDEARSTLMGNLTGEPITEPRLVRFTTGRREKAWHKNCIAIGLSSGFLEPLESTSIHLVTTALLRLMKLFPFSGNSALLAEQYNREVQREAETVRDFIILHYHLTERDDSPFWEHYRTMEIPESLAHRMAIFRENGYAWPDDVNLFRVDSWVQVMMGQGLMPKRHHKGSCVIPTEGLKDQMKALKIRIEKSVEQLPTHSDFIKKYCPVKGI

SEQ ID NO: 84134 - protein, 513 aa, Sphingomonas sp.
  REGION 1..513: note = tr|A0A0Q4EWM6|A0A0Q4EWM6_9SPHN Tryptophan halogenase; OS = Sphingomonas sp. Leaf208 OX=1735679 GN=ASE69_04275 PE=4; SV = 1
MHEIQNIVIVGGGTAGWLTAGVIAAKHQARRQHGFTVTLVESPNVPTIGVGEGTWPTLRSTLKKMGVSETELFRQCDASFKQGARFNRWTTGAPDDGYYHPLMLPQHFGQVNLAPHWLADEGSATFCDTVTPQGRICDEGLGPKTIATPEYDGHANYAYHLDAGKFSHFLQRHCCDTLGVRHVKADVTEVHLDESGDIASLDTEQGVSIAGDLFIDCTGFAALLIGGAMKVPFRSCTDILFCDTALAMQVPYDVPDAPIASHTISTAQSAGWIWDIGLPTRRGVGHVFSSSHISADAAEQELRDYIGPAARDLTARRLTIRAGHREQFWVRNCVAVGLAAGFLEPLEASAIVLIELSAKMIAEQMPACREVMDVVAHRFNDTAHYRWGRIIDFLKLHYALTKRTDTAFWRDNVRPESIPDRLSGLIELWRFQSPWVYDEFDRAEEVFPSASYQYVLYGMGARTAVMPGSIDDDVALARRARHDNQVQTQRLVSSLPGHRDLIDRIKRHGLQPI

SEQ ID NO: 84135 - protein, 496 aa, unidentified
  source 1..496: note = Colwellia beringensis
  REGION 1..496: note = tr|A0A222GB56|A0A222GB56_9GAMM Tryptophan 7-halogenase OS=Colwellia beringensis OX=1967665; GN = B5D82_15910 PE=4 SV=1
MTNKIKKVVVLGGGTAGWMSASLIKKLMGKSVDVELVESEAIASVGVGEATIPPIRLFNSVLGINEAEFLRETKATIKLGIKFENWKNTEESYFHTFGAAGKSSPFCQFHHYLKRAQDAGLKDNLWDYDLNYLCATQGKFAQIKSKDPIIDIPYAFHFDAGLYAEFLRKFSEKIGVKRTEGMVENVEQCKKTGNVNSLVLKSGEVIKGDLFIDCSGFRGLLIQQTLNTGYEDWGHWLPCDRAVAVPSKRFDETVPYTRSIAHAGGWQWRIPLQHRNGNGLVYSSKHYSDEQAKALLLANIESEPLAEPRIIKFTTGRRRKQWHKNVIAIGLSSGFLEPLESTSIHLIQSAIVRLIHMFPQKGISTAQVDEYNRQSKVEYEQIRDFIILHYHVNQRDDSQLWRDLREMDIPESLAEKIKLFKESGKIFREQNDLFNEGSWLQVMLGQGIEPEDYHPMANDMPLEQLNSMLAKIKAIKHEPLTKLPSHDEYLTNFCRL

SEQ ID NO: 84136 - protein, 435 aa, unidentified
  source 1..435: note = Planctomycetes bacterium
  REGION 1..435: note = tr|A0A517NPW6|A0A517NPW6_9BACT Flavin-dependent tryptophan halogenase RebH OS=Planctomycetes bacterium K23_9 OX=1930275 GN=rebH PE=4 SV=1
MRVAIIGGGTAGHMALAHLSKQWPNAQLVHLYDRDRPTIGVGEGTTPDFVNWLSTIGITFDDLVNHCNVTRKRGISFHGWGTRESDFEHEFLPRSQQAVHFSAARLPELLASRSSFDHINDSVESIDTSGDRSIITTHRGRQIDADLVIDARGFPCPSETEIHRFDWIPTNSALVTKSPFADGETITKAIARPLGWVFRIPLKNETSWGYVYNSQLTTRSGIERDFLAFLKETGVSGHNPFRQLDFPNFARRRVFDQGVFHIGNCASFLEPLEATAISVITLQLHLLSHWKTLQDQGLPLVLATDRINRIHEDTLIKISIFIAWHYAAGSQYDTPFWQTAKQRFQQVTQAPELGQIFRQFDELLAQSNSVSAAALAELNTPTDLERWGMNGPAQPNFGGYNKLSFSQLAAGLRETSPSIGPHFNLDPSARPSRSV

SEQ ID NO: 84137 - protein, 500 aa, Sphingomonas sp.
  REGION 1..500: note = tr|A0A0Q4ENA9|A0A0Q4ENA9_9SPHN Tryptophan halogenase; OS = Sphingomonas sp. Leaf208 OX=1735679 GN=ASE69_07990 PE=4; SV = 1
MGARMQVVIVGGGTAGWMTAATLAMSFAGRLADVTLIESEEIGTVGVGEATVPHIRFFNQRLGIDEADFIRRTNATYKLGIEFRDWGRIGDSYTHPFGDFGHDIDGLPFHQYWAHASRGDTDGLPTLEDCSLPIVAARDNRFTPPLEDQRSIRSTYSYAYQFDATLYAAYLRDYAEARGVVRIEGRVDAVEQSAGSIEAVRLADGRRIAGDLFIDCSGFRALLIDGALKVKYEDWSHWLPCDAAWAVPTANAGALTPYTRATAREAGWQWRIPLQHRTGNGHVFSTRFTDPETARAVLMDNLEGEALAEPRMLRFRTGRRDLQWVGNCVAIGLSAGFLEPLESTSIHLIQLAIGKLIELFPSGGVFDPADAAEFNRAMALEYDRVRDFLVLHYCATERDDTPFWRYMRTMTLPSSLTEKIAEFRERGIVASYREGMFLPASWLAVYYGQRIMPDRVNPLIADMPMATSHAHVAKVAAACASAAKTMPLHEDYIARIKAAA

SEQ ID NO: 84138 - protein, 508 aa, Sphingomonas sp.
  REGION 1..508: note = tr|A0A258SFW6|A0A258SFW6_9SPHN Tryptophan halogenase; OS = Sphingomonas sp. 28-62-20 OX=1970433 GN=B7Y43_06795; PE = 4 SV=1
MARIERLVILGGGTAGWMTAAALAKALGRTVQIDLLESDAIGTIGVGEATIPTIHWFNELIGLDEADFVRATKASFKLGIEFVDWARPGHRYFHPFGRYGVDLGPVPFHQCWLKAGRDGATTPLADYSLATALAGSNRFARPVDDPRSILSTLGYAYHFDASLYAAYLRTLAEAQGVTRHEGRLVSVERDPETGFVTALTSDRGDRLAGDLFVDCSGFRALLIGDELGASFEDWSHWLPCDRAIAVPCARVAETTPYTRSTLRDAGWQWRIPLQHRTGNGYVYASGFLSDDEATATLLANLDGEPLADPRLIRFTAGFRRESWTKNIVAIGLSSGFLEPLESTSIHLIQSGIAKLIALFPNRDCDPALARQFNALFGRDMDAIKDFLILHYHATQGHQAPLWQHTRHMTLPDSLIEKEEQYRRTGRLMLASDELFREASWLAVLNGQGIVAMDHSPIADTLDGVTNRRQLDQIAALIARAAPTLPRHDDAIATLIGQAAPRAAVAAVP

SEQ ID NO: 84139 - protein, 531 aa, Streptomyces sp.
  REGION 1..531: note = tr|A0A2B8AN60|A0A2B8AN60_9ACTN Tryptophan halogenase; OS = Streptomyces sp. Ru87 OX=2044307 GN=CRI70_30810 PE=4; SV = 1
MDNRIKSVVILGGGTAGWMAASYLGKALQRTVDITVLEAPSIPRIGVGEATVPNLQRAFFDYLGIPEEEWMRECNASFKMAVKFINWRTPGPGSPQPRTRDDGRPDTFHHPFGLLPSADRIPLSHYWAAKALRGETNEAFDDACFVDTAIMDAKKAPRWLDMSRATNYAWHFDAAKVAAYLRDFAVTKQAVVHVQDEMTEVLTDERGFITALRTKSGQLLKGDLFIDCSGFRGLLINKAMEEPFVDMSDHLLCNSAVATAVPHDDEKNGVEPYTSSIAMPSGWTWKIPMLGRFGTGYVYSRDFTGQDEATLAFSKLWGLDPDHTEFNHVRFRVGRNRRAWVRNCVSVGLASCFVEPLESSGIYFIYAAIHMLAKHFPDKTFDKVIIDRFNREIQEMFDDTRDFLQAHYSLSPRTDTPFWQANKELVLADGIKDKIETYRAGLPVNLPVTDESTYYGNFEAEFRNFWTNGSYYCIFAGLGLMPRAPLPLLAYKPQSAAQADLLFADIKKRQRETADSLPSTYELLRQLHGVS

SEQ ID NO: 84140 - protein, 521 aa, Xanthomonas campestris
  REGION 1..521: note = tr|Q3BMZ1|Q3BMZ1_XANC5 Tryptophan halogenase; OS = Xanthomonas campestris pv. vesicatoria (strain 85-10); OX = 316273 GN=XCV4141 PE=4 SV=1
MPDTTPSDPQQRPVRRVVIAGGGTAGWMAAAALSKLLGRHLQITLVESDEIGTVGVGEATIPSLVTFHRLLEIDEAAFMAATQATIKLGIAFEHWRDVDQHYIHSFGHAGTDHWSAGFQHFWLKGRQRGVARDFGDYCLELRAAQEGRFAHLPNGGMNYAYHLDAGLYARFLRRFSEGFGVTRIEGRIGQVETDAQSGFLTALTLQDGTRVEGDLFLDCTGFAGLLIGKTLGVGSDDWSRWLFADSALAVQTESVGPPVTYTRSRADQAGWMWRIPLQHRVGNGIVYSSRYMDQDGARAVLERNLTGRALTEPRPLRFTPNQRHRVWEKNCVALGLASGFLEPLESTNIHLIQRGIIRLLQTFPQVINVADIAEYNRQAAQEITHIRDFVILHYHATDRRDTPFWRDCAAMDIPDSLRHRVELFRQSGRVFHQANELFAENSWVQVMLGQGVVPQQHHPVADLMGDAELGRFLETIRARVEAALVRLPAHADFLQRYCPAPPLPEPAARVPAPPVMATPAG

SEQ ID NO: 84141 - protein, 504 aa, Erythrobacter sp.
  REGION 1..504: note = tr|A3WHM0|A3WHM0_9SPHN Tryptophan halogenase, putative OS=Erythrobacter sp. NAP1 OX=237727 GN=NAP1_09752; PE = 4 SV=1
MAIQHIVIVGGGTAGWMAAAALSRLKSGRTLDITLIESEQIGTVGVGEATIPPFVGFNDLLGIPESELLSNVQGTFKLGIQFENWGKRGDSYIHPFGAYGYTMGGISFHHVWHKLAKEGDNRPIQVFNVETMAAYFGKFMRSEDYQKQRDDLPPINYAYHLDAGKYAAFLRGYAEKRGVVRQEGRVDDVSLDGETGFVTGVTLDDGRKIDGDLFIDCSGFRGLLIEQALGTGYEDWTHWLPCNRAVALPCGRDDGSPPPPFTRATAHSAGWQWQVPLQHRNGNGHVYCSEFMEDQEALDILLGNIAGKPQADPNFLRFTTGRRKKFWNKNVVALGLSAGFMEPLESTSIHLINTGVDKLLSLLSLDGVTQTQEDTFNRLTGREYARIRDFLILHYNATSRDDSGFWNYVRTMDVPETLTEKVELFKANGQIFREEDELFTETSWAAVMMGQGIAMTGHNAMADSLDPASTRKEIDEMEQSIRFLIQHMPGHGEYLSRYCPAKAA

SEQ ID NO: 84142 - protein, 502 aa, unidentified
  source 1..502: note = Lacimicrobium alkaliphilum
  REGION 1..502: note = tr|A0A0U2QRP6|A0A0U2QRP6_9ALTE Tryptophan halogenase; OS = Lacimicrobium alkaliphilum OX=1526571 GN=AT746_17600; PE = 4 SV=1
MTEKLRKIIVLGGGSAGWMTAAALGKVLKNQYCQIQVIESEQIGTVGVGEATIPQIMLYNQLIGLDEDEFVRRTQGTFKLGIQFVDWHKPGSSYFHAFGDVGKNMEGVQFYHYWLKLRALGKAAPLDDYTLTSLACHEKRFMRSIDAGNSPLSNIAYAFHFDAGLFAKYLRELSQGWGVQRTEGKVVEVRQHDNGFIHSLLLEDGSEHEADFFIDCSGFRGLLIEQTLKTGFEDWSHWLPCDNAIAVPSANTKEPWPFTRASAQKAGWQWRIPLQHRVGNGHVYCSQFMSEDEATHILLKNLDGEPLAEPRRIRFKTGKRKQFWNKNCLAVGLAGGFMEPLESTSLHMVQAAISKLFSFFPDRQFAQADIDEFNRQMHFDYDRIRDFLILHYYATQRDDSPFWDYCRTMDVPEELTQKIEQFRSNGRVFRFNNEMFSDLSWFEVMLGQGIEPRGYHPLADIFSEQELARRLESIRGVIRKSVDYMPSHQEFIDQHCKARKVY

SEQ ID NO: 84143 - protein, 503 aa, Erythrobacter sp.
  REGION 1..503: note = tr|A3WHM9|A3WHM9_9SPHN Tryptophan halogenase, putative OS=Erythrobacter sp. NAP1 OX=237727 GN=NAP1_09717; PE = 4 SV=1
MSNTNVQKLVIVGGGTAGWITAAAFSRLMGRTLSIELVESDAIGTVGVGEATIPQIIRLNRILGLDEHDFVKRTNGTFKLGIEFVDWGDVGTRYLHTFGDAGMNLASVPFHHYWKRAEASGSRHSLWHYSLHQLAANHAKFGKLDRVGNTSMTGLAYAYHFDASLYAAYLRAFSEQKGVTRTEGIVQSVARDGESGDITSITLDNGREIAGDFFIDCTGFRALLLGQELGVGYQDWSKWLPCDSAQAVPSERLETLVPFTRATAKTAGWQWRIPLQHRTGNGHVYCSDFISDEEAGETLLAGLDTKPLADPRPIRFTTGRREQFWSNNCAAIGLSSGFLEPLESTSIHLIQSHVSRLLQLFPASNRSDVERAEYNRRCEAEFEQIRDFLILHYHQTNREDSEFWRYCRNMDVPDSLTHKQELFASSGRVGRDADDLFREASWVQVMLGQGVTPQSHDAMANGLSDAQLSEFLGNVRTLIERAVGTLPTHEQYLKQNCAAAEAA

SEQ ID NO: 84144 - protein, 510 aa, Massilia sp.
  REGION 1..510: note = tr|A0A1S9ALK9|A0A1S9ALK9_9BURK Tryptophan halogenase; OS = Massilia sp. KIM OX=1955422 GN=B0920_14000 PE=4 SV=1
MEDAMNNIDRIGSITVVGGGSAGWMAAAALATYLGKHARIRLIESEQIGIVGVGEASVPHLRLFNGQWLGIDETEFVRRTQGTVKLGIQFNDWGRIGDSYLHGFGILGRSLGPLPFHQFWLKLRQAGRAAPIGEYSAQTLMAPRGKFAPGDRNAAPNSPLADIAYAYHFDATLYARFLRELAERRGVERIEGKITGVQQRPDNGYVASVTLESGQVVDGELFIDCSGFRGLLIEETLGTGYVDWSHWLPCDRAVAVPSERAGPDTPYTRATARGAGWQWRIPLQHRTGNGYVYASRHLSDDEAAATLLANLDGKALAEPRQLRFTAGMRRKAWNGNVVALGLASGFLEPLESTSIYLVQSGITRLLSLFPRRDLDPLLAERYNRETAFEYERIRDFLILHYHATERDDTPFWKHCRTMEVPDTLRETMDMFRADGRYLRNGEDFFALPSWVQVMLGQGIQPRGYHPLVDEMPEEKLVDHVESVRAMLAHAVDAMPTHREWIERYWKAPAP

SEQ ID NO: 84145 - protein, 371 aa, Myxococcus fulvus
  REGION 1..371: note = tr|F8CJF8|F8CJF8_MYXFH Tryptophan halogenase; OS = Myxococcus fulvus (strain ATCC BAA-855 / HW-1); OX = 483219 GN=LILAB_03730 PE=4 SV=1
MAVALRDLAPFLSVVMLERTGYDTHRPGEALSPDIRTPLSRLGVWSSFLRDGHLASRGTSSCWSRAEPRVQDMRMSPWGSAWNLDRARFDERLSLEAARQGARVLRLTTLLDAEPLAAEGYRLHLSQRKAGALTLRARFVVDATGWKATFAMSQGARRRIRDRCFTVHGAFQLRPGESFPTDALVEACPEGWWHSARLPADRVAVTLVGDGDSLHGLRWATPERWMALLEQAPVTLARVAVCDFAGEPLVAAPVLVGELDRMHGARWLAVGDAAHTHDPLSAQGIFSALDSALLAAEALEQYMRGEEAALRAYEETLHLRFDAHLRKRSETYREEQRWPDAPFWKNRHAAFPSLTPVAGQHSAPTPAGLAT

SEQ ID NO: 84146 - protein, 489 aa, Sphingopyxis sp.
  REGION 1..489: note = tr|A0A0W1EIM5|A0A0W1EIM5_9SPHN Tryptophan halogenase; OS = Sphingopyxis sp. HIX OX=1759074 GN=ATE62_20650 PE=4 SV=1
MIRRIVIVGGGSAGWMTAAAFGRALSPQTHKITLVESEAIGTVGVGEATVPPIHEFNRFLRIETADFLRATHGTIKLGIRFEGWGGVGHSYFHPFGYLGIEMAGIHFHHHWLRHLAEGGDADHGPYNLETMAARAGRFAPATRHGPVHHAVQFDAAAYAQYLRAYAEAKGVTRVEGKVADVQLRSEDGHISALTLDDGRTIEGDFFIDCSGFRGLLIEGALETGYTSWQHWLPCDSAVAMPCARSGDPMPYTVSTAREAGWQWSIPLQHRDGNGYVYSSAHLAHDEAEALLRSRLPGEALADANRLRFVAGHRNAIWNRNCVAIGLAGGFLEPLESTSIHLIQTTIIRLLSLLPRDAIDPNVVARFNRDALHEYATIRDFVIAHYATANRTDTGFWRDVAAAGVPDSLAERIAAFRATGNILFEPGDLFGPTNWYAVLTGQGVHPQSHHPIADTLPAGEFAKRLAILRTRVAEQLAELPPHADFLRSLG

SEQ ID NO: 84147 - protein, 515 aa, unidentified
  source 1..515: note = Novosphingobium barchaimii
  REGION 1..515: note = tr|A0A561HW09|A0A561HW09_9SPHN Tryptophan halogenase; OS = Novosphingobium barchaimii OX=1420591 GN=FHW33_103122; PE = 4 SV=1
MVANPIRSILIVGGGTAGWMAANLLATRLRGLPIAITLVESADIRTVGVGEATVPAIRDYFKAIGVTEAEVMQAAQGTVKLGIEFRDWRAPGTSFFHPFGRYGVDAFSVPFHQYWLKRRMAGDQTPLSDYCLPTQAAMRNLMLLPSEQPVNDLGVFDWAIHFDAGLFARFLAQRGRDLLGVRHLEGTISGANRDAENGRIASVTLTDGRTLEADLFVDCSGFRSLLLGQTLEVPYEDWTHLLPCDRAVAMPCAHGDSLTPYTRSTALSAGWQWRIPLQHRVGNGYVYSSRHISDDEATATLIANLEGEALAEPNMLRFRTGHRTRVWEKNCVAVGLAAGFLEPLESTSIVLIQSGIERLLAHFPDRDFDPSLADEFNRITALEYARIRDFLLLHYWGGQREETIWRECRALDLPETLAQRIRAYEGAGKLPRFEWDSFQSPSWLSMFAGFDIWPSRYDPLADQFSAEELGGTFEQMRAAVARAVSLAGTHEQFIAETCAAPAAQNAAPQFTLNSA

SEQ ID NO: 84148 - protein, 498 aa, unidentified
  source 1..498: note = Lacimicrobium alkaliphilum
  REGION 1..498: note = tr|A0A0U2Z4X2|A0A0U2Z4X2_9ALTE Tryptophan halogenase; OS = Lacimicrobium alkaliphilum OX=1526571 GN=AT746_03955; PE = 4 SV=1
MKSVMRKVVILGGGTAGWMSAALLKKILGSAVDIELVESEMIGTVGVGEATIPPIRLVNNVLGIKEADFLRETQATMKLAIRFENWRVPGEGYFHTFGAPGKSMAFCHFHHYWRRAQQEGLKDSLWEYDLNYLCAQAGKFSHINSKNPVLELPYAYHFDASLYARFLRNYSEKLGVVRTEGKVEKVDQDNDSGYIQSLQLDNGKIIGGDLFIDCSGFRGLLIQQKLNTGYEDWSHLLPCDRAVAVPSERFQKTLPYTRSIAHGAGWQWRIPLQHRNGNGMVYSSAHCSDEQAADSLLANLDSKACGDPNFIRFLTGRRRKQWHKNVIAVGLSSGFLEPLESTSIHLIQSAIVRLIHLFPHQGIQPSAVTEYNKQSKLEFEQIRDFLVLHYHVNQRTDTQFWRDLQSMEIPDSLTQKIALFAETGRLFREQNDLFLESSWLQVMMGQGIMPKDYHPMAENPSREQLLGMLQQIRQVKQDPLPKMLDHDEFLTGYCQIKE

SEQ ID NO: 84149 - protein, 507 aa, Porphyrobacter sp.
  REGION 1..507: note = tr|A0A4Y6VYD1|A0A4Y6VYD1_9SPHN Tryptophan 7-halogenase OS=Porphyrobacter sp. YT40 OX=2547601; GN = E2E27_07165 PE=4 SV=1
MSSAPPAPLTSIVIVGGGSAGWMTAAALAHAVGGACAITLIESEAIGTVGVGEATIPPIRTFNQRLGIDEATFVRETQGSYKLGIEFVDWGRLGHSYFHPFGQYGAEFDQVPFYHHWMREHLEGRIEGPIDDFSMCWAMARDGKFARPSPDRRMIQSTFDYAYHFDAGLYAAYLRRFAEARGVTRIEGKVIDVSLRGEDGFIEAVTLDSGTRIEGELFIDCSGFRGLLIEEALHAGYDNWQHWLPCDRAVAVPCKRGEFTPYTRSTAREAGWQWRIPLQHRTGNGYVHCSQFISEDEASATLLANLDGKPLADPRTLRFVTGKRRRFWEKNCVAIGLSAGFMEPLESTSLHLIQYAILRLIALLPDSTMSPLLAREYNAQTAREYELIRDFLILHYKASERDDSELWRYTAAMPIPDSLQYKIDHFRAHGTLVAEPQELFANPSWIAVYLGQGIVPHRAPALAHMREGVPVAERMAQIREAMAEAVAAMPSHGDFVARHCAAPPIAG

SEQ ID NO: 84150 - protein, 505 aa, Xanthomonas oryzae
  REGION 1..505: note = tr|A0A0M1MKD1|A0A0M1MKD1_9XANT Tryptophan 7-halogenase OS=Xanthomonas oryzae OX=347 GN=EYR26_16335; PE = 4 SV=1
MIQAQIRKVVIAGGGTAGWIAACALSHQLRGLLDITLVESEQIGTVGVGESTVPPIRTFHRFLQIDEQEFLRAVAGTFKLSISFEHWRAQGERYIHPFGITGQSTLVCAFHHLWLESQRRGMPGSFGDYCLETVASRVDRFALHGEPAVNYAYHLDAALYAKFLRARSEACGVKRIEGKIQQVTVQPHSGDVASVVLEDGQVIEGDLFIDCSGFRGLLIEQTLHTGYEDWSHWLPCDRAVAVQTEAVGPPVPYTRAIAHEAGWRWHIPLQHRVGNGLVFSSKHLSDDQAHAKLLHDVAAPAVKDPWMVPFRTGRRRKAWNKNVVSLGLASGFIEPLESTSIHLTISAVVRLLALFPGEGIAPSQVQLFNDVSRAEMEHVRDFVILHYHATQRSEPLWQQCRAMELPESLALRLRAWRERAHAWQGADELFRVDSWTHVLMGQGIEPEQHHPLTRAFSDHDLRRLLDGIAQPIQHAVQQMPSQHAFIERYCKAGAQVWGMRSPVPA

SEQ ID NO: 84151 - protein, 521 aa, Xanthomonas oryzae
  REGION 1..521: note = tr|A0A0M1KB42|A0A0M1KB42_9XANT Tryptophan halogenase; OS = Xanthomonas oryzae OX=347 GN=ADT25_14690 PE=4 SV=1
MPDTTPSDPQQRAVRRVVIAGGGTAGWMAAAAMSKLLGRHLQITLVESDEIGTVGVGEATIPSLVTFHRLLEIDEAAFMAATQATIKLGIAFERWRDVDRHYIHSFGHAGTDHWSAGFQHFWLKGRQRGVARDFGDYCLELRAAQKGRFAHLPDGGMNYAYHLDAGLYARFLRRFSEGFGVTRIESRIGQVETDAESGFLTALTLQDGTRVEGDLFLDCTGFAGLLIGKTLGVGSDDWSRWLFADSALAVQTEAVGPPVTYTRSRADQAGWMWRIPLQHRVGNGIVYSSRYMDQDSARAVLERNLTGRALTEPRPLRVTPNQRHRVWEKNCVALGRASGFLEPLESTNIHLIQRGIIRLLQTFPQVINAVDIAEYNRQAAQEITHIRDFVILHYHATDRRDTPFWRDCAAMDIPDSLRHRVELFRQSGRVFHQANELFAQNAWVQVMLGQGIVPQQHHPVADLTGDAELSRFLATIRARVEAALVRLPAHADFLQRYCPAPPPPEPAARVPAPPVMATPAG

SEQ ID NO: 84152 - protein, 498 aa, Leeuwenhoekiella sp.
  REGION 1..498: note = tr|A0A2G2JHA6|A0A2G2JHA6_9FLAO Tryptophan halogenase; OS = Leeuwenhoekiella sp. OX=1977054 GN=COA80_06900 PE=4 SV=1
MYNDPVRNVVIVGGGTAGWMCAAGLSRMLDMRGLSVTLIESDEIGTIGVGEATIPSLHVFNQLLGLDEADFMRQTRATIKLGIEFTDWGKLGDHYIHPFGDYGLDRPDVKFHQMWLKLLHAGADVGAIGDYNMCLMAARLNRFGIGQMRRGLPDLRHAYHLDAGLYARYLRRYAEQRGIVRREGLVTNVNQREDGFVSSVTLRDGQVVEGDLFVDCSGFRALLIGQTLGVGFEDWGRWLPCDRAVAMPCENTGPLIPYTRATADAAGWRWRIQLQHRIGNGHVYSSAYIDSDTAEARLRATLDGAAMSDPLHIRFKPGHRHRLWDRNVIAIGLSGGFIEPLESTSIHLIQTGVSRLLLLFPDMRFTPALIDEFNRSSLLEYEQIRDFIILHYKATRRDDTPFWRYCRDMEVPDSLRHKMELFRAGGRIFRFSDDLFTESSWLAVLLGQGIVPECHDPVADAIPAGDMERALLSLRAAVLDAAKALPDHTDFIRSYCAI

SEQ ID NO: 84153 - protein, 509 aa, unidentified
  source 1..509: note = Colwellia beringensis
  REGION 1..509: note = tr|A0A222GBU5|A0A222GBU5_9GAMM Tryptophan 7-halogenase OS=Colwellia beringensis OX=1967665; GN = B5D82_17135 PE=4 SV=1
MKTRVVIVGGGTAGWLTAGIIAAQHYLKGAPTQDTEVILVESPDVKNLGVGEGTWPTMRDTLRQIGISEREFLSCCDASFKQASKFVGWSNGQNEHYYHPFTAPSGYGVVSMADHWSAATKDMNFENWVCAQGTICDYNLAPKLPKMSEYAFSVNYGYHLNAGKFVKILHQHCVDNLGVKYIQGHVEQVLSAENGDISEIVLSDGEHIAGDLFIDCSGFAAILIGKHYQISFKSQKHILFNDTALALQVEHASEDTPIASSTIATAQQSGWIWDISLQNRRGIGHVFSSDFTNVGDAEDALSMYVKNDPLLTAQKLTPRIIKFNPGHRETFWHKNCVAIGVSAGFVEPLEATALVLIEKSAEWVSQQLPRDSDAMSVLAKRFNNLTLQRWKEIIDFLKLHYVLSNRTDSEYWQAHQQLGSIPESLQESLQLWRSQAPGLYESNQRFELFSSASKQYVLYGMGFNTAPHPLGQKEASLIKRLRNETLHNTEKLLSALPTNRQFLSKILQK

SEQ ID NO: 84154 - protein, 503 aa, Massilia sp.
  REGION 1..503: note = tr|A0A1S9ABL8|A0A1S9ABL8_9BURK Tryptophan halogenase; OS = Massilia sp. KIM OX=1955422 GN=B0920_18055 PE=4 SV=1
MHNQAIKDIVIVGGGTAGWMTAAALSTVLNGRYNIRLVESDEIGIVGVGEATIPMIQRFNRVVGIDENEFMRETMGSFKLGIEFVNWGRLGERYMHGFGRLGQDLATVRFEQYWQKMRLAGKAAPLEEYSITRMAARANRFMPPRFDVPNSPLGDITYAYHFDASLYAKYLRKLSEARGVTRIEGKITRVTRREPDGHVDAVELENGARVEGELFIDCSGFRGLLIEQALETGYEDWTHWLPADRALAVPSESAPGITPYTRATAHRSGWQWRIPLQHRTGNGHVYCSRFISDDEAAATLLANLDGKALAEPRLIQFQTGMRKLAWNRNVVAVGLSSGFLEPLESTSIHLIQSTIQRLIDFFPDRGWSAVDRDEFNRQTRFDYERIRDFIILHYHLNQRTDSPYWLECANMAIPDTLRQKMDMYRTHGRVVRVDNELFSEVGWVQVFEGQNMPVEGYHPLVDTQSEEDIAEYLDGVRGVIAKCVGVMPSHDEYIAKHCAARKM

SEQ ID NO: 84155 - protein, 444 aa, unidentified
  source 1..444: note = Dechloromonas aromatica
  REGION 1..444: note = tr|Q477Q8|Q477Q8_DECAR Monooxygenase, FAD-binding:FAD dependent oxidoreductase:Tryptophan halogenase OS=Dechloromonas aromatica (strain RCB); OX = 159087 GN=Daro_4197 P E=4 SV=1
MEQQAQGVERRQCDVLVIGGGPAGSTVAPMLAEKGYKVVMLEKAHHPRFHIGESLLPANLPLFERMGIAEEVKAIGMLKPGAEFVSPHHDMSSVFNFAEAWDKSMPYAYQVKRDQFDTILIRNAEKKGVEVHEGCKAKAVDFLPDNTAAIRAVSDDGREIEWQARFVVDASGRDTFLANRFQIKHRNPKHNSSAIYGHFAGAQRHEGQAEGNITIFWFEHGWFWFIPMQNDITSIGMVTWPYYMKTKGERSLEQFLRDGFAQCPKLTERLKDAKLINEIEATGNFSYVSERNHGTNYVMLGDAYAFIDPVFSSGVLLAMNSGVIAAEAIDTCLKTPAKAPAALKKFDALMKHGPKEFSWFIYRVTNPIMREFFMGPRNLFRAKEAVLSMLAGDIFGKTPIWSSIFAFKMLYYIANITQPKKAFMGWKRRKFNIRKVDDAVVYNA

SEQ ID NO: 84156 - protein, 507 aa, Erythrobacter sp.
  REGION 1..507: note = tr|A3WHN5|A3WHN5_9SPHN Tryptophan halogenase, putative OS=Erythrobacter sp. NAP1 OX=237727 GN=NAP1_09702; PE = 4 SV=1
MAEEAYAPLKSIVIVGGGSAGWMTAAALSDAVGKSCSITLIESEAIGTVGVGEATIPPIRQFNARIGIDEATFVKETAGSYKLGIQFVDWSRKGHSYFHPFGQYGAEFDKVPFYHYWMREALDGRIAGPIDEFSMCWAMAKAGKFARPEPDRRKIQSTFDYAYHFDAGLYAAFLRRVSEARGVKRIEGRVTDVIQRGEDGFIESVTLDKGTSVSGELFIDCSGFRGLLIEDTLKAGYENWQHWLPCDRAVAVPCAKQAEITPYTRSTAKEAGWQWRIPLQHRTGNGYVHCSEFISEDEATETLMGSLDGEAQADPRTLRFVTGRRKKFWDKNCVAIGLSAGFMEPLESTSLHLIQYGILRLIALLPDSEMSPLLAREYNRQTADEYARIRDFLILHYKATTRDDAELWRYCSAMDIPESLQYKIDHFRNYGLLVADERELFANPSWIAVYMGQDIMPRRAPAITEMRDGVPVAQRMQMISQAMREAVAQMPTHADFLARHCPSPLAS

SEQ ID NO: 84157 - protein, 499 aa, Sphingomonas sp.
  REGION 1..499: note = tr|A0A0Q4EQD8|A0A0Q4EQD8_9SPHN Tryptophan halogenase; OS = Sphingomonas sp. Leaf208 OX=1735679 GN=ASE69_17285 PE=4; SV = 1
MSEFSEAQRTRVVVAGGGTAGWIAAAAIVRQLGPLVDVTLIESDEIGTVGVGESTIPTARSFHAFLGIDEAAFMRATQATFKLGIAFENWGQVGDRYFHPFGSVGRSVAIADFQHFWLEARARGFGGPYGDYSLEQQAAGAGLFGHDEQHSLAYAYHLDATAYARFLRTLAEPWGVRRAEGRIERVERDGEGGDIAALVLASGERIAGDLFIDCTGFRALLTEGALGTGFEDWSEWLSTDRALAVQTETVAPPVPYTRAIAHGAGWRWQIPLQTRTGNGLVYSSAHMTDDEAHATLIGALDGRPLFEPRPLRFRSGMRRKAWNRNCIALGLAAGFIEPLESTSIHLIMNAVIRLIQLFPFRGDDHVALAARFNAQSRHEWEHVRDFIILHYHVTQRDDSPFWRDCAHMTIPDSLAGRIALFTKTAGAWQGQDDLFRIDSWVSVMLGQGVEPRAHHRIARIIKEQELQTSFADLSRGITSTMRALPRHCDFLAQYCLADG

SEQ ID NO: 84158 - protein, 495 aa, unidentified
  source 1..495: note = Lacimicrobium alkaliphilum
  REGION 1..495: note = tr|A0A0U3B3W6|A0A0U3B3W6_9ALTE Tryptophan halogenase; OS = Lacimicrobium alkaliphilum OX=1526571 GN=AT746_17575; PE = 4 SV=1
MQDNVVTKVVIAGGGTAGWVAAAALSKRLNGLVEVVLVESEDIGTVGVGESTIPPVQLFHNLLGIDEQEFMRATDATFKLGISFENWGQVGDKYMHPFGTTGKGSFLADFQHYYLHGLQLGIDAPLGDYCYELQAAQAHKFGKTDSSGISYAYHLDAGRYARFLRGFSEAQGVTRIEGKIAEVRQHANGDISSLVLESGQELEGDLFIDCTGFRALLIEQTLQTGFEDWGHWLPCDSAVVVQTESADTLPPYTRAMAHDAGWQWRIPLQHRVGNGLVYASDYLQEEQARERLLGNLETQALMTPRVLRYKTGRRKLFWNKNCVALGLSSGFIEPLESTSIYLFMNGVIRLLRLFPFNGVTQPLIDEYNQQSISELEKIRDFIILHYHQTERDDSEFWRYCRNMTIPDSLAHRMELFREGAHAFQTGEELFRLESWTHVMLGQRLIPKSYQKIVSTLSEQQLTQHLQGIRRTINQVVARLPGHSDFIGRYCPAEGE

SEQ ID NO: 84159 - protein, 518 aa, unidentified
  source 1..518: note = Colwellia beringensis
  REGION 1..518: note = tr|A0A222GAD5|A0A222GAD5_9GAMM Tryptophan 7-halogenase OS=Colwellia beringensis OX=1967665; GN = B5D82_14365 PE=4 SV=1
MTKSLKHVVIVGGGSAGWITAGTIAAMHNSQSPQGIQVTLIESPDVNIIGVGEGTWPTMRTTLKKMGISETDFMRQCDVSFKQGAKFSKWVTGEEDDFYYHPLVLPEGYFDLDLFNYWQKNYKDKSFSDAVCFQEQLCEKGLAPKLITSPEYAAVANYAYHLDAGKFANFLKQHCISTLGVNYISDHVEDIINTENNDILAVTTKEHGNIEGDLFVDCTGFKSLLIGQHYQVPFISKKDILFIDTALAVQIPYEEGKDDIASHTISTAQDSGWIWDIGLPSRRGVGHVYSSRHTNQEAAEKALRAYLRQSIGDKSDTLTFRKIDINPGVRETFWVNNCVAVGLSAGFLEPLEASALVMIELAATAISEQLPANRATMDIVAKRFNERFSYNWDRIIDFLKLHYVASKREDSAFWRDNRDKDTIPESLQELLSLWRYRAPSEYDFSHKREVFSAASYQYVLYGMAFDFTTPVCKTNEKHEQLAQRLFAANENKIEKYTTALPTNRELISKINQYGFSKI

SEQ ID NO: 84160 - protein, 509 aa, Pseudoxanthomonas sp.
  REGION 1..509: note = tr|A0A1H0ZXH6|A0A1H0ZXH6_9GAMM Tryptophan halogenase; OS = Pseudoxanthomonas sp. CF125 OX=1855303; GN = SAMN05216569_0634 PE=4 SV=1
MDRSDKGQIRKVVIAGGGTAGWLAACALSHQFRDRLDITLVESEQIGTVGVGESTVPPIRTFHRFLQIDEQEFLRAVAGTFKLSISFENWRRPGERYIHPFGTTGQGTLVCPFHHFWLDSLRRGMQSELGDFCLETVASRDDRFALPQQPQVNYAYHFDASLYARFLRRIAEGYGLKRIEGKIHEVRQHADSGFVEALVLEDGQVVEGDLFIDCTGFRGLLIEQALHTGYEDWNQWLPSDRAVAVQTESVGPPVPYTRAIAHEAGWRWHIPLQHRVGCGLVFSSRHMSDDEARAKLLQDVGAKPIKDPWLVPFRTGRRLKAWNKNVVSLGLASGFIEPLESTSIHLAISAVVRLIQLFPFDGIAPSLVDIYNDVSRAEMEHVRDFIILHYHANQRDEPMWKECREMELPESLAMRLRAWRERAHAWQGADELFRVDSWTHVLLGQGIEPEQHHPLARALPDQDMRKLLDSIRQPIDRTVAQMPSQQEFIERYCKAAPEVWGARPSPATT

SEQ ID NO: 84161 - protein, 509 aa, Sphingomonas sp.
  REGION 1..509: note = tr|A0A0Q4F724|A0A0Q4F724_9SPHN Tryptophan halogenase; OS = Sphingomonas sp. Leaf208 OX=1735679 GN=ASE69_00150 PE=4; SV = 1
MDGLGQHIVILGGGTAGWMTACLIAHRWRGRGVRVTLVESPEIGIVGVGEGSTPQLKHFFDTLGIAEAEWMPACDATYKLGIGFEGWSDREGYERYFHPFPTALDGHTAPQFFYNARARRTGRNVDAHPDQFLLPARLAAQNRAPQPAANFPFEVSYGYHFDAYKVGAFLATHATETQGVVHLQRRIASVERASTGEITALIDTDGERIAGDFFIDASGFRSTIFSALDVPFVSYADVLFNDRAVVMPTAHTPGAPIPSQTRATAMSAGWAWHIPLTSRNGNGYVYSSRHLTEAQAEAELRAHIGVDTGEARHLTMRVGRVRDSWSHNALAVGLAQGFLEPLEATALHLVIATVEAFLDGIDGGGATDAVRTAFNTRIAARYDGVRDYIVAHYRLNQHHDDPTGYWAEALRVDALSDDLKMLMSTWFTGADMVAAIDRAGLGRYYSAISWHCLFAGYGTFPDTARLIPPGTDIDPINLPKIDDFLTRCASNFGSHASRLRAAADHKDHV

SEQ ID NO: 84162 - protein, 514 aa, unidentified
  source 1..514: note = Novosphingobium barchaimii
  REGION 1..514: note = tr|A0A561H2M6|A0A561H2M6_9SPHN Tryptophan halogenase; OS = Novosphingobium barchaimii OX=1420591 GN=FHW33_11911; PE = 4 SV=1
MVHPIRNIVIVGGGTAGWLTAGVIAARHRTRIGKDLTVTLVESPNIPIIGVGEGTWPTLRTTLSRMGVSETDFVRECDAAFKQGARFARWTTGRADDGYYHPLMLPQNFGQVNLAPHWLADETDESFCDNVCAQGRICDDGLAPKTIATAEYDGLANYAYHLDAGKFAPFLQKHCCEKLGVRHVLADVEHVKMKDDGDIRAVGTAQAGEIEGDLFVDCTGLKALLISGAMNVPFRDCGDVLFCDTALAMQIPFDLPDDPIASHTVSTAQSAGWIWDIGIQTRRGIGHVFSSSHITDEQAERELRAYIGPAADRLDARKIKIRSGHRETFWKGNCVAVGLAAGFLEPLEASAIVLVELSAKIIAEQLPACREVMDIVASRFNATTQYRWGRIIDFLKLHYALTQRTDSDFWRDNRRKESIPERLQELLLLWQYQSPWFHDEFDRVEEVFPAASYQYVLYGMGFHTHVDSAGLMRDAALAGRARRENAAATARLRSALPRHRDLIDKIVSYGLQPV

SEQ ID NO: 84163 - protein, 501 aa, Sphingomonas sp.
  REGION 1..501: note = tr|A0A0Q4ES59|A0A0Q4ES59_9SPHN Tryptophan halogenase; OS = Sphingomonas sp. Leaf208 OX=1735679 GN=ASE69_00540 PE=4; SV = 1
MAEQRIRKVVIAGGGTAGWLAAAALSRQLGQLLDITLVESEEIGTIGVGEATIPTMRAFHTILGLDEREFMRATKATFKLGISFENWARDGDRYIHSFGDIGKSTWMGDFHHFWLAAKADGNSSEIGDYCLELQAAKAERFALPSEGQINYAYHLDAGLYARFLRARSEANGLKRIEGRIASVDRDGETGFIRALVLESGERVEGDLFIDCTGFRGLLIEGTYAAGYEDWSHWLPTNSALAVQTAAAGPAHPYTRAIAHDAGWRWRIPLQHRVGNGLVYASDHLSDDEAHARLLATIDGTPLTEPRLIRFRTGRRRQVWMGNCVALSLASGFVEPLESTSIHLIMTGITRLMQTFPFGGIAPALVKRYNDQAQAELERVRDFIILHYHLNERPEPFWAARRDMPIPDTLVERIALFTEGAQAYQGGDDLFRVASWVQVMLGQRLTPRDHHRLGSIMGGPQLAGVLTNIRSTIADAVAGMPTHQQFLERYLAAPGTAPARVR

SEQ ID NO: 84164 - protein, 500 aa, Massilia flava
  REGION 1..500: note = tr|A0A562PGJ2|A0A562PGJ2_9BURK Tryptophan halogenase; OS = Massilia flava OX=871742 GN=IP92_05122 PE=4 SV=1
MEQARDSKPVRRVVIAGGGTAGWMVAAGLSKSLGKLLDIRLIESDEIGTVGVGEATIPTLMNFHHVMEINEQEFMAETMATFKLGISFENWRNVNEDYIHSFGTTGTDHWTAGFQHFWHKGRERGLAGDYGDYCLELKASLQNKFAHLPNAGMNYAYHMDATRYAKFLRKFSERYGVQRVEGKIAEVRKDLNTGDIRALRLENGAELEGDLFIDCTGFRALLIGQAMGVGYEDWSHWLFNDSAVALQTKSVRDAVPLTRSIARDAGWQWQIPLQHRVGNGLVYSTRYTDDETALRTLQAAVDGEPLMTPRVIRFKPGQRKETWKGNCVAIGLASGFLEPIESTSIHLIQRGIIRLMQMFPQHGISQADIDEYNKQADYEIQHIRDFIILHYTVTNRRDTPYWRDAAAMKLPASLQHRIDLFRETGRVFRVPNELFAENSWIQVMLGQGILPASHHQTADLMGDEELARFLGNISGSIDRTVAQLPSHQRYVEQYCSGTGW

SEQ ID NO: 84165 - protein, 505 aa, Xanthomonas oryzae
  REGION 1..505: note = tr|A0A0M1KP83|A0A0M1KP83_9XANT Tryptophan halogenase; OS = Xanthomonas oryzae OX=347 GN=ADT25_05710 PE=4 SV=1
MTQAQIRKVVIAGGGTAGWIAACALSHQFRDLLDITLVESEQIGTVGVGESTVPPIRTFHRFLQIDEQEFLRAVAGTFKLSISFEHWRSQGECYIHPFGITGQSTLVCAFHHLWLESQRRGMPGSFGDYCLETVASRVDRFALHGEPAVNYAYHLDAALYAKFLRARSEACGVKRIEGKIQQVTVQPHSGDVASLVLEDGHVIEGDLFIDCSGLRGLLIEQTLHTGYEDWSHWLPCDRAVAVQTEAVGPPVPYTRAIAHEAGWRWHIPLQHRVGNGLVFSSKHLSDDEAHAKLLRDVAAPPMKDPWMVPFRTGRRLKAWNKNVVSLGLASGFIEPLESTSIHLTISAVVRLLALFPAEGIAPSQVQLFNDVSRAEMEHVRDFVTLHYHATQRDEPLWKQCRAMELPESLALRLRAWRERAHAWQGADELFRVDSWTHVLMGQGIKPEQHHPLTRAFSDHDLRRLLDGIAQPIQHAVQQMPSQHAFIERYCKAGAQVWGMRSPVPA

SEQ ID NO: 84166 - protein, 505 aa, Sphingomonas sp.
  REGION 1..505: note = tr|A0A0Q4EXJ0|A0A0Q4EXJ0_9SPHN Tryptophan halogenase; OS = Sphingomonas sp. Leaf208 OX=1735679 GN=ASE69_06120 PE=4; SV = 1
MSEHTIREVVIVGGGTAGWMAAAALSKFLGGGQGQGQPRIRLIESEEIGTVGVGEATIPTIATFNQMLGIDEDDFVAKTQGTFKLGIEFVDWRKIGERYFHPFGQFGHDIEGLNFHQFFLKLAKQGKCADIWHYAPCAVAAAAGRFARQSPDPRSPFGTLPYAFHFDAGLYARYLRSYAEARGVERIEGRIVDVALRGEDGFVEALTLEDGRRIEGELFVDCSGFRGLLIEGALKTGYEDWRHWLPCDRAVAVPTANVGDPVPFTRATARSAGWQWRIPLQHRTGNGYVYSSAHISDEDAQATLLSTVEGSPIADPRRLSFVTGRRKRFWNRNVVALGLSGGFLEPLESTSIHLIQTGIAKLLALFPDRRFLQVEAGEYDRLMGSAYDGVRDFIILHYHATTRDDSPFWNHVRTMTVPDSLRRKTELFQAKGRFFRYDDELFSLASWVAVMLGQGVTPEGYDPIVDGLDERKLVEAVERMRLGIRQTIAQMPSQSDYIRAHCAAI

SEQ ID NO: 84167 - protein, 516 aa, Sphingopyxis sp.
  REGION 1..516: note = tr|A0A0W1EI94|A0A0W1EI94_9SPHN Tryptophan halogenase; OS = Sphingopyxis sp. HIX OX=1759074 GN=ATE62_20765 PE=4 SV=1
MTGQQVYRIVILGGGTAGWMCAAGLSRLLPAADYDITLVESDEIGTVGVGEATLPHIKTFNDMLGIDEAEFMRETMGSFKLGIEFVGWKAPGERYIHPFGTFGDRWAGSDFQHAWARARLAGTDTRSLQDYSFAVAAARANGFEHPNEDPKSIRSTYAYAYHFDAGLYARFLRTWATARGIRRMEGKVVDVGRDAESGDVGHVTLESGAVVAGDLFVDCSGFRSLLLGQTMGVPWIDWSEWLPCDRALALPCTGVAPLTPYTRSTAQRGGWTWRIPLQHRTGNGYVFSSHYCGEEEARETLLGAIDGEAMDEPRLLRFQAGRRASGWAGNVVAIGLSSGFLEPLESTSIFLIQAATTDLAALMPRRGEKVDPRLVAEFNRLFEIHYDRTRDFLVLHYTANARIGEPLWDHVRHMALPDSLAHKIALFRESAIAPDYKLGLFSRDSWLSVLEGQGVIPSATNLLTHRQPDTELQARLDDLAERIAINAADMTPHAEFIAGYCAAAGIAVPGAAASAA

SEQ ID NO: 84168 - protein, 506 aa, Xanthomonas campestris
  REGION 1..506: note = tr|Q3BMA5|Q3BMA5_XANC5 Putative tryptophan halogenase OS=Xanthomonas campestris pv. vesicatoria (strain 85-10) OX=316273 GN=XCV4377 PE=4 SV=1
MIPAPLRNIVIVGGGTAGWMAAAAFARVLGPTFKVQLIESDQLGTVGVGEATVPHIKAFNNLLGIDEAEFVRQTQGSFKLGIEFVDWQRPGTAYMHGFGTQIGHPLGLLPFHQYWIKQHARGRAQPLGAYTLNTVAAARGKFMTSAGDVPANSPLANIAYAYHFDATQYAHFLRRYSQQRGVTRIEGLVEQVQLHPESGHVQSLQLASGQTVHGDLFIDCSGFRGLLIEEALHTGYHDFTHWLPCDRALAVPCEKVGPPTPYTRSTARAAGWQWRIPLQHRTGNGYVYCSAHISDDEAAATLLANLDGKPLADPRPLRFTTGRRKQCWNRNVVALGLASGFLEPLESTSIHLIQSGISKLLELFPREGISPVLVQRYNDRLAFEFDRIRDFLLLHYHATERDDSAFWRHCRHMPITPELQTTLDLFRDSGRFYRNAEEMFAEISWVQVLVGQGILPQGYHPLVDQVPDRDAEGFLASVAQTISRCVDVMPSHQQFIDRYCKAAALP

SEQ ID NO: 84169 - protein, 477 aa, unidentified
  source 1..477: note = Lacimicrobium alkaliphilum
  REGION 1..477: note = tr|A0A0U3B3M2|A0A0U3B3M2_9ALTE Tryptophan halogenase; OS = Lacimicrobium alkaliphilum OX=1526571 GN=AT746_17125; PE = 4 SV=1
MAAAAISKLLGKNLEICLVESDQIATVGVGEATIPPLLTLHKLLEIKEQDFMVATQATFKLGISFENWRDVNEDYIHSFGTTGQDCWAAGFQHFWLKGKQQGIASDYGDYCPELLASLAGKFAVQPKSGLNYAYHFDAGLYAQFLRKMAEKHGTRRVEGKISEVQCCNQTGMIDRLILESGEQLEGDLFIDCTGFRGLLIEQTLHTGYLDWTHWLPCDSALAVQTENTKPPIPYTRSIARESGWQWRIPLQHRTGNGLVYCSRYMSDEQAEQTLLDNLEGDPITQPRQIRFRTGQRRLHWNKNCVALGLASGFIEPLESTSIHLIQRGIVRLMQMFPHTGIVQSDIDEFNGQMFSEVENIRDFIILHYHVTNRRDSAFWRHCAGMDIPDSLAHRIELFRETGKVFKVPNELFGENSWTQVMLGQGIMPQQYHPIVDQMSDEELSHFLNQIRTQSRRMVDQLPSHQDFLRHYCPAAMP

SEQ ID NO: 84170 - protein, 508 aa, Pseudoxanthomonas sp.
  REGION 1..508: note = tr|A0A1H0ZKB6|A0A1H0ZKB6_9GAMM Tryptophan halogenase; OS = Pseudoxanthomonas sp. CF125 OX=1855303; GN = SAMN05216569_0428 PE=4 SV=1
MSENAIKSIVIVGGGTAGWMAAAALSKVLGDKCAIRLIESEAIGTVGVGEGTIPHIRLFNSLLQIDEADFVRNTQGTFKLGIQFNDWNRLGDSYMHGFGNEIGRGLGLLPFHQYWIKAAKTGKAAGIDAYLLSALAAPRGKFMVSASDVPAGSPLASIAYAYHFDAGLYARYLRGYSERRGVQRTEGIVARVLLDAESGFVDAVEMENGEVVHGDLFIDCSGFRGLLIEETLKTGYIDFTHWLPCDRAMAVPSENAGPAAPYTRATAREAGWQWRIPLQHRTGNGYVYSSAHISDDEATATLLKNLDGRALDDPRPLRFTTGRRKKFWNRNVVALGLSSGFMEPLEATSIHLIQVGIMRLLSLLPREGVNDVLVDRYNAQLSFEFERIRDFLILHYHATQRDDTAFWRQCAAMSIPAELQASIDLFRDSGRFFRNADEMFAEMSWVQIMIGQGILPQSYHPLVDQLPDEELARFMASIGGTISDCVDVMPMQQAFIDRYCAATPPTAM

SEQ ID NO: 84171 - protein, 497 aa, unidentified
  source 1..497: note = Lacimicrobium alkaliphilum
  REGION 1..497: note = tr|A0A0U3AKM8|A0A0U3AKM8_9ALTE Tryptophan halogenase; OS = Lacimicrobium alkaliphilum OX=1526571 GN=AT746_09735; PE = 4 SV=1
MSNNPIQKLVILGGGTAGWMAASSLKDTFPQLNITVVESSEIGTIGVGEATIPTIRRFYSMLGLTDEEVIRATQGTCKLGIQFNGWLSPKSSFLHPFGSYGEALNGIPFHHYWLKHNSAESAGQLEQYCVAVQLAKQNKFCLPPSKPQSALSVFDWALHLDAGLFAGLLRRHAEENAVQRIDATVTEVETSAENGFITALKLDNGQRVEGELFLDCSGFKGVLIEQTLKTGYQDWSRWLLCDSAVVAQSELQGDPAPYTQANARTAGWQWKIPLQHRQGNGLVYSNTHQTDKQAEAELRANIEGKLLQDPRVLRFTPGRRNKSWNKNCIALGLAAGFFEPIESTNIALIETAIEKIKLLFPDTGFQPALRDEFNYRIEKEYESVRDFVILHYCLNQRQEPFWQEYRQISIPDTLAHRIELFKANGMLPRQRHEIFQPNSWLALFDGYQCYPLRYDPSIEKIPLDLIRQGLAGMRRSIASAVENSPPHTAYLQRCQQG

SEQ ID NO: 84172 - protein, 513 aa, Sphingomonas sp.
  REGION 1..513: note = tr|A0A1G5T6X2|A0A1G5T6X2_9SPHN Tryptophan halogenase; OS = Sphingomonas sp. NFR15 OX=1566282 GN=SAMN03159340_01024; PE = 4 SV=1
MQSVQNIVIVGGGTAGWLAAGVIAAKHQARMPADFTVTLIESPNTPIIGVGEGTWPTLRTTLAKIGVSETDFFRECNASFKQGARFARWTTGEADEGYYHPLMLPQGFQRVNMAAHWLADRHDQSFCDAVTPQGVLCDDGLAPKTIATPEFDAVANYAYHLDAGKFAGFLQRHCTTKLGVRHVLADVTEVRQAENGDITSLVTEQAGEIAGDLFVDCTGFAALLIGKTLGVPFKSCADVLFCDTALAIQVPYESEDAPIASHTISTAQSSGWIWDIGLPSRRGTGHVYSSSHISDEDAERELRAYLGPVGADADVRKIKIRSGHRETFWKNNVVAVGLAAGFLEPLEASAIVLIEMSTKLIAEQMPVCREVMDIVAARFNATTHYRWGRIIDFLKLHYVLTKRTDSDFWRDNVRADTIPDRLRDLLTLWKYQPPWFHDEFDRVDEVFPAASYQYVLYGMRFGTEVSRAALSAEARLAEQTRREAAVQTQRLRAGLPRHRDLIRKIIDHGLPAI

SEQ ID NO: 84173 - protein, 506 aa, Rhodanobacter sp.
  REGION 1..506: note = tr|A0A154R1U0|A0A154R1U0_9GAMM Tryptophan halogenase; OS = Rhodanobacter sp. FW510-R10 OX=1524462; GN = RhoFW510R10_15595 PE=4 SV=1
MTDPRIRNIVIVGGGTAGWMAAAAFAKVLDAGCSIRLVESEEIGTVGVGEGTVPHLKLFNNLLGIDDVEFVKNTQGTFKLGVQFNDWGRLGDSYVHGFGTIGHDVGLLPFHQYWIKARRAGKADEIGAYSLNTAAAPRGRFMPSASDAPPGSPLANIAYAYHFDAGRYARFLRGYAEQRGVRRTEGKVAQTVLRGDDGFVEAIVLESGERIEGELFIDCSGFRGLLIEQALHTGYLDFSHWLPCDRALAVACEKVGPPTPYTRASARPAGWQWRIPLQHRTGNGYVYSSAHVSDDEAAATLLGHLDGEPMGEPRLLRFTTGVRRQAWNRNVVALGLAGGFMEPLESTSIYMIQSGIARLLNLFPQRDFSPVLIDRYNAQSRFEYEHIRDFLILHYHATERDDTPFWNQCRTMSIPPQLADNIRLFRDSGRFFRDGEEMFATPSWVQVMLGQRIAPRSYHPLVDQMPDAELAGFMASVGHVVASCVEVMPAHQAFIDRCCTAPAMTA

SEQ ID NO: 84174 - protein, 497 aa, Porphyrobacter sp.
  REGION 1..497: note = tr|A0A4Y6VYU7|A0A4Y6VYU7_9SPHN Tryptophan 7-halogenase OS=Porphyrobacter sp. YT40 OX=2547601; GN = E2E27_08165 PE=4 SV=1
MGQGKPVRKVVIAGGGTAGWTVAAALVKNLGPLIDIVLVESDAIGTVGVGESTIPTARRFHELLGIDETAFLRATGASFKLGISFENWTREGESYFHSFGIMGRSTWMADFQHMWLEARALGVAGPLGDYSLETQAALAGKFRTGGNVPLNYAYHLDATAYGLFLREFAEKLGVTRHEGRIRDVRRDGESGDIAALALDDGSLIEGDLFIDCTGFRGLLIEETLETGFEDWTHWLSTDRALAVQTAAAGPARPYTRAIAHDAGWQWQIPLQHRVGNGLVYASAHLSDDAALDRLKGRLEGEMLTEPRVIRFRTGARAKAWNRNCIAIGLSSGFVEPLESTSIHLIMIAVTRLMQLFPFGGVTEALADRFNALSRTELEGIRDFIILHYHLNAREGEPFWDACRTLEIPESLASRIALFRESATAFQASDELFRIDSWVQVMLGQGLYPQAHHRLGSMIGRERLDRSLSDMARSMKQAVVGLPSHQDFLDHLSAPVPA

SEQ ID NO: 84175 - protein, 417 aa, Amycolatopsis sp.
  REGION 1..417: note = tr|A0A229TBY0|A0A229TBY0_9PSEU Tryptophan halogenase; OS = Amycolatopsis sp. H5 OX=1905142 GN=CF165_13090 PE=4 SV=1
MAEEFDVLVVGGGPAGSTTAGLLAQRGHRVLVLERERFPRYHIGESLITGMLSVFDELGVRERIERAGFPRKNGLSIVWGANRDLWNVDFAEIDGPYDYSYHVRRAEFDEILLDHARQLGVTVVEEATVKEPILDAGRVTGVRYECGGEDVEATAPLVIDASGQSRVLSRRLTTVEWADDLRNIAYWTYFENTADLPAGQLGNILVERVTHGWFWAIPVDDATRRLSVGYVTPTASLVSGGPSIGELYDAGVAESKQLRLLLAGATRVGDYRSTRDWSYRGRAVTGPGWLSTGDASGFIDPLFSGGVCLAVLGADAAAAAADTALRRPDLAGRAMRAYDAGIDNMVSSFLDYVRFFYDPTRDREDYFQQARSMADFNERYPHARAAFVAVISGRLAMSELFRIPGVDDTALAGSIET

SEQ ID NO: 84176 - protein, 506 aa, Mitsuaria sp.
  REGION 1..506: note = tr|A0A2G9CBI7|A0A2G9CBI7_9BURK Tryptophan halogenase; OS = Mitsuaria sp. HWN-4 OX=2049333 GN=CS062_12300 PE=4 SV=1
MRSHALTKIVIVGGGSAGWIAAAPLARMLCRPGQPDHCEVTLVESAEIGTVGVGEATLPTIQFYNQLLGIDEADFVRQTQASYKLGIEFRDWGRLGHRFFHGFGGFGPGIHNRPLWAYWLRLREQDPTLPDYEEWSTATMMARGLRFMPPRRGEASPASAFDYAYHFDAALYGGYLRDYALRHGAQRVEGTIVRVETSEQNGFVTAVHLRDGRRIEGDFFIDCSGFRALLIDGAMHSPYEDWSHWLPCDRALAVPCARTEPMTPFTSSTARGAGWQWRIPLQHRTGNGLVYCSAHLDDEAANELLLANLDGPALAEPRPQRFVTGRRKRAWVRNVVAIGLSSGFLEPLESTSIQLIMDGVSRLTALLPDRDVAPALADEFNRQMAYRYESVRDFIILHYKLSERSDSEFWRQCAAMRIPDGLAHQIQLFRDTGRVAILEPEGFGESSWVSLLLGLGVVPLRLDPYVDLVDPRVVRRHLHGVHDAIKRTVQAMPTHSEFLARMSGGG

SEQ ID NO: 84177 - protein, 542 aa, Nannocystis exedens
  REGION 1..542: note = tr|A0A1I1WHS2|A0A1I1WHS2_9DELT Tryptophan halogenase; OS = Nannocystis exedens OX=54 GN=SAMN02745121_02260 PE=4; SV = 1
MTEVAGPDAVDVLVIGGGPAGSTAAAVMAKAGLRVLLLEAGAHPRAHVGESLLPGIIPILAEIDALAEVEAAGFGRKTGSTLWGWGKTPRWDLWFYDSDAYDHAWLVERARFDAILFAAATRAGATVLDRAVARTLSWDGERLVGATWERAGQSHETRARLVIDATGQSMLLGRAKGRREEIAGLRHQAMWAHFTGCVGVPPPRHEQALFVAEAEQWWWFFPIGGGKASVGVVQLDAGEARGAPRRDFDALLAAARELGPVLGPAATRATPVRHERDWSYRMSEVTGPGWIQIGDAAGFIDPVLSTGVLLAMHSAWHAGRTAIAVLRDGADEASARAKYQAHHREMFGDLLRMVRFYYQQNLYREDYFWESKRILLTRDTELKPQKAFVVLTSGLVQNLALDEVRDEATARQTARAEGQGRELGEAGPDRLGFVCVHLRERAAAPGQGDLYLLIEPRDPVAPALARTRNFDIGAIAPRHGSDPLRAPTLAPAIRGFVALVQGLDAAVGTTLAEFWRASRVRVGTWLKEHVPANMELVRVFGE

SEQ ID NO: 84178 - protein, 528 aa, Sphingomonas sp.
  REGION 1..528: note = tr|A0A0Q4EQC5|A0A0Q4EQC5_9SPHN Tryptophan halogenase; OS = Sphingomonas sp. Leaf208 OX=1735679 GN=ASE69_17130 PE=4; SV = 1
MGGLSVTDGAGTTHHSGPLRSIVIVGGGTAGWMAATLLARRLDRQSVTITVVESSDIRTVGVGEATVPGIRDFFREIGVTEQEVMAAAQGTVKLGIEFVDWKREGERFFHPFGLYGMRSRGVAFHHYWRKLNAAGQPTPLSDFCLATALAERNLFMRPTDSPVHDLLFFDWAVHFDAGLFAKFLAKKAGEWGVKHVDAKITDVLVDQVTGFISSVDTQCGKTIAGDLFIDCSGFRSLLLGDALGVPYEDWTNLLPCDRAVAMPCERAGPLTPYTRSTALTAGWQWRIPLQHRVGNGYVYASRHISDDEAVATLKGRLEGEALAEPNMIRFRTGRRTAFWQGNCVAIGLAAGFMEPLESTSITLIQTGLEKLLALLPDRSFDPALADEYNRTTGLEYARIRDFLVLHYFANGRQGQPMWDRCRGTALPEQLARKLTLFKARGHLVRYEWESFQDPSWLSMYAGFGIDAAAHDPLADHFSLSDLEAAFERMKGSIRDAVALAEPHETFLKSFAPASTPPASRSMNFAANG

SEQ ID NO: 84179 - protein, 206 aa, Nannocystis exedens
  REGION 1..206: note = tr|A0A1I2IB99|A0A1I2IB99_9DELT Tryptophan halogenase (Fragment) OS=Nannocystis exedens OX=54; GN = SAMN02745121_08544 PE=4 SV=1
MTVEHADCVVLGGGPAGSTFAAIAKKYAPGAKIVLLEKCRFPRWHIGESTIPAANGVLEDLGVYQTMLASDFVKKMGVTFIWGRDRTPWTADYLTLKTISRAGGDASIIEVTGQDFEKLLGPGQTQRTPYSAFNVERSRFDELLLDNARRLGADVREGTKALGAQRVGKSSQHVITWEDDAGNSGSITADFVLDATGLSHLLTKGE

SEQ ID NO: 84180 - protein, 393 aa, Sphingopyxis sp.
  REGION 1..393: note = tr|A0A0W1F8Q9|A0A0W1F8Q9_9SPHN Tryptophan halogenase (Fragment) OS=Sphingopyxis sp. HIX OX=1759074; GN = ATE62_09705 PE=4 SV=1
GFGSIIDGGDFFPHWVKARHHGLGVGLDDFSLTATAAHQGRLFFPDEESERYARADYGYHLPAAAYAKSLRAIARHLGVEIVEAESAGIERGENGIAALLLDGDRRVEAGLFVDVTREASLLHDTPGAAFDSTPSPGNRLLVARAPRFAALPVYSEVRAGANGWTALYPAMAHTHVAHVFSGGVTSDDDALAAAQATSGLPLESVAICPLGAGIAAAPWVQNVVALGEAAAAFDPLHGLPLHALQLGIVHLIAAYPGAGACDARRTEYNRLMRSHFDRVADFQTAHLALQTYIGPFWDAARATPRSAELDHMLAFFRARGELAPHEDESLPPDSWRALLTGHGLLPEGWRPSADRTPPDAVKTHFRKMLGTVREQVLRQPTHDAALARIMQRA

SEQ ID NO: 84181 - protein, 506 aa, Sphingopyxis sp.
  REGION 1..506: note = tr|A0A0W1F468|A0A0W1F468_9SPHN Tryptophan halogenase; OS = Sphingopyxis sp. HIX OX=1759074 GN=ATE62_13800 PE=4 SV=1
MTSEMERVVIVGGGTAGWLAAARIAAARPALSVTLIEAPDIPTIGVGEGTWPTMRATLAAIGIDEGEFLAACDGSFKQGSRFDRWVSGAGDDRYLHPFTPPPPLATRELLAAWQAGEAGQSFAAAMTAQAAVCDLDLAPRQRAMPGYQGAANYAYHLDAGKFAALLMAHAKLRLGVRHVADHVTGVRRGEGDHIAAVVTRTHGEIEGDLFLDCTGHAALLIGGELGVEWIDRSDTLFNDRALAAQVPTDPDSAIASQTVSTAHRAGWIWDIALPTRRGIGCVYASRFLSDDEAEAELRAYIAEQLPHAPEVPVRRLSFPTGHRARFWQGNCLAVGLSAGFIEPLEASAIVMIELSLNALVDNFPASAAVLPIHAQRFNALFRYRWNRIVDFLKLHYVLSRRTEPYWRAQRDPEHIPATLAAMLSLWQDQPPSAWDFPQVDEIFSAESHQYILYGMGVAPPPGLTSSDRAVTALAEARQRARALTAALPTNRDYLGALGAAAATAAE

SEQ ID NO: 84182 - protein, 495 aa, Sphingomonas sp.
  REGION 1..495: note = tr|A0A0Q4ER41|A0A0Q4ER41_9SPHN Tryptophan halogenase; OS = Sphingomonas sp. Leaf208 OX=1735679 GN=ASE69_08005 PE=4; SV = 1
MTDALRSVTIVGGGTAGWMAAVAFGRLLGPAGTRVTLIESDDIATVGVGEATIPPIRTFHAMLGIDEDAFLRATGGSYKLGIRFEGWTRPDESYVHPFGQTGTDIAGVPFAAQWLRALQAGAAAPLAAYSLEACAAEAGRFSRPIANGNSPLSRIGYAYHFDAGRYAAFLRTQAEAYGVVRHEGLVERVERGPAGIAAVHLADGSRIAGDLFLDCSGFRALLIEGAMEAGWTDWSEWLPCDRAVAVPSVADAAPLPLTRAIAERAGWRWRIPLQHRTGNGHVFSSRHMSEDEATATLLAGLHGEALAEPRVIRFATGHRNRFWSGNCIALGLSAGFMEPLESTSIHLVQSGLQHLLRMLPTGAPPAPALVERYNRIMTAEYTRIRDFLVAHYHLNARAEPFWRDRAAAAIPEGLAEKLALFRAGGRIFREADELFNETSWLAVLTGQNAPVSGYDPICDGIPIETAANRLAQIERVVATSLTHMPSHAHALARLA

SEQ ID NO: 84183 - protein, 518 aa, unidentified
  source 1..518: note = Sphingorhabdus sp.
  REGION 1..518: note = tr|A0A2D3REL6|A0A2D3REL6_9SPHN Tryptophan halogenase; OS = Sphingorhabdus sp. YGSMI21 OX=2077182 GN=CHN51_09120; PE = 4 SV=1
MSEAQHIRKIAIVGGGTAGWSAACLLGRIFARDNTEITLIESSAIPTVGVGEATIPPIFEFLQLLEIDPVDFVRETQSTFKLAIEFRDWLKVGHSYWHPFGNFGLTIDRRPFHHYWWKNQAEGHDESVADFCPSIALAEKNKFLFPPADGQFPGGALSYALHFDAGLVAKYLRQVSEGLGVTRLDRKVQSATLNDRGHIGELLCDDGSRVAADLYIDCSGFRGLLIEQSLNAGYEDWTNWLPCDRAVAVQSEAVLPRTPYTISTAREAGWQWRIPLQNRVGNGYVYSSAFISDADAQDRLVGSLDGKPLADPRVIGFTAGHRKKFWDGNCVSIGLSAGFLEPLESTSIHLIVTGLNRLLDYFPDRNFDPSLQAAYNRETLTEYEHIRDFLLLHYYPNQRVGEPFWDQVRHAPLPDSLATKMEMFRKNGRIISRRRELFHDLSWFFVARGMGITPESYDPLVDIPDFADVRDVMGQVGDAVGRLADAAPTHDQFLDALITPGNHRRPAFHAPSISGFGR

SEQ ID NO: 84184 - protein, 538 aa, Burkholderia sp.
  REGION 1..538: note = tr|A0A228QCI4|A0A228QCI4_9BURK Tryptophan halogenase; OS = Burkholderia sp. HI2714 OX=2015359 GN=CFB82_38225 PE=4; SV = 1
MSNPIKHIVIVGGGTAGWMSASYLVRALQQQASITLIESEAIPRIGVGEATIPNLQKVFFDFLGIPEREWMPQVNGAFKSAIKFVNWRKSPDRSRDDHFYHLFGSVPNCDGVPLTHYWLRKREQGFQQPMAYACYPQPDALDAKLAPCLLDGTRQMPHAWHFDAHLVADFLKRWAVARGVKRVVDEVVEVHLNERGDIASLSTKAGRTLEADLFIDCSGMRGLLINQALKEPFIDMSDYLLCDSAVASAVPNDDARVGIEPYTSAIAMNAGWTWKIPMLGRFGSGYVFSSKFTSRDQATADFLKLWGLSDKQPLNQIKFRVGRNGRAWVNNCVAIGLSSCFLEPLESTGIYFIYAALYQLVKHFPDTGFDPRLRDAFNAEIVYMFDDCRDFVQAHYFTASRDDTPFWLANRHDLRLSDAIKDKVERYKAGLPLTTTSFDDATYYETFDYEFKNFWLNGNYYCIFAGLGLLPDRSLPLLRHRPESIDKAEAMFARIRREAERLRTSLPTNYDYLRSLCDGDAGRARSQPGPAVVAPETL

SEQ ID NO: 84185 - protein, 494 aa, Alteromonas sp.
  REGION 1..494: note = tr|A0A1J0RY22|A0A1J0RY22_9ALTE Tryptophan halogenase; OS = Alteromonas sp. Mex14 OX=1917157 GN=BM527_17825 PE=4; SV = 1
MASTQTKKKQRLVIAGGGTAGWMAAAAFTRLLGKEVDVTLIESSEIGTVGVGEATIPTLVFFHKLLKINEQEFMAQTNATFKLGINFENWKDLEHAYLHAFGVTGKDCWAAGFQHFWMRGLKEGLATDFGDYCLERKAAEANKFAHLPNNGLNYAYHIDATRYAGFLRNLAEKEGLRRIDSTIKEVTTREQDGFITSLTLASGEVIEGDFFVDCTGFKGLLIEKALHTGYEDWSHWLPCDSAVAVQTESVGEPIPYTRCIAHEAGWQWRIPLQNRVGNGMVFCSNYFSDDEVIEKLLNNVEGKPLNDPRVIHFRTGKRRKQWNRNCLALGLASGFLEPLESTSIHLIQQGIVRFLRMFPTAGIVQEDIDEFNRQADFDIEHIRDFIILHYHVTNRTDSPFWRHCRQMDIPASLRHRIDLFKKTGRVFREGSELFDDSWQQVMIGQGLMPQSYHPIVDTMSRQELETLLNSIKQGIEKTVAKLPPHQDYITRFCG

SEQ ID NO: 84186 - protein, 509 aa, Xanthomonas oryzae
  REGION 1..509: note = tr|A0A0M1MRV5|A0A0M1MRV5_9XANT Tryptophan 7-halogenase OS=Xanthomonas oryzae OX=347 GN=EYR26_22860; PE = 4 SV=1
MIPAPLRNIVIVGGGTAGWMAAAAFARVLGPTFNVQLIESEQLGTVGVGEATVPHIKAFNNLLGIDEAEFVRQTQGSFKLGIEFVDWQRPGTAYMHGFGTQIGHPLGLLPFHQYWIKQHARGKAQPLGAYTLNTVAAARGKFMTSAGDVPANSPLANIAYAYHFDATQYAHFLRRYSQQRGVTRIEGLVEQVQLHPESGHVQSLQLASGQTVHGDVFIDCSGFRGLLIEEALHTGYHDFTHWLPCDRALAVPCEKVGPPTPYTRSTARAAGWQWRIPLQHRTGNGYVYCSAHISDDEAAATLLANLDGKPLADPRPLRFTTGRRKQFWNRNVVALGLASGFLEPLESTSIHLIQSGISKLLELFPREGISPVLVQRYNDRSAFEFDRIRDFLLLHYHATEREDSAFWRHCRNMPITPELQTTLDLFRDSGRFYRNAEEMFAEISWVQVMVGQGILPQGYHPLVDQVPDRDAEGFLASVAQTIAHCVDVMPPHQQFIDRYCKAAALPCGG

SEQ ID NO: 84187 - protein, 541 aa, Corallococcus sp.
  REGION 1..541: note = tr|A0A3A5G407|A0A3A5G407_9DELT Tryptophan 7-halogenase OS=Corallococcus sp. H22C18031201 OX=2249217; GN = DRW03_15495 PE=4 SV=1
MDKNSSENDNRVRKIIIVGGGSSGWMAAAYLHKALNFNVDITLIESPRIPRIGVGEATIPTIKEELFDFLQIPEEEWMSECKATYKLGIRFQNWKKPASQGGDHYYHNFGEMPEVKGIPLSHIWMYGRQRQGRTDSMEYACYPTSPICDALKSPRFMDGSKAVHYAYHFDALLMANYLKKWSIERGLTYISDDIVETPLTEDGSIKCLKGESGRVYEADLYIDCSGFAGLLIEKALGEPKITFHDSLLTDRAVAVNIPSDSATEGIRPYTTASAFSSGWTWEIPLYGRSGNGYVYSSAFQTPEEAEREVRAWFGKKVDNLDVRHIKFVSGRRRRSWVKNCVSFGLASSFLEPLESTGLYFVYAALYQLVACFPNKQIEPALRDKFNERVSYMVDDVRDFIVLHFCTSPRTDTPYWRANQNELKLPETLKEVLELQRAGIPIRRSYASNEALYASFEAGFDRFWTNSNFQSIFAGVGYLPRQPMPLLQHRPDILAEAERVFDDVRKKTSQMMSRLPSQYDYLTALYARGARPMEEASRQKAS

SEQ ID NO: 84188 - protein, 522 aa, unidentified
  source 1..522: note = Lacimicrobium alkaliphilum
  REGION 1..522: note = tr|A0A0U3BDU3|A0A0U3BDU3_9ALTE Uncharacterized protein OS=Lacimicrobium alkaliphilum OX=1526571; GN = AT746_17110 PE=4 SV=1
MQNSKIRVVVIGGGTAGWLTANLLAADHDTGENGNLDITLVESPDIKTIGVGEGTWPSMRTTLERIGLSETDLICECDASFKQGSLFKNWYSADDSDHYYHPFSLPAGYQQLEFSRFWQQHRKNVDFASAATPQASICRRGLAPKQLSTPEYAFILNYGYHLNAEKFVELLTRHGKKKLGIRHMQDKVTDILWPEHCDKQQSPIKAVRTEKQGLLEADLFIDCSGFSGLLIGKHYQIPMRSVQDVLFNDRALVLQVPYQDEQAPIQSCTLSTAQQNGWIWDIGLSSRRGVGYVYASAYEPQADAEKRLRDYVARDRGEQAASKAEPRELRFNSGYRQQFWKHNTVAVGLSAGFIEPLEASALALIEMSARFISDNLNALEQHMPLVSERFNHRFSYHWQGIVEFLKLHYCLSAREDSAYWRDNRKNLSDSLEQKLMLWQHQSPSVYDKPLAEELFPAASFQYVYYGMQGATTFAPQRRQSQQADQAEQLLQENQHKIQRMTQALPTNRALINDIKQQGLRRL

SEQ ID NO: 84189 - protein, 450 aa, Amycolatopsis sp.
  REGION 1..450: note = tr|A0A229SPW1|A0A229SPW1_9PSEU Tryptophan halogenase; OS = Amycolatopsis sp. H5 OX=1905142 GN=CF165_40610 PE=4 SV=1
MTDFDVVVAGGGPGGSTAAGLVAADGHRVLLLEQEHLPRYRIGESLLPATVHGICALLGVRDEVERAGFVRKRGGMFRWGSNPEPWTFAFAASDRMAGPTSYAYQVERTRFDTILLRNASRLGADVREGHRVLGTLRDGGRITGVRYLDDTGREREATARFVVDASGHTSRLHHDVGGAREYSPDFRNLALFGYFRGGARLPEPDAGNILCAAFDDGWFWYIPLSASLTSVGAVVRRDAAARVQGDPETAFRALIADCPMIRDFLCGVPRATEPPYDRLRVRKDYSYDRTSLRCPGMVLVGDAACFIDPVFSSGVHLATYSALLAARSINSTLAGLVPEERCFAEFEARYRREFGLFRDFLRGFYRLEADQRSYYRHAGAVTGRDDRTAFLDLVGGVSSADFDTLGEVLAEGAQLQLRGLLGADAGEEPPMFPGGLVSTSDGRRWRVPDA

SEQ ID NO: 84190 - protein, 509 aa, unidentified
  source 1..509: note = Lacimicrobium alkaliphilum
  REGION 1..509: note = tr|A0A0U3AIH8|A0A0U3AIH8_9ALTE Tryptophan halogenase; OS = Lacimicrobium alkaliphilum OX=1526571 GN=AT746_09730; PE = 4 SV=1
MQSNNQSRRILILGGGTAGWMTAMIMARHWQKQEVSITLLESSDIGIIGVGEGSTPALKQFFDMMDIREQEWMPACNATYKVGITFSQWSVKPGFESYFHPFKFRLDEQFSQAFFHSALMRRQGIEMPAHPNQFFLAPLLAEKHLAPLPHYNFPFEPAYGYHFDSALLGRFLKEKAQELGVRHKEGKVNQVIRSDSGHILSLLTEQGEQIDAELFVDCSGFAGVLMQKSLKVPFVGFESNLFNDAAVAIPSPPDSHLPSQTLSTAMKHGWRWQIPLTNRNGNGYVYSSKYCSADEAETELRSALGLLNQDVPARHLKMKVGRLEKHWHKNCLAIGLSQGFIEPLEATALFLVQQAAALFVDAYEKGQFTEQNQDAYNASISGYFEGIRDYIVGHYITSSRTDSPYWLDCQNNQQNLSDTLRHILDVWHSGGNLAEELRREHISRYYSPVSWHCLLAGTGTFPDPDKLRPPSPTDKQVNIRKIQEFLYRCSLNFDPQHQYLQQRNAEQMP

SEQ ID NO: 84191 - protein, 517 aa, Massilia sp.
  REGION 1..517: note = tr|A0A1S9A7W5|A0A1S9A7W5_9BURK Tryptophan halogenase; OS = Massilia sp. KIM OX=1955422 GN=B0920_24595 PE=4 SV=1
MVTSTISHVVIVGGGSAGWLTAAVLAARYRPLEHGGLRITLIESPDVAPIGVGEGTWPTMRDTLREAGVSETAFFRSCDAAFKQGSRFNRWVSGAEDDYYFHPFVLPQGYGETDLGRHWQKRHAQVPFADLVSYQPHLCVAGRAPKQVSTPEFAGVANYGYHLDAGKFGLFLKAHCLEKLGVHYVPDHVTGIRSHENGDIAALHTKEHGELEADLFVDCTGMQSMLLGKHYGVPLLSQKHVLFNDSALAVQVPYAGENDPIASQTTSTAQSAGWIWDIGLPTRRGVGHVYSSAHVSDEEAERELRAYLKSTGVTGEIPAPRKLGFQPGYREKFWHRNCVAIGLSAGFIEPLEASALAMVELSAAMLADEMPVTRDQLDACAQRFNETFTYRWERVIDFLKLHYVLSRREDSDYWRDNRRPETIPERLANLLTLWRHRPPSRYDINRIQEVFPAASYQYVMYGMGFRHEPGPALRHEDAALADSYLREAASLTRRMLPALPDNRALIDHIRRHGLQQR

SEQ ID NO: 84192 - protein, 511 aa, unidentified
  source 1..511: note = Variovorax guangxiensis
  REGION 1..511: note = tr|A0A433MI85|A0A433MI85_9BURK Tryptophan 7-halogenase OS=Variovorax guangxiensis OX=1775474; GN = EJP67_10400 PE=4 SV=1
MLNLRNISRAVVIGGGTAGWFSALTLRRLFAPQVEVRVIESPAIGIVGVGEGGLLNLIDALRRNGIGLNEFVRETGAAFKLGFCYEGWRTGEDDDRYYHLFGRPGLQEIDWMEAGFHPLLSGMVHEGMELHRYIPGFASIAINASQQQAAAMLQLGASSGLSASFHFDSHKLADYLRRVAVSRGVVHQQARVEELVCDAQGMARAVRLEGAEETVGLDLLVDASGLARLGIGGKLGVRWRSFSGYLLLDRAVPFHMPHPQPNPSLVTRAIAMPAGWMWQIPLVERVGAGYVFSSAHADEAQVVEEIHRRIGPGIEPMRTLRFEPGHFEQVWVGNVMAVGLASGFVEPLEATSIGQMLEQLRNFERIVAAGDGVVAGHLIDDFNEANARCWSGIRDFLRMHYDCPRRDTAFWRDVAELPLPPSYAELWACFQQRTPRMVDVQNYAINGWQGIFHALNWLFVAAPLGVVPREAAAAELQGLPSASRARVAAYITRMRELGAAGDFSSKGDRSA

SEQ ID NO: 84193 - protein, 505 aa, Xanthomonas oryzae
  REGION 1..505: note = tr|A0A5E8KX45|A0A5E8KX45_9XANT Tryptophan halogenase; OS = Xanthomonas oryzae OX=347 GN=ADT27_07345 PE=4 SV=1
MIQAQIRKVVIAGGGTAGWIAACALSHQFRGLLDITLVESEQIVTVGVGESTVPPIRTFHRFLQIDEQEFLRAVAGTFKLSISFEHWRAQGERYIHPFGITGQSTLVCAFHHLWLESQRRGMPGSFGDYCLETVASRVDRFALHSEPAVNYAYHLDAALYATFLRARSEACGVKRIEGKIQQVTVQPHSGDVASVVLEDGHVIEGDLFIDCSGFRGLLIEQTLHTGYEDWSHWLPCDRAVAVQTEAVGPPVPYTRAIAHEAGWRWHIPLQHRVGNGLVFSSKHLSDDQAHAKLLHDVAAPAVKDPWMVPFRTGRRRKAWNKNVVSLGLASGFIEPLESTSIHLTISAVVRLLALFPGEGIAPSQVQLFNDVSRAEMEHVRDFVILHYHATQRNEPLWQQCRAMELPESLALRLRAWRERAHAWQGADELFRVDSWTHVLMGQGIEPEQHHPLTRAFSDHDLRRLLDGIAQPIQHAVQQMPSQHAFIERYCKAGAQVWGMRSPVPA

SEQ ID NO: 84194 - protein, 490 aa, Massilia sp.
  REGION 1..490: note = tr|A0A1S9A8H2|A0A1S9A8H2_9BURK Tryptophan halogenase; OS = Massilia sp. KIM OX=1955422 GN=B0920_24610 PE=4 SV=1
MRRVVIAGGGTAGWMAAACISKVLGKRLDIKLIESDEIGTVGVGEATIPTLVHFHKLLEINEQEFMAATKATFKLGISFEGWRNVKEDYIHSFGMTGTDHWTAGFQHFWHKGRERGLAGDYGDYCLELRAAQEKRFAHLPRDGMNYAYHLDATAYARFLRQFSERHGVQRIEGKIVDVTTSALTGHIRSITLDSGADIEGDLFIDCTGFRALLIGQAMKVDYEDWSQWLFNDSAAAVQTMSVGEAVPYTRSIAHGFGWQWRIPLQHRVGNGIVFSSRYAGEEQAIQALMDNVEGEALMKPRVIKFTPGQRRQVWKGNCLAIGLASGFLEPIESTSIHLIQRSIVRLMQMFPSDGISQSDVDEYNKQAWTEIEHIRDFIILHYHVTNRGDTPYWRDARNMDVPASLRHKIDLFRETGRVFRISNELFAENSWIQVMLGQGVMPASHHQAADLMGDIELSQFLGSIKGSIDKTVSQLPSHQQYVERYCKSPM

SEQ ID NO: 84195 - protein, 489 aa, Sphingomonas sp.
  REGION 1..489: note = tr|A0A1G5UQU7|A0A1G5UQU7_9SPHN Tryptophan halogenase; OS = Sphingomonas sp. NFR15 OX=1566282 GN=SAMN03159340_03257; PE = 4 SV=1
MAEPVREVVILGGGTAGWMTAAALSKALERSGTTITLVESEEIGTVGVGEATIPTIHWFNGLVGIDEARFMADTGATWKLGIEFRGWQGEGSAYFHPFGTYGSPGDGATFPHRLARAWLAGEEAPIEVFSLTTQLARARRFAKPVGDPRSLLSTLGYAFHFDAARYAAHLRGLAEARGVVRREGKVVSVEQDEASGHVRALVLEGGAQVAGDLFVDCSGFRGLLIEQTMHAGYEDWPRWLPCDAAWAAPSAAEAQVTPYTQATAQEAGWRWRIPLQHRVGNGYVFSTRFQDVDDARALLVGAMESPPIADPRLIRFTPGRRNRAWVGNVVAIGLASGFLEPLESTSIHLIQSGIGKLLSLFPRADMNPLLAEQYNRLSAREIEEIRDFVILHYHRTHGRNEPLWQHCQTMPIPETLAYKIDQFRASGRIMLAPDELFRDASWFAVLSGQGVRARDYNPLLDVMSESDNRAQLQAVRDAIKETVLKLSSV

SEQ ID NO: 84196 - protein, 269 aa, unidentified
  source 1..269: note = Magnetomorum sp.
  REGION 1..269: note = tr|A0A0M9E1B1|A0A0M9E1B1_9DELT Tryptophan halogenase; OS = Candidatus Magnetomorum sp. HK-1 OX=1509431; GN = MHK_007939 PE=4 SV=1
MNSKKAENKANLLFKLLNNVQLEGTEASFKLSWKSFLQVRFLMGIRTKNLKINKLEKICTQLSIPKEYLIKIKQDFNKSNIILFGFEESENNCIYKVYLEFWDQNFKIVQNTSNPKNPLLQYIGFKWDAFDNLQRVITKYYSHPFIPVHSILTRIENIFNHKSHKKVLDNSKAIVTYAMKRIDIIKDPFIYLEVLDNKGFRNSFDINLYESELTIEDLKPYLYEIQKNFMITNHPFRPFLEQISSKILGHLSGGFDKKGDAFLTFYYDI

SEQ ID NO: 84197 - protein, 512 aa, Massilia flava
  REGION 1..512: note = tr|A0A562PH34|A0A562PH34_9BURK Tryptophan halogenase; OS = Massilia flava OX=871742 GN=IP92_05125 PE=4 SV=1
MSKPINHVVIVGGGSAGWLTAGVLAADHPALQVTLIESPDVAPIGVGEGTWPSMRDTLSRIGVSESAFFRECDAAFKQGSRFNDWREGGGAADYYFHPFVLPQGYGETDLVRAWLDTGAAVPFADLVSYQPHLCVQGRAPKQPATPEFAAVANYGYHLDAGKFGLFLKKHCLEKLGVRYVPDHVTGIDSAPNGDIAALRTRAHGPLAGDLFVDCTGMQSMLLGGHYGVPLLRQKHVLFNDSALAVQVPYAAPDSPIASQTTSTAQRAGWIWDIGLPTRRGIGHVYSSAHTSDAEAEADLRRYVAATGGPADMPAPRKLTFEPGYRQRFWHHNVVAIGLSAGFIEPLEASALALVEMSAAMVSDDLPANRDAMDIVAHRFNDAFTYRWERVIEFLKLHYVLSRRTGSDYWHDNRRSETIPARLRELLTLWRHRAPSRLDFYRIEEVFPSASWQYVLYGMGFLPERDHVTRRTDTAAADPYFREAAELTRRMLRALPSNRELLDHIRLHGLQKI

SEQ ID NO: 84198 - protein, 506 aa, Alkalimonas amylolytica
  REGION 1..506: note = tr|A0A1H3Y9X7|A0A1H3Y9X7_ALKAM Tryptophan halogenase; OS = Alkalimonas amylolytica OX=152573; GN = SAMN04488051_101576 PE=4 SV=1
MIRNIAVVGGGTAGWLVANHLGQAFRHLPDYQITLIESPSIATIGVGEGTVPAIRYSLKKFGVSETDLFNQCDATFKHSIHFINWLDRNKHGDNGYHHLFSNPLLRGLDLTSLWLQQGGDYASFVSPQATVVAAKLAPKLITTAEYQCTVPYAYHFDARKFAGLLHTNATRSFQVKYLQADVTDIRTDEAGFITHLMTAQHGALAFDFVVDCTGFQASLLGEKLKIPFQSCADQLFTDTALAVQVPYSQEPQLPPYTLASAHQAGWIWDIALTSRRGVGFVYSSAHMAEEKAYQKLERYVGKSELAALSVRKIPMRVGRRAKFWHKNCVAIGLSQGFVEPLEATAILLADFSADLLSQCFPADRDEMNLVAERFNQRMVHAWDRVLDFIKLHYCISDRTDSDFWHDNREPASIPESLQQKLALWRNHVPTREDFFSKFEVFDLENYLYVLYGMRYPTKKPLLRSDYQAQAELAAKQVQQQAMALTAELGLHMDLLAKIKQYGLQRL

SEQ ID NO: 84199 - protein, 517 aa, Erythrobacter sp.
  REGION 1..517: note = tr|A0A2K1E618|A0A2K1E618_9SPHN Tryptophan halogenase; OS = Erythrobacter sp. SAORIC-644 OX=1869314 GN=BA950_10835; PE = 4 SV=1
MSGEFTNLVIVGGGTAGWLSACILAARRPELAITLIEAPDIPTVGVGEGSWPTLRETLAVIGIDETEFLTECDASFKQGSRFDGWVDGSERDCYYHPFSAPLSGAMPDILAAWKMQNDGQPYAEAVSPQAAICNRDLAPRQRTMPPFAGALNYGYHLDAGKFGALLASHGVKRLGVRHVHGKVTGTERSVDGLFTRLLLDNGSAIEGDFFIDCTGMASKLIGEELEIGWVDRSDVSFNDRALAVQVPVVPDSAIASQTIGTAHRAGWLWDIGLPTRRGVGCVYSSRFLSDDEAQAILMNYVGAKIAGAEQAALTPRGLKFSTGYREKFWAGNCLAIGLSAGFIEPLEASAIVLIELSLKALADGYPQSRAALPRLADRFNSLFRYRWERIVDFLKLHYVLSTRTEPYWQAHRDPATIPSSLAAHLDLWRDHAPSSGDFPQIDEIFSAASHQYVLYGMRFPQPADISSAPSSEVQRQFAKVAERSRALSAALPSNRAYFDALCSSMDKNSARGVPTRQ

SEQ ID NO: 84200 - protein, 501 aa, Mitsuaria sp.
  REGION 1..501: note = tr|A0A2G9C4P5|A0A2G9C4P5_9BURK Tryptophan halogenase; OS = Mitsuaria sp. HWN-4 OX=2049333 GN=CS062_20035 PE=4 SV=1
MVQRIVIVGGGAAGWMTAAAMTASRRGRGSVELVESEEIGIIGVGEATFPSIRAFNERVGIDEAEFLRATHGTYKLGIEFRDWHSVGDRYFHTFGNFGSLLGPYMLWGQYRRMADASLGEFGEQCLPTAMAMQGRFVVPDEDGGAPYKYAYHFDATLYAAFLRDFSMRRGARRIEGRIVEVIRAENGDVKRLRLADGREVEGDLFIDCSGFASLLLGRAMKEPFVDFSRWLPVDGAWACPCERVGEALTPYTRATALEGGWAWRIPLQSRTGHGHVFSSRHIDPDVAREQLMAQLDGKPLTEPRLLRFTTGHRERFWVRNVVALGLSSGFLEPLESTSIFLIQTNLAHLMTLLEAKAPLDETAIADFNARGAREFRRIRDFIILHYCLTARRDSALWRDMATMDLPDTLAYKIDLWRHHGVLHQQQDEGFDETSWLAIHAGMRHWPQRTDPVLNELPLDHARDILQRRREAIARAVAPLPPHHAYLARLMNLAQGAQRPAR

SEQ ID NO: 84201 - protein, 496 aa, Sphingopyxis sp.
  REGION 1..496: note = tr|A0A4P7RTI4|A0A4P7RTI4_9SPHN Tryptophan 7-halogenase OS=Sphingopyxis sp. PAMC25046 OX=2565556; GN = E5675_06805 PE=4 SV=1
MSARARAVQRIVIVGGGSAGWMTAAALGRALAGQPHSITLVESEAIGTVGVGEATVPPIHEFNRYLRLDPSEFLRATHGTIKLGIAFEGWGGLGHRYFHPFGYLGVEMSGIHFHHYWLRHLAAGGDPDHGPYNLETMAAREGRFAPATRHGPVHHAVHFDAAAYARFLRTYAEDKGVVRVEGKVADVRLDGEDGFITALALDDRRVIEGDLFVDCSGFRGLLIEGALHTGYTEWSHWLPCDSAVAMPCENTGDPAPFTRSTAREAGWQWRIPLQHRDGNGYVYSSAHLGHDEAEALLRSRLPGAPLADANRLRFNAGHRKAIWNRNCVAIGLAGGFLEPLESTSIHLIQTTIIRLLSLLPRDAIDPNVIRRFNRDALHEYQVIRDFVIAHYALANRDDTPFWRDVAAAGMPDSLAERIEAFRATGNILFEPGDLFGPTNWYAVLTGQGVRPQSWHPIADGLSDGELAARLATLRGRVAEQLAELPLHIEFLRRLNS

SEQ ID NO: 84202 - protein, 499 aa, Sphingopyxis sp.
  REGION 1..499: note = tr|A0A4P7RYC8|A0A4P7RYC8_9SPHN Tryptophan 7-halogenase OS=Sphingopyxis sp. PAMC25046 OX=2565556; GN = E5675_08095 PE=4 SV=1
MSDRKPVQRVVIAGGGTAGWMMAAAIARTMGHTVDLTLVESEAIGTIGVGESTIPPLVNFNRILGIPEPEFMRATQATFKLGILFDNWKHDGDSYFHSFGLSGKDHWSAGFQHFWLNARERGHEQPYEDYCLELVAGMQGKFAHLPEDRMNYAYHVDATLYGRYLRKLAEADGCTRVEGKITRVELDGETGDIAALHLDGERRVEGDMFVDCTGFRGLLIDGALHAGFEDWSHWLPNDSAIAVQSKHLGPPMPYTQAIAHDAGWQWRIPLQHRMGAGIVYTSGYLSRDEAYDRLMSSVGEPLIEPFDIKFKGGVRRKQWYRNCVAVGLAGGFVEPLEATTVHLIQRAVLRFIRLMPNGRVSERDAQEFNDQQRLDIEQIRDFVVLHYKATNRRDSPFWRHVANMPVPDTLQQKIELFRETGRVFRKNEELFAENSWVQVMMGQGIEPQTYHPIAAKLRDDEVERLFQTLRDNIAQTVATLPEHHAYVARYCGAEEPKAA

SEQ ID NO: 84203 - protein, 434 aa, unidentified
  source 1..434: note = Alphaproteobacteria bacterium
  REGION 1..434: note = tr|A0A2N3B606|A0A2N3B606_9PROT Tryptophan halogenase; OS = Alphaproteobacteria bacterium HGW-Alphaproteobacteria-7; OX = 2013670 GN=CVT85_00860 PE=4 SV=1
MLAAVGGTFKLGIQFENWNRIGDSYIHPFGAYGYTMGGISFHHVWHRMANAGDKRPIQVFNLETMAAYFGKFARTQDFARDDLPPVNYAYHLDATRYAAFLRRFAEARGVVRQEGRIADVALDGETGFVTTVTLDDGRQFAGDLFIDCSGFRGLLIEQALQTGYDDWSHYLPCNRAVALPCQRDDGSPPPPFTRATAHRAGWQWQVPLQHRNGNGHVYCSSFMEDQDALDILVGNIAGKPQAEPNFLRFVTGRRKKFWNKNVVALGLAAGFMEPLESTSIHLVNTGIDKLISLLSLDGITQAQEDAFNRLTGREYARIRDFLILHYNATSRDDSDFWNYVRTMEVPESLTEKIEIFKANGQIFREEDELFTETSWAAVMMGQGIAMGGHNAMADALDPAKTREEADEMEKSIRYLVQHMPGHGDYVARYCPAAT

SEQ ID NO: 84204 - protein, 503 aa, Shewanella putrefaciens
  REGION 1..503: note = tr|A0A3S5EAS6|A0A3S5EAS6_SHEPU Tryptophan halogenase; OS = Shewanella putrefaciens OX=24 GN=NCTC10737_01127 PE=4; SV = 1
MTTAIKRVVIAGGGTAGWMAAAALTKLMGKHLEIVLVESDEIGTVGVGEATIPTLHIFHRLLGLKEQEVMAATNATFKLGISFENWQDINKNYLHSFGFLGKDCWACGFQHFWLKGKQLGMVSEIGDYCAEHLAARQERFAVLPNQDYNHAYHMDASLYAKYLRKMAEQHGIHRIEGKIKQVLQHHDSGNIKALVLENDETIEGDLFIDCTGFRALLIEQTLNTGFEDWSHYLPCDSAIAVQTQSVGAPIPYTRSIARDSGWQWRIPLQNRTGNGLAFCSKFISDEDATELLLANLEGEPLNKPRVIKFKTGTRRLHWHKNCVAVGLSGGFLEPLESTSIHLIQRSIIRLMQLFPSAGIVQSDIDEFNQQTKLEMDNIRDFIILHYKATEREDSRFWRYCKNMEIPASLKHRIEMFADSGKVYKYGSELFGESSWIQVMMGQGILPKHYHPIVDVMEEPELEAFLNNIKSTVKRKVESLPAHLDFIQHYCPAEVLANTKPMPM

SEQ ID NO: 84205 - protein, 326 aa, unidentified
  source 1..326: note = Oxalobacteraceae bacterium
  REGION 1..326: note = tr|A0A4Q3IHF8|A0A4Q3IHF8_9BURK Tryptophan 7-halogenase (Fragment) OS=Oxalobacteraceae bacterium; OX = 1871070 GN=EOO80_18480 PE=4 SV=1
GIIDSVQLHPETGYVESVALQSGERIAGDLFIDCTGFRGLLIEEALHTGYIDYTHWLPCDRALAVPCAPVGPPTPYTRATAREAGWQWRIPLQHRTGNGYVYSSAHISDDEAAATLLRNLDGKALADPRPLRFTTGRRKKCWNRNVVALGLASGFMEPLESTSIHLIQSGISKLLELFPGNGINEVLVDRYNDQLAFEFERIRDFLVLHYKATEREDTPFWRQCRDMAIPPSLQANIDLFQDSGRFFRNHNEMFAEISWVQVMVGQGILPRTYHPLVDQVSDDDTYRFIASVERTISDCAAAMPPHQAFIDRHCAAPPMTRETATT

SEQ ID NO: 84206 - protein, 508 aa, Janthinobacterium sp.
  REGION 1..508: note = tr|L9PL72|L9PL72_9BURK Tryptophan halogenase; OS = Janthinobacterium sp. HH01 OX=1198452 GN=Jab_1c09460; PE = 4 SV=1
MNPGTRDPNNRRPVRRVVIVGGGTAGWMAAAGIAKVLGKRLDIKLIESDEIGTVGVGEATIPTLMNFHNLLEINEQEFMAETQATFKLGISFEGWRNVKQDYIHSFGVTGTDHWTAGFQHFWHKGVERGLAADYGDYCLELKASLEHRFAHLPDNGMNYAYHLDASRYAKYLRRLSEPRGVQRIEGKIVRYTKHEDNGDVRSVVLESGQEIEGDLFIDCTGFRGLLIGDAMQEPMEDWSQWLFCDRAIAVQTEAVGDALPLTRSMAHQAGWQWRIPLQHRVGNGIVYSSRHLDEDVAMKQLMSNVEGKALITPRVIKFKPCQRKHTWKGNVVAIGLSSGFLEPIESTSIHLIQRSVVRLMQTFPTDGISQADIDEYNNQCNSEIEHIRDFIILHYHVNHRTDSQFWIDAREMSIPASLQHRIDLFRETGRVFRVPNELFAENSWIQVMLGQGIMPRSHHQSADLMGDEELKHFLGGIKSRVDRIVVQLPSHQAYVERYCGRAESAKAA

SEQ ID NO: 84207 - protein, 591 aa, Nostoc minutum
  REGION 1..591: note = tr|A0A367R2A1|A0A367R2A1_9NOSO Tryptophan halogenase; OS = Nostoc minutum NIES-26 OX=1844469 GN=A6770_21155 PE=4; SV = 1
MNSTQELVYDVVIMGAGFAGNCQARHLLLKVPNIKIAIVDPRPPERTTKDLKVGESTVEIAATFLSKELGLYEYLIENQAPKHGLSFHWPKDPNQTNSTDDYYNIWTNGLPPTESFQLNRAKFEQDLLQMNRNMGATFYNGRVVDLDLTSKDELHTVEVKLEDGKINLKAKHVVDAAGRRFLIGKKIDNVILDPEELYGINTGSSWVHVKGIDRSIIDNGYHPDTSIASHYYTTNHWFGHGHWIWMIPLGKSGKELSIGVVYHQNVIPTKDINTFEKFKAFLKENHTLLYHLIESGEFIDFNNLPRLAHKSRKMISEDNWYVLGDAAHMFDPFYSPGLSLTALDIESVTECIRAKLAQEADAEKKQAFYNRFLVTNSNSYNYIYQRHEKHLGNACAMSWRTYLEDMLWFGVLLPMYIGKWFLDFEFISQYESIANFLFFKKNSLFAGFYKILDEVVDRQLNIGLMDFTRNDQLFFKYGPLQFFDDYLKKTKFEPLRCNVFAGIKGTFLFFILASAKLRFAAFGILGVLSPRNIFFTIQLLALYLYVSIGERIYLFKMRNVPANTAVDSMRKEFKNYQHQPQLRSWKEAIKA

SEQ ID NO: 84208 - protein, 493 aa, Pseudoalteromonas ulvae
  REGION 1..493: note = tr|A0A244CTC1|A0A244CTC1_9GAMM Tryptophan halogenase; OS = Pseudoalteromonas ulvae OX=107327 GN=B1199_00780 PE=4; SV = 1
MNKNIQNVVIVGGGTSGWITAALLGKILGPSLNLTLIESDKIGIIGVGEATIPPIIHLNNALGISEKTFLKETKGTIKLGIEFDNWGQQGDSYMHAFGGIGKNLPFCDFHHTWLRSQQLGDSEDFWRYSLNYQAAKHNKFAKTPAGQGGLEYAYHFDAGLYAKLLSKLSQQQGVKRIEGVVENVLVDGNSGHVTSVQLDSGEQISGDLFIDCTGLKALLIEQTLNTGFIDYSHWLPCDRAVAVPCESVSPIIPYTRSTAHPAGWQWRIPLQHRTGNGLVYCSQYMTDEQAIETLLNNLDGPALGEPKVIHFKTGVRRKQWHKNVVAIGLSSGFFEPLESTNIHLIQTAAIRLIKLFPHQGIDQSTVDEFNRQSRIESDRMRDFIILHYKLNQKVDSPFWQRCQNMDVPDTLHAKMALFADSGRVFREQDELFTEIAWQQVMIGQNLRPKDYHPVAGSLSAEQVLELMKNLQTITDKQVSQWPTHDEFLASLYL

SEQ ID NO: 84209 - protein, 492 aa, unidentified
  source 1..492: note = Alteromonas pelagimontana
  REGION 1..492: note = tr|A0A2A6AV06|A0A2A6AV06_9ALTE Tryptophan 7-halogenase OS=Alteromonas pelagimontana OX=1858656; GN = CA267_14170 PE=4 SV=1
MIEQARKQRVVIAGGGTAGWMAAAAMTRTLGKQVDVTLIESSDIGTVGVGEATIPTLVFFHKLLKVSEQEFMAATQATFKLGINFENWKEVNQNYLHAFGVTGKDCWAAGFQHFWLKGLQQGLSTDFGDYCLERVAAEAGKFAHLPNNGLNYAYHLDASLYAKFLRNLAEKEGLRRIDAKIQQVFTREDNGYIESVLLDDGQKIEGDLFIDCTGFRGLLIEQTLHTGYEDWSHWLPCDKAIAVQTEAQASPIPYTRSIAHEAGWQWRIPLQHRVGNGLVYCSRYWSDDEAMSTLLNNIEGTPLNEPRVIPFRTGRRLKQWNKNCVALGLASGFLEPLESTSIHLIQQGIVRLLRMFPHTEIQQTDVEEYNRQTDFDVEHIRDFIILHYHVTERKDSPFWRHCRQMEVPTSLAHRIKLFKETGRIFREANELFDDSWQQVMIGQGLMPASYHPIVDNMSREELTHLLSQIRNNITRTVERLPTHEQYLKQYCQ

SEQ ID NO: 84210 - protein, 542 aa, Janthinobacterium sp.
  REGION 1..542: note = tr|L9PHP5|L9PHP5_9BURK Tryptophan halogenase; OS = Janthinobacterium sp. HH01 OX=1198452 GN=Jab_2c32260; PE = 4 SV=1
MPGRRRTLPMETGKTMKTIPTPVKNVLIVGGGTAGWLTAAFLARTLGADADPGAGGDNVRITLVESKEIGIIGVGEGTFPSIRGTLAAIGIDEARFIRECNATFKQGIKFTDWVRPPGTPGNDHYFHPFSLPSQRPGGPELLPYWLQGAAPAGVGFAAAATMQKRVADASHAPKRFNDADFMGPLNYAYHFDAGKFAALLSTHAQSLGVRHVLATVERVSLDEQGAIGAVHTKEAGELTADLYIDCTGFRAALIGDALGTAFRNINDTLFVDRALAMQVPYDTADAPIPSYTIATAHEAGWTWDIGLHQRRGIGYVYSSRHTDDTRAEQVLRAYIGKASDGLNPRQLKLNVGYREQHWVKNCVAVGLSGGFLEPLESSGIGLIETAAYLVSYLFPHDGDMAPVAKVFNEMMKARYERIVDFVKLHYCLTQRTDNAFWTDNTDPASIPESLRDKLAMWRRRAPHRMDFVVDLEMYPPSSWQYVLYGMEYPTAQYANASTLPRFDEARREFQTIEQMSHRALADLPTHRALIAHFLQRGERRIA

SEQ ID NO: 84211 - protein, 503 aa, unidentified
  source 1..503: note = Oxalobacteraceae bacterium
  REGION 1..503: note = tr|A0A4Q3M1A2|A0A4Q3M1A2_9BURK Tryptophan 7-halogenase OS=Oxalobacteraceae bacterium OX=1871070; GN = EOO77_01965 PE=4 SV=1
MGIRHQPISSVLIVGGGTAGWMAAAVLAKTLAGAGITITLVESEEIGTVGVGEATIPPIRELNALLGIDENAFVRMTGATFKLGISFENWGAVGQNYLHPFGRFGADIGPLPFHSYWQALRAFDEPTAGPLTSYSMSAMAAAAGKFRHPSPNSRGPLSDISYAFHFDAGLYAKYLRGLAEAGGIVRREGQIVDVGLTDAGFIRDVAMDDGDRLAADFFIDCSGFQGLLIEGALRTGYVDWSHWLPCDSAIAMPTTRIAEPVPFTRAIAEDAGWQWRIPLQHRMGNGHVFSSAFTTKDAAERILRTSVTGEPLADPRLLRFTTGRRRKAWSKNVLAIGLAAGFLEPLESTSIHLVQSALTRLLALFPDKGFASADIAYFNRATELEYERVRDFLILHYHVTKRDDSAFWRHVRTMPIPDTLTDRLDLYRSRGRFFPEALDLFLEPSWIAVMEGQGLRPTLGDPMALVAVKQLSTLLPRIRQKISEVVGEMPSHVESVTKCVTGI

SEQ ID NO: 84212 - protein, 496 aa, unidentified
  source 1..496: note = Halieaceae bacterium
  REGION 1..496: note = tr|A0A3D1YR48|A0A3D1YR48_9GAMM Tryptophan halogenase; OS = Halieaceae bacterium OX=2026743 GN=DEX20_09700 PE=4 SV=1
MTNKINKIVIVGGGTAGWNAAAFLSRTLGKVIDITLVESDEIGIVGVGEATIPPILAFNNALGFEETAFLKNTQGSIKLGIQFENWGQVGDKYMHAFGNVGKDFAFCSFHNFWLRAKKEGRKEDFWDFSLNFQAAKLNRFAKVKQISGTDLQGIAYAYHFDAGLYAKHLRKFSETRGVKRIEGKISNVNQCAHTDFITDVVLESGQKVEGDLFIDCSGFRGLLIEQALKTGYENWSHWLPCDRALAVPTKSVGQVKPYTRSIAHKAGWQWNIPLQHRTGNGHVYCSDYISDEEARETLLAHLGSEPLAEPRSIPFVTGRRKLQWNKNCVAFGLASGFLEPLESTSIHLIQVGLRRLVQHFPHQGIKQAEIDEFNRQSQREMEHIRDFIILHYKLNQRSDSEFWVNCQNMDVPDSLKHRMELFKASAKVFKESDDLFHEIAWQQVMIGQGLIPDDYHPIAHTISSDQLNGLFRDLQTLIGKTVAAMPSHDKFLEAVS

SEQ ID NO: 84213 - protein, 510 aa, Streptomyces lydicus
  REGION 1..510: note = tr|A0A3S9YEH6|A0A3S9YEH6_9ACTN Tryptophan halogenase; OS = Streptomyces lydicus OX=47763 GN=DDE74_22370 PE=4 SV=1
MVIVGGGTAGWMSASYLKAAYGDRINVTLVESDRVATIGVGEATFSTVRHFFDYLGLDEREWMPECSGSYKLGIRFENWREPGHHFYHPFERLRTSDGYTLADWWLQEGDRSQPFDRSCFITPALCEAKRSPRLLDGSLFAGGLDGSLGRSTLEEQRAQFPYAYHFDAALLAKFLAKYGTDRGVRHVVDDVTRVGRDERGWISHVATREHGDLTGDLFIDCTGFKGMLINETLEEPFESFQDVLPNNRAVALRVPQADQATTGMNPYTTATAMDAGWIWNIPLFGRNGNGYVYSDEFCTPEEAERTLRDHVAPGQDDLEANHIRMRIGRNRRSWVNNCVAIGLSSAFVEPLESTGIFFIQHGIEQLVKNFPDENWDPALADDYNNRVAEVLDGVKEFLVLHYKAAQREDTPYWKEAKTRALPDGLAERLATGASHLLDERTIYQPYHGFEQYSWITMMLGLGHEPKRPRPSLAHIDPTNARAELARLKADADELVAALPSCYEYIASLNS

SEQ ID NO: 84214 - protein, 585 aa, Nostoc minutum
  REGION 1..585: note = tr|A0A367R317|A0A367R317_9NOSO Tryptophan halogenase; OS = Nostoc minutum NIES-26 OX=1844469 GN=A6770_21160 PE=4; SV = 1
MNSTEELVYDVVIMGAGFAGNCQARHLLLKNPSIKIAIIDPRSPERTTKDLKVGESTVEIGATFLSKELGLHEYLIENHSPKHGLNFHWAKDPNHTKNIDDYYHVGNRTVAIDTFQLNRAKLEQDLLQMNREMGAIFYNGRVVDVELTPKDELHTVQVKLEKNQINLKAKHLVDAAGRRFIIGKKTDNLIFDPEQLYGINTGSAWLRVKNIDRSIIDNGYHPATSAASRYYATHHWFGHGHWIWMIPIDKHDKELSIGIVYHKNVIPSQEINTLEKFTNFLKANHTVVSNLIESGELVDFNHLPRLAHNSKQIISQDNWYVLGDAAHMFDPFYSPGLTLTALAIESTTEIICGKLAGEPDVEQKQEFYNRFLLTNARTYNQIYQKHDKHLGDASVMSWRIYMENMFWFGILVPMYIGKWFLDFDFVSQYQKIADFIFFGKNSIFTELYRLFDQLVERKINIGVIDYTRADQLFWNYAPTKTFDDFLPNTKFEALRCNVFAGMKATFFFLIFYYLKLRFKGFGILGVLAPRCIFRVLQLLALYIYVGMGEQIYLFKTRNLPDNTFINQMRQDFKNYQYKPQLQPWF

SEQ ID NO: 84215 - protein, 537 aa, Pseudomonas sp.
  REGION 1..537: note = tr|A0A2T0ZPX1|A0A2T0ZPX1_9PSED Tryptophan halogenase; OS = Pseudomonas sp. NFPP22 OX=1566224 GN=OD69_1011348 PE=4; SV = 1
MNKPIKNIVIVGGGTAGWMAASYLVRALQQQVNITLIESAAIPRIGVGEATIPSLQKVFFDFLGIPEREWMPQVNGAFKAAIKFVNWRKSPDPSREDYFYHLFGSVPNCDGVPLTHYWLRKHEQGFQQPMAYACYPQPGALDGKLAPCLADGTRQMSHAWHFDAHLVADFLKRWAVERGVNRVVDEVVEVQLNDRGYISTLLTKEGRTLEADLFIDCSGMRGLLINQALKEPFIDMSDYLLCDSAVASAVPNDDAREGVEPYTSAIAMNSGWTWKIPMLGRFGSGYVFSSKFTSRDQATADFLKLWGLSDNQQLNQIKFRVGRNKRAWVNNCVSIGLSSCFLEPLESTGIYFIYAALYQLVKHFPDTSFDPRLRDAFNAEIVYMFDDCRDFVQAHYFTTSREDTPFWLANRHELRLSDAIQEKVERYKAGLPLTTTSFDDSTYYETFDYEFKNFWLNGNYYCIFAGLGMLPDRSLPLLQHRPESIQKAEAMFASIRREAERLRTSLPTNYDYLRSLRDGAQLSRNQHGPTLAAQERQ

SEQ ID NO: 84216 - protein, 502 aa, unidentified
  source 1..502: note = Oxalobacteraceae bacterium
  REGION 1..502: note = tr|A0A4Q3LVI9|A0A4Q3LVI9_9BURK Tryptophan 7-halogenase OS=Oxalobacteraceae bacterium OX=1871070; GN = EOO77_06100 PE=4 SV=1
MNDTNPAIRSVLIVGGGTAGWMTAAALAHALGERCQITLIESDEIGTVGVGEATIPPIKLFNDTLGIAEADFLRETKGSFKLGIEFVDWAKLGHRYFHPFGTFGKPFDLVAVHQHWLAARSAGSPIPLDDLSMAWAAASRGRFAAPMADPRSVASTFDYAYHFDAGLYAAFLRRYAEGRGVIRVEGRVGNVVLHGETGHVAYVMLPDGRRIDADLFVDCSGFRGLLIEGALATGYEDWTHWLPCDRAVAVPCTTGGDGITPYTRSTARAAGWQWRIPLQHRTGNGYVYCSRHISDDEATATLMANLDGEALAEPRLLRFTTGRRRAFWNRNVVAIGLASGFMEPLESTSIHLIQTGIAKLLAYFPRRDFSPLLVDEYNRVAITEYERIRDFLILHYKLTSRDDAPLWRDCAAMAIPDTLALKIAHFRQGGRLVARDMDLFGPASWLAVHIGQLNHPLELDPLLDSSKGATASASFIDRLSGAMAKMAQSMPTHESYLEQLCK

SEQ ID NO: 84217 - protein, 498 aa, unidentified
  source 1..498: note = Xanthomonadales bacterium
  REGION 1..498: note = tr|A0A354Z680|A0A354Z680_9GAMM Tryptophan halogenase; OS = Xanthomonadales bacterium OX=2006849 GN=DDZ76_09295; PE = 4 SV=1
MNTGHDTRTIRRVVIAGGGTAGWMAAAALSKTLGRVLDITLVESEEIGTVGVGEATIPTLVTFHRLLDINEQEFMAATQATIKLGIGFEHWRDRDQHYIHSFGTTGKDHWTAGFQHFWLEGRHRGLARDYGDYCLELRAAQEARFAHLPNGGINYAFHLDAGRYARFLRQFSEGFGVRRVEGKIRNVLTRAADGHIEALELDDGSRIEGDLFIDCTGFRALLIGQTLGVGFEDWSHWLFCDSAFAVQSTSVRPPIPYTRSIAGEAGWQWRIPLQSRSGNGIVFSSRFIDNEAALATLLGSIEGEPLLEPRLLRFCPGQRQRSWQGNCVALGLAGGFLEPLESTNIHLIQRGIVRLLQCFPAVLSQTTIDEYNQQTAAEITHIRDFIILHYHVTQRRDTPFWRAAAEMSIPATLQHRIDLFRETAQVFRVPNELFAENSWVQVMLGQGIEPWSWHPVTRLMPDPELSGFLEAIRSTVERGMRQLAPHQQYLERYCPAPA

SEQ ID NO: 84218 - protein, 499 aa, Shewanella putrefaciens
  REGION 1..499: note = tr|A0A3S5EAZ1|A0A3S5EAZ1_SHEPU Lycopene cyclase family protein OS=Shewanella putrefaciens OX=24; GN = NCTC10737_02349 PE=4 SV=1
MNKIKDIVIVGGGSSGWMTAAMLARLFKSTLNITLIESEDIGTVGVGEATIPPLQIFNNVLGISEADFINATQATFKLGIQFENWGKPDEAYMHAFGNIGKDIGFTQFHHYWLSTSPTEVNSFWDYSVNYQAAKHNKFQVLQQIPNSPLAGLTHAYHFDAALYAQFLRRFSEQLGVKRIEGQITEVELTPNGDIESVILGTGQTIKADFFIDCSGFAALLIEKALKVGFDSYQHWLPCDSAYAVPCEKTPAITPYTRSIAHDAGWQWRIPLQHRTGNGLVYCSRYISDDAAKQLLLSNLDGKPLAEPKKINFTTGRRIKQWHKNCVAIGLSSGFLEPLESTSLHLVQSAIIRLSKLFPHQGIAQANVDEFNRQSQLEFEQIRDFIILHYHLNQREDAQENGFWHQCRTMVLPESLQQKIALFRATGTVFRHQDELFTEAAWIQVMLGQGIRPRDFNPLAATIQPQALSEFLLNMRTIIDNTVTKLPTHDQYLAHLSTHK

SEQ ID NO: 84219 - protein, 507 aa, Shewanella putrefaciens
  REGION 1..507: note = tr|A0A3S4P813|A0A3S4P813_SHEPU Tryptophan halogenase; OS = Shewanella putrefaciens OX=24 GN=NCTC10737_01091 PE=4; SV = 1
MTIKTIAIVGGGTSGWLAANHIGRVLKDNPELSITLIESPAIPIIGVGEGTVPSIRKSLSSFGISESEFINSCDVTFKQSIKFVNWLDRTKHGNNNFYHHLFDMPSLFGEDLTPYWLINPKEHFADLVSSQHAVCEENKAPKLITTPEYSGVTGYAYHLNAAKFAMLLAKNATERFNVEHVHATVNDVSFGIDGSIHSLLTDKGELTFDFYIDCSGFESILLAKRFDVPFIDKSQQLFVNTALVTQVPTQNFEKIPPFTIATAHKAGWIWDISLTQRRGTGFVYSNDHMSNTEAEDKFDQYLGGKLAELTPRKIPMKVGYRQQFWVKNCVALGLAQGFLEPIEATSILLTDFSARFLAERFPSDKDDIDYLAKRFNETVSQAWERVVEFAKLHYCLSDRSDSAFWRDNRSDKTIPEGLKQRLKMWRNFIPIAEDFPSKFEVFNRENYLYVLYGMKYFTRPIYSNAEVDKRVVQHLAKMKLLKSKMISELPEHRELLDKIRLYGLQSI

SEQ ID NO: 84220 - protein, 73 aa, Desulfurella multipotens
  REGION 1..73: note = tr|A0A1G6NCG1|A0A1G6NCG1_9DELT Tryptophan halogenase; OS = Desulfurella multipotens OX=79269 GN=SAMN05660835_01168; PE = 4 SV=1
MSKIVVLGAGISGHTAASYLRKLLPKEHEVIVIAPNSKWNWIPSNIWVGIGAMEPEDVTFELEKVYKKNRRNI

SEQ ID NO: 84221 - protein, 176 aa, unidentified
  source 1..176: note = Oxalobacteraceae bacterium
  REGION 1..176: note = tr|A0A4Q3K7Z4|A0A4Q3K7Z4_9BURK Tryptophan halogenase (Fragment) OS=Oxalobacteraceae bacterium OX=1871070; GN = EOO78_16430 PE=4 SV=1
NCVAIGLAAGFVEPLESTSINLIETAVGKLVELFPDRDFRPELADEFNRVMSVRYESVRDFIMLHYKLTARDDSEFWRYCAAMPIPDSLRHQIALFRESGRVTVLDSDGFAEASYVAMMMGLGVLPKRYDPLADGDDLRQVHGHFAGLRDMIVAAVAKMPDHDTFVRTQAVSAKVA

SEQ ID NO: 84222 - protein, 495 aa, unidentified
  source 1..495: note = Acidobacteria bacterium
  REGION 1..495: note = tr|A0A2E4W8C9|A0A2E4W8C9_9BACT Uncharacterized protein OS=Acidobacteria bacterium OX=1978231; GN = CL489_11000 PE=4 SV=1
MHDTAGIIDRRVAIVGGGNAGLICALILRRTFPEYQITIIKSDKIGTIGVGEGSTEHWRGFMNFVDIKVADLIPATSATHKKGIRFEGWTHHTPDYFHSVSGPPKGSPRVGEFYASYGGLQAKGILLSDATMFGDPRNNTVLAENPHGSVNQFHFDTHLLNEFLTLKCRKRNIRIVDGEVWDVNLSDSDWIESVDIDTLEHPVEADFWIDASGFNRILMSNLPDMKWNSFSDYLLTDSAIAFRFDADPSGEIRPYTRAMAMRNGWAWEIPTQTERGGGYVYSSQFCSEEDAVSEMEELLDIQLSGYKHFQFDPGYLEKMWVGNCVAVGLSSSFVEPLEATSIGSTINQSFALLGFLASFRRENKYSIKQYNNMMNNMMLNIRDMIRLHYISDREDTEFWREQKSMPIPDSLEHLLGVWSERQPEDTDMQGPWLLFRMLHLYHVVQGQGLLSAEVALDSIAAYGVADRVENYLYDLKQAKYSKPTRDHAEALKELR

SEQ ID NO: 84223 - protein, 217 aa, unidentified
  source 1..217: note = Oxalobacteraceae bacterium
  REGION 1..217: note = tr|A0A4Q3HXX2|A0A4Q3HXX2_9BURK Tryptophan halogenase (Fragment) OS=Oxalobacteraceae bacterium OX=1871070; GN = EOO79_07950 PE=4 SV=1
MNKQTPLKNIVIVGGGTAGWMAAAALSRLLKNKYAIRLVESDAISSVGVGESTIPMMRLFNNVLGINEDEFMRETEATFKLGIEFEDWGRVGERYMHGFGKFGQDLETVDFFQYWRKAYRAGQAPDLERYSINRMAAHAGKFIRPSPEMANSPLADIVYAFHLDAGLYARYLRTYAEQRGVVRTEGKIVQVRQRLNGGPRDGFIESLALEDGSVVEG

SEQ ID NO: 84224 - protein, 517 aa, unidentified
  source 1..517: note = Pseudoalteromonas fuliginea
  REGION 1..517: note = tr|A0A063KMJ6|A0A063KMJ6_9GAMM Tryptophan halogenase; OS = Pseudoalteromonas fuliginea OX=1872678 GN=DC53_08830; PE = 4 SV=1
MNDDIKSIVIVGGGTAGWLSAGIIAAYLQKHHSKKINITLLESSDIPTVGVGEGTWPTMRRTLKDMGIRETEFIKKCNVSFKQGAKFAKWVTGENDDYYYHPLELPTGMFENNLATSWLNINNAQPPFAQYVSAQQSICESGLAPKQITTPEFSAIANYAYHLDAGLFATFLKNHCIDNLNVKHIVGTVAGVNNCTNGDIKSVSLNNKIEIAGDLFIDCSGFKSLLLGENLGVGFKSCKDVLFADSALAIHMPYKGDEPICSHTLSTAQTSGWIWDIGLQTRRGVGHVYASNYISDDEAKQQLFDYLNINQAQQSKYKVKKLTFEPGHREKFWHKNCVAIGLSAGFLEPLEASALLLVEISAKFVAEQFPYNECLMAITAERFNRTFSYRWARIIDFLKLHYILSKRTDSPFWQAHCCTQTIPQSLKDNLAIWTFHTPSDNHFDHSQEVFPAASYQYVLYGMGFLSSTELHNNPDCYFKKAQALVNNNLRHTEQLLKKLPTNNALLEQIKQFGMQQI

SEQ ID NO: 84225 - protein, 503 aa, Sphingobium yanoikuyae
  REGION 1..503: note = tr|K9D7H2|K9D7H2_SPHYA Uncharacterized protein; OS = Sphingobium yanoikuyae ATCC 51230 OX=883163; GN = HMPREF9718_02370 PE=4 SV=1
MHADFPTSDRVVKRVVVAGGGTAGWVTATALVRHLGPLIDITLVESDAIGTIGVGESTVPTFRGFHQLMKIREDRFMAEAQATVKLGIEFKNWGQVGDRYIHPFGTIGLQWSWMADFHHFWLRARAQGFGGELGEYCLEWVAGEANRMSLSSSVAPSYAYHIDAARYARFLRSLAEPAGVKRVEGKIRNVELAPESGHIAALVLESGTRIEGDLFIDCTGFRSLLLGEALGVGFEDWGQWIRTDRAVAVQSTSDGPAQPYTSAIAHEAGWRWRIPLQHRDGNGFVFASDFMSDDEAHARLLAEIEGEPIVDPWLVRFKTGTRTRAWHKNCVGLGLAGGFIEPLESTSIHLMMAAVTRLIEDFPFHGFDDALLDHFNRKSRLEFENIRDFIILHYHVTQRDDSPFWDHCRTMEIPDSLKERLALWQENGRAYQLGHELFRVDSWSSVLLGQGMHPRGYHHVAAMMPEPQLREELARMRKDIAGVVAEMPSHREFLRRYCPAELV

SEQ ID NO: 84226 - protein, 538 aa, Burkholderia sp.
  REGION 1..538: note = tr|A0A4R4CPA4|A0A4R4CPA4_9BURK Tryptophan halogenase; OS = Burkholderia sp. SRS-46 OX=2094191 GN=C5O80_15240 PE=4; SV = 1
MSNPIKNIVIVGGGTAGWMAASYLVRALQQQANITLIESEAIPRIGVGEATIPSLQKVFFDFLGIPEREWMPQVNGAFKAAIKFVNWRKSPDRSRDDYFYHLFGSVPNCDGVPLTHYWLRKREQGFQQPMAYACYPQPGALDGKLAPCLPDGTRQMSHAWHFDAHLVADFLKRWAIERGVNRVVDEVVEVRLNDRGYISSLSTKEGRSLEADLFIDCSGMRGLLINQALKEPFIDMSDYLLCDSAVASAVPNADARVGIEPYTSAIAMNSGWTWKIPMLGRFGSGYVFSSKFTSRDQATADFLDLWGLSDKQPLNQIKFRVGRNGRAWVNNCVAIGLSSCFLEPLESTGIYFIYAALYQLVKHFPDTSFDPRLTDAFNAEIVHMFDDCRDFVQAHYFASSREDTPFWLANRHDLRLSDAIKEKVQRYKAGLPLTTTSFDDATYYETFDYEFKNFWLNGNYYCIFAGLGMLPDRSLPLLRHRPESIDKAEAMFARIRREAERLRTSLPTNYDYLRSLREGDAGLSRSQPGPTLAAPEIL

SEQ ID NO: 84227 - protein, 172 aa, unidentified
  source 1..172: note = Acidobacteria bacterium
  REGION 1..172: note = tr|A0A355F7L5|A0A355F7L5_9BACT Tryptophan halogenase (Fragment) OS=Acidobacteria bacterium OX=1978231; GN = DD490_28850 PE=4 SV=1
MTRDHVDVAIVGGGPAGCAAGLSLRAHAPELTVALFEATAWESPRVGETLPPLARRLLEHLGVWDAFRGQGRHNIHREIHGTAAAWGAPEPQERPYLFATQGNGWHLDRAAFDALLAAEAERRGVTVLRQTRLRRAERTGTTWRLHPAKAAADAPRTARFLIDATGSAAAFA

SEQ ID NO: 84228 - protein, 80 aa, unidentified
  source 1..80: note = Oxalobacteraceae bacterium
  REGION 1..80: note = tr|A0A4Q3K4V7|A0A4Q3K4V7_9BURK Tryptophan halogenase (Fragment) OS=Oxalobacteraceae bacterium OX=1871070; GN = EOO77_40735 PE=4 SV=1
MHDQPVRSVLIVGGGTAGWMAAAVISRSFAPEAVAVTVVESAEIGTVGVGEATIPPILQLNALLGLDEDELVCRTQATYK

SEQ ID NO: 84229 - protein, 520 aa, unidentified
  source 1..520: note = Oxalobacteraceae bacterium
  REGION 1..520: note = tr|A0A4Q3K7F0|A0A4Q3K7F0_9BURK Tryptophan 7-halogenase OS=Oxalobacteraceae bacterium OX=1871070; GN = EOO78_16265 PE=4 SV=1
MTDTAPSDPQQRPVRRVVVAGGGTAGWMAAAALSKVLGRHLQITLVESDEIGTVGVGEATIPSLVTFHRLLEIDEAAFMAATQATIKLGIGFEHWRDVGRHYIHSFGHTGTDHWSAGFQHFWLKGRQRGVARDFGDYCLELRAAQEGRFAHLPNGGMNYAYHLDAGLYARFLRRFSEGFGVQRIEGRIGRVETDAHSGYLTALTLDNGTRVEGDLFLDCTGFAGLLIGKTLGVGTDDWSQWLFADSALAVQTESVGAPVPYTRSRADQAGWMWRIPLQHRVGNGIVYCSRYMDQDSAAQVLQRNLSGRALTQPRALRFTPNQRHRVWEKNCVALGLASGFLEPLESTNIHLIQRGIIRLMQTFPQVINAVDIAEYNRQAAAEITHIRDFVILHYHATDRRDTPFWRDCAAMDIPDTLRHRVELFRQSGRVFHQANELFAENSWVQVMLGQGITPKQHHPVADLMGDAELSHFLETIRTRVDAALVRLPAHADFLRRYCPAPLPDPATRLPADAALATGAG

SEQ ID NO: 84230 - protein, 508 aa, Shewanella putrefaciens
  REGION 1..508: note = tr|A0A366IQ82|A0A366IQ82_SHEPU Tryptophan halogenase; OS = Shewanella putrefaciens OX=24 GN=DET47_11938 PE=4 SV=1
MNNSPLKSITIVGGGSTGWMTALYLSKLYNHSSNIIDIRLIESKEIGIIGVGEATVHSLRFFFAAMGLDENELLRETNATLKTGILFRNWMKPVDGKMHEYFHPFEQQKPSGKIDNASAWILNNQINESNSTPFAEATSLSFSLMQNNLSPKTQYLNQYQGIVPYGYHLDATLMAAFLKRKATQAGVDHVEANVTDVLVNDGNIIEVVTDQGSFKSDIFIDCTGFKGLLIQSLKNDNWQSFETELPCNKAVAMQREYLHHQLPRAYTTATALSHGWAWEIDLTNRQGTGYVYDGRSLTREQAEAELKAYLGDEQEIIRTVHLDMKIGCRREFWVGNCIAMGLAGGFIEPLESTGLHLINLGARLLATHLTSSNPSQAIRTSYNIAMNGLYTDLRQFIVLHYCLTDRDDNEFWQKAAQSSVFIPALEQKMTLWKDKVCEYVDLANGYSSVFTDENYRYVLYGMQHIPEIHIPCPKNEISRILDNLKTQQFRAKEQSLSHQEFLAKIKNI

SEQ ID NO: 84231 - protein, 355 aa, unidentified
  source 1..355: note = Oxalobacteraceae bacterium
  REGION 1..355: note = tr|A0A4Q3LUK6|A0A4Q3LUK6_9BURK Tryptophan 7-halogenase (Fragment) OS=Oxalobacteraceae bacterium; OX = 1871070 GN=EOO77_06630 PE=4 SV=1
MMQSRIEKIVIVGGGTAGWMTAAALSRSFEHSDVTITLVESDDIGTVGVGEATIPTLTGFNAFVGLDERQFLKDTSATYKLGIEFVDWTRLGHRYVHPFGEYGFDVASLPFQHWWQRAKHRWPDIASFSLETRAALAGKFSHKTGIAHPVLKDTAYAFHLDASRYATTLRTLAEERGTIRMEGRVTEVIRDGEDGRLTAVRLQGGLEIPGELFVDCSGFRSLLLGETLGVPFDDWSNDLPCDRAWAVPCAGGGGAEPYTRATAREAGWQWRIPLQHRVGNGHVFSSAHMTDEDALDIVLASLEGAPLAEPRLLRFKAGCREAFWSHNCVGIGLAAGFLEPLESTSIHLIQLGIMR

SEQ ID NO: 84232 - protein, 517 aa, unidentified
  source 1..517: note = Xanthomonadales bacterium
  REGION 1..517: note = tr|A0A354Z4B4|A0A354Z4B4_9GAMM Tryptophan halogenase; OS = Xanthomonadales bacterium OX=2006849 GN=DDZ76_09280; PE = 4 SV=1
MSHACRHVLVVGGGSAGWLTAGLLASRLGGPEGSPEAIEITLIESPDQPAIGVGEGTWPSMRDTLRRIGVSESDFIRECDTAFKQGSKFLGWADGDAGRGYVHPFSLPHGHGEADLVSAWLARPDAIFADLVSAQPAVCEAGKAPKQQTTPEYAAVANYGYHLDAMKLGAFLRRHCVQKLGVRHLVDHVETVSADPWGGIAALTTRAHGTLHADLFIDCTGMRARLIGQHFKVPLVDCRPWLFNDSALAMQVPYAREDAPIACQTLATAQPAGWIWDIGLPTRRGLGHVYSSIDCSEDEAAARLIDYARRTGAPEASLAGAPRLIRLEPGYRRDAFIHNCVAVGLAAGFVEPLEASSLVMVELAAGMLCEQFPADRDDMTLLARRFNEAFRYRWQRVIDFLKLHYAVSRRSDSDYWRRHRDPDTLTDALCELLPHWQRHPPSRFDFPRIDEMFPSASYQYVLYGMGVRPQPRGFRDQSSRCETLFAETAGLRRRWLNGLPDHRELLDGIAAHDLPHV

SEQ ID NO: 84233 - protein, 409 aa, unidentified
  source 1..409: note = Caballeronia turbans
  REGION 1..409: note = tr|A0A158GSU0|A0A158GSU0_9BURK Tryptophan halogenase; OS = Caballeronia turbans OX=1777134 GN=AWB73_03277 PE=4 SV=1
MNASVDVAIIGAGPSGAVAAALLRKAGRSVLVLERQHFPRFSIGESLLPQSMAYLEEAGMLQDIVEAGFQYKNGAHFVHRNQASAYDFRDKHSDGWGTTFQVERAVCDDLLIRRAAKQGAEVRFGHTVLEMKTGNAPVLEVADEAGTRYQVHARFVLDASGFGRVLPRLLNLEAPTRMPTRAAIFTHVRDGIPVDAHDRSKITVAVHPEHRDVWYWMIPLANGRSSVGCVAEAAFLDVPEAQREAKLRALIRSEPTLNRLIGDAPFLMPVRHIGGYSANVERLHGPGYALLGNAGEFLDPVFSSGVTIALRSAHLAVETLKRQLNGEVVDWQAQYDWPLRKGIDTFRAFVENWYTGKLQDIIFAREQTPAIRRMISAVLAGYAWDETNPYVVEPVRRLNTLHEVCTRRE

SEQ ID NO: 84234 - protein, 497 aa, unidentified
  source 1..497: note = Pseudoalteromonas fuliginea
  REGION 1..497: note = tr|A0A063KR74|A0A063KR74_9GAMM Tryptophan halogenase; OS = Pseudoalteromonas fuliginea OX=1872678 GN=DC53_09310; PE = 4 SV=1
MKSIKHVVIAGGGTAGWITAALLNKVLGKVINITLIESSSIGTVGVGEATIPPIIQLNNALGINEKEFINETNATIKLGIEFENWKTPSHSYMHAFGSFGKDFPFCDFYNFWVKGNITGSEDSLWDFSLNYQAAKQHKFAPLNTILNTQLPGLSYAYHFDATLYAEYLKKLAISRGVKHIDAKISEVTQCLATGNVETLILDDNKQINGDLFIDCTGLRALLIEKTLNTGFVDWSHYLPCDSAIAVQTKSNDELKPYTQSIAHSAGWQWQIPLQSRIGNGLVYCSRYLSDEDAKALLLNNLPADPITEPRFIKFKTGRRVKQWHKNVVAVGLSSGFLEPLESTSIHLIQSAVTRLIKLFPHHGISDALASEFNKQSVTEIEHMRDFIILHYKLTERGDSAFWRQCKQMEIPDSLTHKLSLFKHTGKVVRENDELFAEVAWQQVFIGQGLIPDDYNSIVDSLSSEQLNDLFSTLKTLITSTVEQLPTHKDFLKEIKKA

SEQ ID NO: 84235 - protein, 501 aa, Streptomyces sp.
  REGION 1..501: note = tr|A0A0M9Y961|A0A0M9Y961_9ACTN Tryptophan halogenase; OS = Streptomyces sp. WM6378 OX=1415557 GN=ADK54_36165 PE=4; SV = 1
MTASYLKAAFGDRINVTLVESGHVGAVGVGEATFSDIRHFFEFLGLKEKDWMPACNATYKLAVRFENWREKGHYFYHPFEQMRSVNGFPLTDWWLQQGPTDRFDKDCFVMASVIDAGLSPRRLDGTLIDQPFDEGADEMQGLTMSEHQGKTQFPYAYQFEAALLAKYLTKYSVERGVKHIIDDVKQVNLDDRGWISGVTTAEHGDISGDLYIDCTGFRALLINKALDEPFISYADTLPNDSAVALQVPMDMEKRGIMPCTTATAQDAGWIWTIPLMGRVGTGYVYAKDYLSPEDAERTLREFVGPAAADVSANHIKMRIGRSRNSWVNNCVAVGLSSGFVEPLESTGIFFIHHAIEQIAKNFPNEDWNPNQRVLYNRSIAHVMDGIREFLVLHYVAAKRQDTQYWRDTKTRAIPDSLAERLEMWKTQVPDSESIFPYYHGLPAYSYMCVLLGMGGIEMKPSPALALSDPSAAEREFAAIRDKTRRLTETLPKAYEYFAQHH

SEQ ID NO: 84236 - protein, 547 aa, unidentified
  source 1..547: note = Alteromonas naphthalenivorans
  REGION 1..547: note = tr|F5ZGD4|F5ZGD4_ALTNA Tryptophan halogenase; OS = Alteromonas naphthalenivorans OX=715451 GN=ambt_22075; PE = 4 SV=1
MSNQPIKHVVIVGGGTAGWLCAGVLAARLGNRIGNSDESAINITLVESPNVPSIGVGEGSWPSLRDTLQEIGIKEAEFLTCCNASFKQGSTFASWRNGQQNDNYQHPFTTPTGYTELDIHRCWQQFFSNESFEQSFCLQPDICHAGLAPKQNSTPEYAYVLNYGYHFDASALATLLTNHCKTSLGVKHTQAHIANVVTQDNGDIESLVTENGDTIKGDLFIDCSGQQGLLIDKHYHVPWHSVSSVLLNNRAVAVQVPYGSIDLSASADTIASTTIATAQTCGWTWDIGLQHRRGVGLVYASDYASEENAESILREHLAKRLPQSELENLTYRHLQFDPGYRKQFWVNNCIGMGMSAGFIEPLEASAIAMVELGIRMLCDQFPQNRQHMSHVASRYNQRFTYRWERVIDFLKLHYVLSEREEPYWLAQRSESSIPDSLNALLDLWQYQAPSRYDLIENEEIFPSASYQYILYGMGFHTTGRQLDKNSNMVKKAFALKQSLQKGKRQLLAGLPTNRDLLTAISHCVEKETTTNDNDKKEGPRHDVIGFR

SEQ ID NO: 84237 - protein, 517 aa, unidentified
  source 1..517: note = Alteromonas pelagimontana
  REGION 1..517: note = tr|A0A2A6AUM1|A0A2A6AUM1_9ALTE Tryptophan 7-halogenase OS=Alteromonas pelagimontana OX=1858656; GN = CA267_14185 PE=4 SV=1
MSDKINNIVIVGGGSAGWLTAGVLAAEYNTQGDDAINITLVESDIVAPVGVGEGTWPSMRATLEKMGISETEFLLECDASFKQGSQFNNWLNGNDHYFHPFTLPIGNQELDIAPYWQVYKDKISFANAVCPQGHLSERHLAPKQISTAEYSYAANYGYHLDAAKLGAFLQKHCTQKLGVKQVIDHVTHITSAENGDIASIATAKHGELIGDLFIDCTGSQSLLLGQHFKVPFVDCKHTLFNDSALAAHVPYASENSPINSFTHSTAQTAGWIWDIGLPSRRGVGHTYSSEHISDDSAEQQLRQYIAQTASQQVSESVAVRKISFQPGYRSKFWQNNCVAIGLSAGFIEPLEASALALVELSAKMLSEQLPGTQQDMEIVAKRFNQKFSQRWQNIIDFLKLHYVLSKRTDSAYWQDNRDNQTIPESLQQLLTLWQYQPPSHYDIPQTEALFPTASFQYILYGMGFESGDVLGRKRKNKAAQAERLFAENMQHSKHLLAALPGNRELLNKIKKYGLPKI

SEQ ID NO: 84238 - protein, 495 aa, unidentified
  source 1..495: note = Pseudoalteromonas fuliginea
  REGION 1..495: note = tr|A0A063KU94|A0A063KU94_9GAMM Tryptophan halogenase; OS = Pseudoalteromonas fuliginea OX=1872678 GN=DC53_04900; PE = 4 SV=1
MTKTNAVKNVVIAGGGTAGWMAAAALAKLIGNNINITLIESDDIGTVGVGEATIPPIRTFHKLLGINEQAFMKATQASFKLGISFENWGDENTHYIHSFGATGKECWAGEFHHFWLQGQVLGINNPFGDYCYELQAAKAGKFAFNQQNPINYAYHMDATRYAQFLREFSEPLGVKRIEGKIQKVIKNTKTGHIESLILNSGEHINGDFFIDCTGFRGLLIEQALHTGYEDWSHLLPCNSAIAVQTKSTSETVLPLTRSIAHKSGWQWRIPLQNRVGNGLVYCSQYMDDEQAKALLLNNIEGEPLTEPRIIKFKTGRRLKGWNKNCLALGLASGFVEPLESTSIHLIMSGIIRFMRLFPFNGITNHAIDEYNKQLKSEIKNIRDFIVLHYKVTNRDDSEFWQHCNAMEVPKTLQHKIDLFKQTGRVFLDDGDIFRVDSWVQVMLGQGIEPNQHHLIASMMSDEELTRFLHGIKQQIEQRVSQLPPHHEFLKQYCPA

SEQ ID NO: 84239 - protein, 502 aa, unidentified
  source 1..502: note = Xanthomonadales bacterium
  REGION 1..502: note = tr|A0A354Z754|A0A354Z754_9GAMM Tryptophan halogenase; OS = Xanthomonadales bacterium OX=2006849 GN=DDZ76_14275; PE = 4 SV=1
MSDRRIQRIVIVGGGTAGWMTAAAMVNALRGACTIELIESDAIGTVGVGEATIPPIKYFNQSLGIDENAFLAATQGTFKLGIEFVDWTRIGQRYFHPFGSFGAEFDAVPLYQHWLHQRALGDDTPLTDHSMAWAMARRGRFERPTGDRRRVQSTFDYAYHFDAGLYARLLRDYAEHRGVIRTEGVIADVALDPESGFVTALTLANGDRRTGDLYIDCSGFRGLLIEQALHVGYDDWRHWLPCDRALAVGSAGNGPDLLPYTRSTAHPAGWQWRIPLQHRIGNGFVYCSDCISDDQATALLLAQIDGPALGDPRPLRFVTGRRRMSWYRNCVAIGLAAGFMEPLESTSIHLIQSAISRLLALFPERDFDPLLAAEYNRITALEYERIRDFLILHYHTVARRDAPLWRRTATMAIPDSLRRKLDFFVTQGRLLIEERELFQNPNWLAVLIGQEVHPQRSDPLAALASDAAARLAGLRRVIGEAAEIMPSHAAYIARHCPASGAV

SEQ ID NO: 84240 - protein, 494 aa, unidentified
  source 1..494: note = Pseudoalteromonas fuliginea
  REGION 1..494: note = tr|A0A063KWP1|A0A063KWP1_9GAMM Tryptophan halogenase; OS = Pseudoalteromonas fuliginea OX=1872678 GN=DC53_05225; PE = 4 SV=1
MNQNAIKKIVIAGGGTGGWMCSAAMAKLLGKNIEICLVESDLIPTVGVGESTIPTLHIFHDLLKISESEFMAATNATFKLGISFEGWKQNQQSYFHSFGYVGQGCWAAGFQHFWLKGMQQGVAADIGDYCTEHVASRLGKFAVIPNQDRNHAYQLDAGLYAKFLRNFAEQNGAKRIEGMISKVNLEPTNGFIKSLTLGDGQIIEGDLFIDCTGFKGLLIEQALHTGYEDWSHWLPCDSAVAVQTELVSPIVPYTRAMAHKCGWQWQIPLQSRRGNGLVFCSKYMSDDEAKTALLNNVEGKPINEPRVIKYRTGTRRKHWNKNCVAIGLASGFIEPLESTSIHLIQQSIIRLMQNMPTKAIESCYQDDFNNKMRFEAENIRDFIVLHYHVTQRTDSDFWRYCKNMPIPESLAKRIELFKQSGHVYKAEQELFGEASWLQVMLGQGLVPQNYHPIVDSMSDDELKRFLESIKNHVAKKANSLPSHIDFINHYCKAK

SEQ ID NO: 84241 - protein, 268 aa, unidentified
  source 1..268: note = Oxalobacteraceae bacterium
  REGION 1..268: note = tr|A0A4Q3K4H3|A0A4Q3K4H3_9BURK Tryptophan 7-halogenase (Fragment) OS=Oxalobacteraceae bacterium; OX = 1871070 GN=EOO77_39980 PE=4 SV=1
MAATLLARRLDRQSVTITVVESSDIRTVGVGEATVPGIRDFFREIGVTEQDVMAAAQGTVKLGIEFVDWKREGERFFHPFGLYGMRSRGVAFHHYWRKLNAAGRPTPLSDFCLATALAERNLFMRPTDSPVHDLLFFDWAVHFDAGLFAKFLAKKAGEWGVKHIDATITDVLVDQSTGFISSVDTECGKTIAGDFFIDCSGFRSLLLGDALGVPYEDWTNLLPCDRAVAMPCERAGPLTPYTRSTALTAGWQWRIPLQHRVGNGYVYA

SEQ ID NO: 84242 - protein, 543 aa, Shewanella putrefaciens
  REGION 1..543: note = tr|A0A448EIE8|A0A448EIE8_SHEPU Geranylgeranyl reductase family OS=Shewanella putrefaciens OX=24; GN = NCTC10737_01130 PE=4 SV=1
MQQATHTAINNIVIVGGGTAGWITAALLAAEHNVDKGQLAHSPKLNITLIESPDVATIGVGEGTWPSMRNTLDKIGISETEFIRQCDASFKQGSRFIHWQYDDTEHTKLFGSNQYLHPFSLPHGHQELDLCPFWLPHSDKVSFAQAVSNQDALTQLGLAPKTIATPEYHFQNNYGYHLDAGKFSQLLMQHCTEKLGIKYIRDHVTQVHSHANGDIESLATKEHGVILGDMFIDCSGTKSLLLGEHFNVPFLSQKAVLFNDSALAIQVPYTEENSPIASCTLSTAQPNGWIWDIGLPTRKGVGYVYSSAHCSDDEAEQTLRAYLANDTSTKPQSASSNALDSRKQECRKLNINPGYHAKCWQNNCIAIGMAAGFIEPLEASALALVEWTANTLATQLPTHRGVMDTIAQRVNERYERHWQQIIDFLKLHYVVSRRELDGYWRDHREAASIPERLQQQLDLWRYQAPSSHDISYKEPLFPAASFQYVLYGMGFNTAQPTHIKPSQQQVAQRLFSENQQKIHALSQSLPSNRDLLNKVRQFGFPKI

SEQ ID NO: 84243 - protein, 493 aa, unidentified
  source 1..493: note = Alteromonas pelagimontana
  REGION 1..493: note = tr|A0A2A6AYP8|A0A2A6AYP8_9ALTE Tryptophan 7-halogenase OS=Alteromonas pelagimontana OX=1858656; GN = CA267_05615 PE=4 SV=1
MRQIQKVVILGGGTAGWMSAALMKKVLGDTVSITLIESDEIGTVGVGEATIPPIRLVNNVLGLNESEFLKETKATIKLAIRFENWKRPGESYFHTFGVPGKSMAFCHFHHVLARGQKLGVEDDLWAYDLNYHCAVAGKFAQINSQDPIMEMPFAYHFDAGLYAQFLRKISEKAGVKRIEGKVQQVLRGQNGDISALVLENSRKIDGEIFIDCSGFKGLLIEQTLGTGFDDWSHWLPCDSAIAVPSEHHQQTVPYTRSIAHKAGWQWQIPLQHRNGNGHVFCSRYITDEEARSVLMENLETKALAEPRLIRFTTGRRRRQWNRNVVAIGLSSGFLEPLESTSIHLIQSGIVRLLQLFPQHDIKPAMVEEYNRQSQLEFEQIRDFLVLHYYLNEREEDFWNDMRHVQVPELLAHKIALFKENGKLFREQNDLFLESSWLQVMVGQGIKPQEYHPLVNTLPDAAIIKMLTQLKAKKLEPVFHLPSHDDYIRHMLSR

SEQ ID NO: 84244 - protein, 513 aa, unidentified
  source 1..513: note = Alteromonas naphthalenivorans
  REGION 1..513: note = tr|F5ZFA2|F5ZFA2_ALTNA Tryptophan halogenase; OS = Alteromonas naphthalenivorans OX=715451 GN=ambt_17280; PE = 4 SV=1
MTPVNSVVIVGGGTAGWLTAGLLAATHSKQGSTGARLSVKVIESDSIHPIGVGEGTWPTMRSTLAKIGIEEAALVQQASATFKQASKFVHWHTEGQRTGYYHPFSAPQGSASVDITPYWLHNDSLNEYASDVCFQPSLCEQGLAPKLKADSKQSFSANYGYHLDAGKFINVIREHCKKVLGVEHIIDDVTDVATDDAGIKHVVTKNNDHIRGDIFVDCTGFSARLIEKALDVPMEDASSVLFSDSALVHQIAYSDEHQPIACHTLSTAQEAGWIWDIGLQNRRGTGYVYSSEFQSDDEATQTFMAYLKSINPNEELPSTFRKINYKTGYRKRFWEKNCVAIGLSSGFLEPLEASSLMLIEQSAIQLAEQLPAYTQVMPHVASRFNRALTNKWQSTIEFLKLHYVLSNRNEDFWLANRSPQSIPQRLASLLEEWQYRPILDSDFTDTDEVFSAQSYRYILYGMSHKTNLSQYVRSMSEYEGADKQLQLNKALIAQLKARLPSHRGLIDTMLNKH

SEQ ID NO: 84245 - protein, 504 aa, unidentified
  source 1..504: note = Oxalobacteraceae bacterium
  REGION 1..504: note = tr|A0A4Q3J1W2|A0A4Q3J1W2_9BURK Tryptophan 7-halogenase OS=Oxalobacteraceae bacterium OX=1871070; GN = EOO80_01170 PE=4 SV=1
MQDRIKNIVIVGGGSAGWMAAAALATYLGRNASIRLVESEEIGIVGVGEASVPPLRQFNTQWLGIEEADFVKRTQATVKLGIQFNDWGRIGDSYIHGFGAIGNSLGPLPFHQFWLKARQRGRAAPIGAYSPQGVMAPQGKFAPGDANAPPHSPLADIAYAYHFDAALYARYLRELAEERGVMRIEGKIVKVNQRGHDGFIESLGLENGQVVDGELFIDCSGFRGLLIEETLQTGYTDWSYWLPCDRALAVPSERAGPLTPYTRASARPAGWQWRIPLQHRTGNGYVYSSRHISDDEAATTLLANLDGKALGDPRLLRFTTGRRAKLWNKNVVALGLAGGFLEPLESTSIYLAQSGITRLLSLFPARDINPQLAERYNRESMFEYERVRDFLILHYHATERKDSPFWDLCRTMPIPDTLRDTIDLFRTDGRYFRNGEDFFALPNWVQVMLGQGIVPHGYHPIVDEMPEEKLVEHVEGVRTLLAQAVATMPTHEEWIDHYWKAPAP

SEQ ID NO: 84246 - protein, 130 aa, unidentified
  source 1..130: note = Oxalobacteraceae bacterium
  REGION 1..130: note = tr|A0A4Q3IL72|A0A4Q3IL72_9BURK Tryptophan halogenase (Fragment) OS=Oxalobacteraceae bacterium OX=1871070; GN = EOO80_16615 PE=4 SV=1
MADNRIRDIVIVGGGTAGWMTAAALSKILATGYSITLVESDEIGIVGVGEATIPMIKLYNQALDLDENDFMRKTKGSFKLGIEFRDWGKLGDSYVHGFGKIGQDLGLVSFYQYWLKMHHAGKAANLEEYS

SEQ ID NO: 84247 - protein, 340 aa, unidentified
  source 1..340: note = Oxalobacteraceae bacterium
  REGION 1..340: note = tr|A0A4Q3JDH3|A0A4Q3JDH3_9BURK Tryptophan 7-halogenase (Fragment) OS=Oxalobacteraceae bacterium; OX = 1871070 GN=EOO78_37110 PE=4 SV=1
FHPFASMLDNLTMHQFVDNVHERLGGADVHAHPDRFFVAAALARQGRGPRAHASFPFDVWYGYHFDATLLGQFLATKAVALGVRHLQRHVRQVRLGERGDIGDLLLDDGQPLAADLFVDCTGFFSLLIGQALQTPFIPYAENLFNDAAIAMPTPLQGAIASQTVSTALRHGWAWKIPLTNRYGNGYVYSSAHCSADHAETELRAHLGLLDADIPARHLKMRVGRMAQVWNRNCIAVGLSQGFIEPLEATALLFVQRTAAMLVEVLENGDIGAASQAAFNDAMCTRFENTRDYIVAHYKTNSRTDTDYWRENAENLHLSDSLQGVLMTWMSRKPLVAGLQA

SEQ ID NO: 84248 - protein, 518 aa, Shewanella putrefaciens
  REGION 1..518: note = tr|A0A366ITL3|A0A366ITL3_SHEPU Tryptophan halogenase; OS = Shewanella putrefaciens OX=24 GN=DET47_11568 PE=4 SV=1
MKVKQAIRKIIILGGGTAGWMAAAALANNPVFAAIELCLVESDNIGTIGVGEGSTPHLKRFMDNLGISEKDWMEPCHASYKTGIDFINWNGDGQQYFHPFYFQMDVKPAEVFFINANARRRGHGNAVRPDAFFSSGVLAKHNLSPRPNKALPYTNEYGYHFDATELANYLKEYACQRGVKHLIGDVIEVSTTQNQHIDALMLANGERLNADFFIDASGFSAKLIHKTLGVPFQSFANELLNDSAVTVPVPVPALMDSTQTQQTHDLQNNALQTQAQQAKFHTRATALSAGWLWQIPLTHRLGNGYVYSSRHLSANAAAKELLHSVNLPESTQVRFLKMRVGVSDKAWHNNVLAIGLAQSFIEPLEATSIMMTQFTLEKFMSLFERYQLNKQAETLSRQTLNQAVMQLVLGIKDYIQAHYVTSQRSEPYWLAARKVTISQRLTQLLQAWYQGEDFDLLLYQYDQQLAYFRPSWYALLAGMDYRDPKLKRPFEPISTEITAQAIRYSQTLVEQYFQPKHP

SEQ ID NO: 84249 - protein, 442 aa, unidentified
  source 1..442: note = Caballeronia turbans
  REGION 1..442: note = tr|A0A158FBS6|A0A158FBS6_9BURK Tryptophan halogenase; OS = Caballeronia turbans OX=1777134 GN=AWB73_00941 PE=4 SV=1
MSEAIQTWDVAVIGGGPAGSTAATLLADRGYRVRVLEKARHPRFHIGESLLPANLRLFERLGVADEVRAIGMVKLAAEFVSPQHGDRMQRFLFADAWDKSMPSAYQVRRSELDEILLRNAAKHGAHVSEGCRARDVVFAPDGSSATIGAEHDDGRIEEVRARFVVDASGRDTLLANHFKTKRRNERHNSSALYGHFRNARRNVGQNEGNITVFWFEHGWFWFIPLADGATSIGAVVWPAYLKRRPKGTSVETFFRDTIALCAPLAERLEDAELISEVHATGNYSYTGDMTHGRNFLLLGDAFAFIDPVFSSGVMLAMQSAFAGAEAIDTALKNPASARAALAKFDRDVRHGPREFSWFIYRMTSPTMRNLFMGPRNPLRMKEALLSLLAGDIFGTTPIWHSLRAFKGIYYVSAALDWRNSLRAYRQRRRNLSDAKRAELSAN

SEQ ID NO: 84250 - protein, 522 aa, Porphyrobacter sp.
  REGION 1..522: note = tr|A0A2N4WWG8|A0A2N4WWG8_9SPHN Tryptophan halogenase; OS = Porphyrobacter sp. TH134 OX=2067450 GN=C0V72_05680 PE=4; SV = 1
MRSNGIGNADRLARVVVVGGGTAGWMAAAALSRFFNDGRRTITLIESDAIGTVGVGEATIPPIRSFNAMLDITEAEFLRETRGTYKLGIEFVNWGRIGDRYIHPFGNFGQDFHGIPFHQLYLREQARGGAVGAIGDYSMSAAAARSGRFARPAAGAQSLVKELAYAYHFDAGLYAAYLRRLAERQGICRVEGTIVHVTRDGESGDVASLTLDNGTIIPGDLFIDCSGFRGLLIEEALETGYEDWSRWLPMDRALAVPSRTPGPPDPFTRATAHTAGWQWRIPLQHRTGNGHVYSSAFMDEESARDILLANLESEPLAEPRGLRFLTGMRRKAWNHNVVALGLASGFIEPLESTSIHLVQNGIARLFALFPDMPISPIERDEYNRGMRDVFEDVRNFVILHYKATAREDSEFWRYVKHMDVPDSLTRKMALWQHRGRVLRDNAELFSLPSWIAVMLGQNIWPEAHDPIADTLDEAKVAAAMAQMREAYRETAAKLPVHEAFLRQSGSWHDDGVQVAPPRAVNA

SEQ ID NO: 84251 - protein, 507 aa, Pseudoalteromonas ulvae
  REGION 1..507: note = tr|A0A244CTI4|A0A244CTI4_9GAMM Tryptophan halogenase; OS = Pseudoalteromonas ulvae OX=107327 GN=B1199_01125 PE=4; SV = 1
MKTTIKSVVIVGGGTSGWMTAAALSHHFAQSKVSVKVIDSTEIGTIGVGEATIPTLRRFYQTLGLTDQDVLTACQATCKLGIEFKDWYQAGSSFIHPFGLFGQAANGVPFHHYWLKLKQNGDPSPLSDYSYGVRLAQKNKFTLPVNNPNSPLAIFDWALHFDASLFAELMKKVAIKHGCEHIDNTITSVNLDAQQEAIDSVTLKNGQCVTADLFIDCSGFKALLIEGALKAGYQNWSQWLKCDRAVAVQTTRVDEPLSRTVVQAREAGWQWTIPLQNRSGNGHVYSSQYMSQDEATALLLEHVKGEVLQPPRHFSFTPGRRTQAWKSNCIAVGLAAGFLEPLESTSIALVETAIDKIIQTFSSPEYTKQDVERFNHVTATEYERVRDFLIVHYALNQREQGQMWQDCREMTLPRSLSDKLHQYQTNGALTRLPWEMFGPDSWLAIFDGFACYPQSYDPLVDKLSVDYLAESFKLMRDGISDAVAHAPTHSEFLRQMTHFQSHQPEPA

SEQ ID NO: 84252 - protein, 512 aa, unidentified
  source 1..512: note = Acidobacteria bacterium
  REGION 1..512: note = tr|A0A2E4W2P6|A0A2E4W2P6_9BACT Uncharacterized protein OS=Acidobacteria bacterium OX=1978231; GN = CL489_01100 PE=4 SV=1
MKKNLVIVGSGQSGLIAALLVKSILPEYANITVISSSDIPPIAVGEGSTEHWNEFEKIVGLVRRETIRQCDATFKYGIRFMDWTHHTPDYMHSIGGDGLYADHFNVLYNYVNSSDHLLTSVLLPVGLTEGLVKHEEDDHMLHQVNQLHFDTHKLNNYLRDRCVKLEIEFVDAKVQGLERDSHTGDIAKLVTSAGNYPADFVIDASGFSRTVLSLLGDVHCTTFDDVLPCDTALVFRTPSESNSILKPYTSARALSSGWLWEIPTYRCRGNGYVFSSDYITESQALEEVETTLGIEVPDANLIEFRPHYVTNSWQSNCVAVGLASNFLEPLEATSIAATINQVRLLCSNLPAYKPNSSVLQNSYLKTFRSMVDNMLAMVAMHYVSDRADSPMWLEQQSRPKPDLLQHLIGIMKYRGPEDHDIPHTGFELFRAGHFWHVGQGQGLIDRENSRVALMARLQEDNAADRVRTIVTQQGAKGSLDHRRVLELAREDLPVTHYPDWKFGEYQIERLDV

SEQ ID NO: 84253 - protein, 496 aa, Colwellia sp.
  REGION 1..496: note = tr|A0A3D0C9D3|A0A3D0C9D3_COLSX Tryptophan halogenase; OS = Colwellia sp. OX=56799 GN=DEO86_11770 PE=4 SV=1
MNSPIKKVVVLGGGTSGWISAALLKKILGTAIQLELVESDAIGTIGVGEATIPPIKHLNNVLGINEAEFLRETKATIKLGINFENWKSQGHSYLHSFGAAGKSLAFCHFHHLLKRANQLEDDSNLWQYDLNYLAAKAGKFAQIKSKDPIIELPYAYHFDAGLYAKFLRKFSEKLGVIRTEGLVEYVEQCPNSGHITSLKLKNGQTVTGDLFIDCSGFKGLLIQEKLRTGYEDWSHLLQCDRAIAVPSERLEKTLPYTRSIAHAAGWQWRIPLQHRNGNGLVYSSSHCSEQQAMDTIMGNLDSKAIADPKVIKFQTGRRYQQWNKNVIAIGLSSGFLEPLESTSIHLVQSAVVRLAHLFPHQGINSSLVDEFNKQSATEFEQIRDFLVLHYHVTERTDSDFWQDMRQMKIPDSLAHKIEIFKQSGRLFREQNDLFTDSSWLQVMLGQGIVPQDYHPIANMMSDEKLTEMLRKVKEIKQAPIDKLPSHDEFLRVFCRQ

SEQ ID NO: 84254 - protein, 516 aa, unidentified
  source 1..516: note = Pseudoalteromonas fuliginea
  REGION 1..516: note = tr|A0A063KVC5|A0A063KVC5_9GAMM Tryptophan halogenase; OS = Pseudoalteromonas fuliginea OX=1872678 GN=DC53_04905; PE = 4 SV=1
MTKPITKIVVLGGGTAGWLSAGLLAAEHPHLNVTLVESANVPILGVGEGTWPSMRNTLKRIGIKESDFITQCDASFKQSSKFINWRNLSEGENYYHPFMNPQGYEHTNLHASWQRIAPNQKFADVVNMQSFVCQAALAPKQLQTPEYAAVTNYGYHLDAGKFAEFLKNYCVKNLNVTHITDDVTEVINDEHGYIAALKTNNNGDITGDLFIDCSGSCARLIGDHFNSEFIAQDHILFNNSAVAAQIPNAHINQPIASATLSTAQSNGWIWDIALPTRRGTGYVFSSKYQSDESAANTLKSYITKSTSEQQAEQLTYRVLKFSPGYRQKFWIKNCVAVGMSAGFLEPLEASALAMVELSISMISEQLPQNRTHMSQLKTRFNDRFSTRWQRVIEFLKLHYVLSKRDDTPYWQDISNLNTAPERLQNLLKLWQFQPPSRFDFIENEEVFSSSSYQYVLYGMGFNTQTVSAQNTFNDPRAGDYYYQQNREKIAQCLNGLPSNRALLNHLLSNNGQPHND

SEQ ID NO: 84255 - protein, 496 aa, Colwellia sp.
  REGION 1..496: note = tr|A0A3D3GYY9|A0A3D3GYY9_COLSX Tryptophan halogenase; OS = Colwellia sp. OX=56799 GN=DIS98_03470 PE=4 SV=1
MSTLKNIVIVGGGTAGWMTAISLLHKWAGSGTKVSLIESPEIGTVGVGEGSTPALKTFFTDLGITESEWMPACNATYKVGISFSNWSTVTGHTDYFHPFFSEYDVGPGESFFTRCGHKRRGVSLTAHPDNHFIAPQLFKQNKGPAAIEPTQIDYGYHFDSSRLALFLKEKSLALGLNYIEAKVSNVTLAANGDIEGIQIDGIKDIKADFFVDCSGFYSLLIEKALNSKFISYENSLFNDSAVTIPTEVYADRAPSATISEALSSGWCWQIPLTNRIGYGYVYSSKYLSAEGAEKELRKHIGKSSEGKPAKHLKMRIGRREEHLKNNCVAIGLSQGFIEPLEATALMLVQYSIYKFIRYVETSDTDVDNYNTTINQMFEGVKDYIVTHYKLNDRVDSQYWIDCREKPAISNTLESIITAWDSEQDFDAALSKLSPSLMYKRASWYAIFAGMGRFPEGRKAATTFQLIPSHEKTLSFCQGITAEKFIDHKESILMLTQ

SEQ ID NO: 84256 - protein, 804 aa, Methylobacterium sp.
  REGION 1..804: note = tr|A0A2U8W3L0|A0A2U8W3L0_9RHIZ Tryptophan halogenase; OS = Methylobacterium sp. 17SD2-17 OX=2202825 GN=DK389_09215; PE = 4 SV=1
MMRPSSDTSAPRVVVVVGGGLTGWMSAAYLRRVLRRLGSPVTLVAGAGTPAPGALATRPVFTRFLRGFAIDEAIFMRRCGATYALANRYDDWFEAGAGHWHPYGECGPRIDGLDIFHPWLKERLEGGTAGPYADYAPQTHMAAAGLGPAPDTGGSSVTEAGSYGYHLDRAALVRFFREIALSEGVRAVPGRAVSAETGPLGDVAAIAVEGGARIAGDIFVDCTGEAAFLIGGTLGEAWIEDPAAGACDRLASVSRPPDPARPSFAAYAGTREGWTQRLPLAGRTEIALAYRAELTSQEDAEAALRGLAGAGPDGAVRHRVLRAGRRRAPWLRNVVGIGGSVRESGPLGGFEVDLIPCALEAFVEHLPRGEGVAILRQGYARRMADLADEASGAVALHFALGRRPEPFWAAARRAPLPDALADRLDLYEIGGRVAVPEARLFGESDHYRLLAGADLLPRRAFAPVDLADPRGLGTFLAGIRARAEQLAGTMAPHALLLERLHGPVETPRPDARLAPANRAATGPAALRRTPEGARVADLVAALGQPFGYERSVKASAGTLQSDRFLMSLHRTSLGPEPGPVLKGLAAKLGLGPAERAEAAAHIAEADLLHLGYEDGPSGPLYKLYVEWSARTDAAWAREDEGEGEPLLVHRAYKWDPLRPGPAIVTLYHWPRVRGPDEIAARLARIGAGEAGWGEAGPRVLGVAQALLELARASGRGAPHYLEAREAPGPRLSYDLNLYACGLTVGAAENLLLAAFADLGVPGAEAAAILAERRDEALGHVAGGVGRDGRPFLTLYSGVAAGSER

SEQ ID NO: 84257 - protein, 498 aa, Pseudoalteromonas sp.
  REGION 1..498: note = tr|A0A1R4JSL5|A0A1R4JSL5_9GAMM Tryptophan halogenase; OS = Pseudoalteromonas sp. JB197 OX=1434839 GN=CZ797_07745; PE = 4 SV=1
MNNKITNVVIAGGGTAGWITAALLNKVLGNVINITLVESDQIGTIGVGEASIPPISHLNGALGINEHEFINATQATIKLGIEFENWREQNHKYMHAFGSIGKDFPFCEFHHFWLKAKQQNYAPDLWDFSVNYQAAKAGKFAHLRNLPNTQLPGLHYAYHFDATLYAKLLKKLAQQRGVKRVEGKIKSVQQCQQSGDIQALTLESGSVIKGDLFIDCTGLSALLIEKTLNTGFEDWSHWLPCDSAVAVQSESANEPVPYTRSIAQNAGWQWQIPLQHRVGNGLVFSSRYLTDDEVKQQLLANLPGKAITEPRVIRFKTGRRRLQWHKNVVAIGLSSGFLEPLESTSIHLIQTAAIRLIKLFPHNGIKHSQVTTYNLQSKTEIERIRDFIILHYKLTTRTDSAFGRQCQQMSIPETLQQKITLFKQTGKLTREDDELFSEPAWQQVMIGQGLEADDYHPLGNALTDEPLLALFSDLKALINHTVEQLPSHSEFLSRMKNN

SEQ ID NO: 84258 - protein, 507 aa, Novosphingobium mathurense
  REGION 1..507: note = tr|A0A1U6GUT2|A0A1U6GUT2_9SPHN Tryptophan halogenase; OS = Novosphingobium mathurense OX=428990; GN = SAMN06295987_101527 PE=4 SV=1
MTQNRFSIVIVGGGTASWMSAAALARFAPPGYAVTLVESEAIGTVGVGEATIPAIRLFNKALGIDEAQFLRETSASYKLGIAFDGWLREGHSYMHAFGTVGRHLGLLPFRHYWARARASGVARPLAHYAANELAARTGRMATGISGPGIPELPWAYHFDAGLYAAFLRRLAEGMGVVRHEGRVARVIRDDAGDIAAVETDAGQALSADFFIDCSGFTGLLIEKELQTGYEDWRHWLPCDRAVAAPCEAAGPFTPYTRSIARSAGWQWRIPLQHRIGNGLVYCSEYLSDDAATGLLLSHLEAPAQAEPRALRFTTGRRAKAWNRNVLAVGLASGFMEPLESTSIHLIQSTIMRFLTVLPSGPASPAIVNEFNRRTAEEFERIRDFLILHYRANARVGEPFWDRCRDMAVPDTLAARIAEFEEACQIQPAGDELFQEPAWLQVMAGQGIEPKGWNPIADALSDDDLSGFLGAIEQACIETVRPMPRHMDFLAATCAAAPSRSPELETLR

SEQ ID NO: 84259 - protein, 496 aa, unidentified
  source 1..496: note = Cellvibrionales bacterium
  REGION 1..496: note = tr|A0A424RHQ8|A0A424RHQ8_9GAMM Tryptophan 7-halogenase OS=Cellvibrionales bacterium TMED157; OX = 1986773 GN=CBD17_003395 PE=4 SV=1
  VARIANT 181: note = Xaa can be any naturally occurring amino acid
  VARIANT 194: note = Xaa can be any naturally occurring amino acid
  VARIANT 206: note = Xaa can be any naturally occurring amino acid
  VARIANT 283: note = Xaa can be any naturally occurring amino acid
  VARIANT 302: note = Xaa can be any naturally occurring amino acid
  VARIANT 488: note = Xaa can be any naturally occurring amino acid
MSERKVERVVIAGGGTAGWMAAAALSRLVGRKLSVTLVESEEIGTVGVGEATIPTILTINRLLQIPEPDFIKLTSGTFKLGIRFENWRTEGEDYFHSFGDTGKGSWAAGFHHFWLRAKELGLAEQYGEYCPELKAAEAERFAITSENKLNYAYHLDASKYGMYLRKLAEASGVTRIEGKIXKVETSPHDGFIEXLELDNGQRIEGXLFIDCTGFRALLSEGALETGFDDWSHWLPANRAWAVQSELSEHPKPYTRAIAHKVGWQWRIPLQHRAGNGLVYCNDXMDEETARDLLLENVPEKTXIEPRPIRFTTGQRKQYWNKNCIAIGLSSGFIEPLESTSIHFIQNGIMWLLLMFPDLCIEESTVREYNTKMRSEAEHIRDFIVLHYALNERHGDPFWDHCRNMDLPDSLKHRMELFERSARVFKPQDDVFAENSWVQVMMGQGLTPEGYHNIAQAMSSEQMTAFLKGIQHEVAQTVAKLPQHGAFVXTLIQHAKV

SEQ ID NO: 84260 - protein, 497 aa, Colwellia sp.
  REGION 1..497: note = tr|A0A2G2EKT2|A0A2G2EKT2_COLSX Tryptophan halogenase; OS = Colwellia sp. OX=56799 GN=COA35_22620 PE=4 SV=1
MKPIKNVVIAGGGTAGWIAAALLNKVLGKVINITLIESSSIGTIGVGEATIPPIIQLNNALGINEQDFINATNASIKLGIEFENWKTPSHSYMHAFGSFGKDFPFCDFYNFWVKGQISGSEDSLWDFSLNYQAAKKHKFAPLSAIPNTQLPGISYAFHFDATLYAEYLKKLALSRGVKHIDAKIERVTQCPNTGQINSLTLDNNSQIEGDLFIDCTGQRALLIEQTLNTGFVDWSHYLPCDSAVAVQSTGSDELRPYTRSIAHNAGWQWQIPLQNRTGNGLVYCSRYLSDEGATALLLNNLPGEPTTDPRLIKFKTGRRLKQWHKNVVAVGLSSGFLEPLESTSIHLIQSAVIRLIKLFPHNGISDALVTEFNKQSVTEIEHIRDFIILHYKLTEREDSPFWRQCKQMDIPQSLAHKIDLFRQTGKVVRENDELFAEVAWQQVCIGQGLIPEDYNNIVDSLSSEQLNDLFSTLKTLITSTVDQLPTHKDFLAKIKKA

SEQ ID NO: 84261 - protein, 528 aa, unidentified
  source 1..528: note = Alteromonas naphthalenivorans
  REGION 1..528: note = tr|F5Z7K9|F5Z7K9_ALTNA Putative tryptophan halogenase OS=Alteromonas naphthalenivorans OX=715451; GN = ambt_07620 PE=4 SV=1
MVVANKTAANQQATDQYSRDHQEAKQTPVKRVVVAGGGTAGWLTAALLKKVIGDAVNITLVESEAIGTVGVGEATIPPIRLVNQVLGIDEATFLRDTKATIKLAIRFENWKQQGQQYYHTFGAPGKSMAFCHFYHFWLKARQQGLKHDLWEYDLNYLAAEAGKFARINAKDPVLELPFAYHFDASLYAKYLRKLSEGLGVKRVEGKISYVSRHKHSGNVKALHLENGHAIEGDLFIDCTGFRGLLINETLGAGYDDWSHLLPCDSAIAVPSERHENTAPFTRSIAHSAGWQWRIPLQHRNGNGHVYSSRYMSDSQAHDTLMANLDTKPLGDPKFIKFTTGRRRQQWYKNVVAVGLSSGFLEPLESTSIHLIQSAIVRLIKLFPHQGISESAVKEYNAQSKVEFEQIRDFLVLHYCLNEREDSDFWRDMRHLTLPDSLTHKMALFKQNGNLVREQNDLFLESSWLQVMYGQGLVPEDYHGLANSFSDEKTQAMLSSLYNIKREPLASLPTHDAYIQSMIDSANKTSVSF

SEQ ID NO: 84262 - protein, 517 aa, Xenorhabdus szentirmaii
  REGION 1..517: note = tr|W1J423|W1J423_9GAMM Tryptophan 5-halogenase; OS = Xenorhabdus szentirmaii DSM 16338 OX=1427518 GN=pyrH; PE = 4 SV=1
MINSVLIVGGGTAGWMTAAYLSKAFDKNINITVVESKEVKKIGVGEATFSTVRHYFDYLGLNESEWLPECSGSYKLGIRFENWDGQGNHFYHPFERWEVVKGFPISEWWLSKKLKDQRFDYDTFLTPHLCEAKRSPRRLDGSLFAQSIDKSLGQSTLAEQRAQYPYAYHFDADGVASFLKRYAMNRGVKHIEDDVTHVEIDTNGNIGYLEAKIYGKLRADLYIDCTGFKGLLINKALNEPFISFSDVLKNNRAVALRVPRENENDIEPYTTARTMSNGWRWTIPLYKRNGYGYVYCNKYQSPEEAEMELRKSIPYENAECVANHIRMRIGRSNRSWVKNCVAIGLSSAFVEPLESTGIFFIQHGIEQLVRFFPRSSGNELLIEEYNTRVNRVVDGVKEFLLLHFSLAQRNDTLYWKEWKNVELPKELLKKITLAQDHLLDKETIYPFYHGFEEYSWNTMILGLCSGSLNNKPALSLMTSDEADEMLLQHYMKAENMVNNLPTCYEYLKHIHDLKNKN

SEQ ID NO: 84263 - protein, 508 aa, Porphyrobacter sp.
  REGION 1..508: note = tr|A0A2N4WW78|A0A2N4WW78_9SPHN Tryptophan halogenase; OS = Porphyrobacter sp. TH134 OX=2067450 GN=C0V72_05700 PE=4; SV = 1
MNDSAPKPVRVVVLGGGTAGWMTAAGVAKLLPGLASVQLVESEEIGIVGVGEATLPHIRGFVEKLGIDEAAFMKATHATFKLGIDFRDFGRIGESYIHPFGSFGEEVGGVGFHHYWLELARHGKAREIGDYSLAVAAAKANRFRPPSADDSLGSTYGYAYQFDATLFGPFMREFARGIGVERHEGRVVTVERDPASGDVTALVLADGRRIEGDLFIDCSGFRSILLGQELEVPWEDWTHWLPCDRAAAMPCTHATEDLRPYTTATAMPAGWRWQIPLQHRMGNGYVFSSAHISEEQACDAIRACAEGAPLAEPRILKFRPGRRARSWSHNVIGVGLASGFLEPLESTSIYLAQMAITYLIELFPAAAGAIDPRDRDEFNRLVDMEYDRVRDFLILHYHATTRDDSEFWNHVRTMRVPDSLADKLELWRRAGRIEKYSDGLFYDASWIAVYVGQGLLPEVHDPRAAMIAPDALARATERLRMAVTGEVAAMPGHRDYLRGEAARLADAA

SEQ ID NO: 84264 - protein, 508 aa, Porphyrobacter sp.
  REGION 1..508: note = tr|A0A2N4WTU9|A0A2N4WTU9_9SPHN Tryptophan halogenase; OS = Porphyrobacter sp. TH134 OX=2067450 GN=C0V72_08410 PE=4; SV = 1
MQPGITKLVIVGGGTAGWIAAAAFSRLLGERLTIELVESEAIGTVGVGEATIPQIIRLNAILGIDEHEFLRATSGTFKLGIEFVDWGRQGSRYLHTFGDTGMNLGNVAFHHYWRRSVSGQAVPDPKGLWDYSLHQQAADQARFGKLDRVGNTAMTGLAYAYHFDASRYALFLRAYSEARGVTRTEGIVQSVERQGESGDITAIGLADGTRVAGDFFIDCTGFRSLLLGGELGVGYEDWSRWLPCDRALAVPSERLPTLVPYTRATAKAAGWQWRIPLQHRTGNGHVYSSGFTSDDAAADVLLKGLDTKALGDPRPIRFTTGRRAAFWAQNCVAIGLSSGFLEPLESTSIHLIQSHISRLIQLFPRAGNPAALRDEYNRRCAAEFAQIRDFLILHYHRTDRDDSEFWRYCKHMAVPDSLSHKLELFAAAGRVGRDPDDLFRDASWVQVMLGQGIMPADYDPMADSVAPQQLGEFLTNLRILISRAVAQLPSHEDYLRQHCPADESLLAA

SEQ ID NO: 84265 - protein, 504 aa, Sphingomonas sp.
  REGION 1..504: note = tr|A0A0W1QJ38|A0A0W1QJ38_9SPHN Tryptophan halogenase; OS = Sphingomonas sp. WG OX=1592629 GN=ATB93_13455 PE=4 SV=1
MGGAKPIRVVIVGGGTSGWMTAAALARLLPKRVSLHLIESETIGVIGVGEATLPHIRGFVEKLGIREADFMAWTRGTFKLGIEFRNWGRIGDSYVHPFGTFGRGKGEVDFHHYWTRLRLAGAELPPFEVFSYACMLARANRFDLPSEDPDRLTSTYGYAYQFDALLFAPYLRAIAEGLGARRTEGKVVEVVRDGERGTITAVRLDNGERIEGDLFVDCSGFRSLLLGEALAEPFEDWNHWLPADRAVAMPCRTTTSVTPYTSAIAMPAGWRWRIPLQHRTGNGYVYASAFTSDDEAARALTGAVEGAPLADPRILRFRAGRRRRSWVKNCVAIGLASGFLEPLESTSIYLVQQAITALIELFPDNADSDVERDEFNRLIDLEYDRIRDFLILHYHATTRTDTDFWNYVRTMEVPDSLAEKIELFRRAGRVVKYREGVFLDASWVAVYVGQGILPQGYDPRADVPDADVLMRGMRALQGEIAAAVDRVPEHLRYIDRYCPMAAAA

SEQ ID NO: 84266 - protein, 499 aa, unidentified
  source 1..499: note = Sphingomonas elodea
  REGION 1..499: note = tr|A0A495F2Q0|A0A495F2Q0_SPHEL Tryptophan halogenase; OS = Sphingomonas elodea OX=179878 GN=C8E52_2457 PE=4 SV=1
MGQHIIIAGGGSAGWMAAALFARLRPAPDTRITLVESDAIGTIGVGEATVPILRDFNRLLGLHEPDFVATTQGSFKLGIEFVGWGDAGNRHFHGFGDFGAPIEGLAPHHHWLRLRAAGRIADPIDGWSMPALAAAQDRFAPPEALRGEAAEYRYAYHFDAGLYAQLLRSHAEARDVTRIEGRILAAERDPSTGDLTALRLEGERRIAGDLFIDCTGFASRLLGEALGTPFVDWSRWLPADRALAQGCTRAGRFTPFTRSTAHAVGWQWRIPLQHRTGNGLVYSSAYLSDDEAAAWLAANLDGDAIGDPRPLRFTTGRRERFWAHNVVAIGLAAGFMEPLESTSLQLVQTGLVRLAELLPSIGAADPAVIAEYNRETIGEYERIRDFLIAHYCISRRPEPFWRDMAAMALPDTLAHKLALWDAIGRLPLYDRESHAEASWVAVLLGQGRFPRGHEPTADRPPLDALDRLFAQRRAELEAALPRLPAHDHFVAKTCRAEDA

SEQ ID NO: 84267 - protein, 503 aa, unidentified
  source 1..503: note = Sphingomonas elodea
  REGION 1..503: note = tr|A0A495F2U9|A0A495F2U9_SPHEL Tryptophan halogenase; OS = Sphingomonas elodea OX=179878 GN=C8E52_2417 PE=4 SV=1
MAVAAPYRIVVAGGGTAGWMAAAALARFLGEGFTITLVESDAIGTVGVGEATIPQIRMFNASLGIDEDAFVAATQASYKLAIEFFGWTKGGRYMHAFGDVGRDNGLLAFRHTWLRGLAEGVAEPLAVYALNNVAALANRMQRGPARTARVLPEMPYAFHFDAGLYARFLRSYAEARGVVRHEGRIEAVARNGEGGDVAALHLDGDRRIEGDLFLDCTGFHARLIGEAMGVGYQDWSHWLPCDRALAVPSARARDFTPYTRATAHDAGWQWRIPLQHRTGNGIVYSSRHLSDDEAAARLLAGLDEPALGDPRPIRFRTGRREVAWAGNVIALGLASGFLEPLESTSIHMIQSAVERVLKLLPSGRALAPLRDSYNRQAANESERIRDFLILHYWANDRDEPFWRDRRESPLPDGLAEKIALWRETGEIVREDGDLFSDVAWLQVLVGQGIAARGHHPLADQPPVAQIAEYLDLLAKLNAREVAQMLSHSDFVRAHGAADAEIAA

SEQ ID NO: 84268 - protein, 503 aa, Caulobacter sp.
  REGION 1..503: note = tr|A0A258IV06|A0A258IV06_9CAUL Tryptophan halogenase; OS = Caulobacter sp. 32-67-35 OX=1970330 GN=B7Y81_04765 PE=4; SV = 1
MTTGENHVSGQIVKKVVVAGGGTAGWMAAAALSKQLGPLLDITLVESDDIGTVGVGESTIPTARTFNALLGIDEATFMRETQSTFKLGISFENWGQIGDRYIHSFGQVGKSTWMGGFHHFWLQARAQGFGGELGDYCFELKAAEADRFFTDENATTNYAYHLDATLYGRFLRKMSEGKGVRRLEGKIARVQQRAEDGFIEALVMESGEIVEGDLFIDCTGFRGLLIEQTLKAGWEDWSHWLPTNSALAVQTTSTEPAVPYTRAIAHKAGWRWKIPLQHRVGNGLVYCSDHMSDDEARALLLREIDGEPLIEPRVIRYGAGRRRKTWSKNCVALGLASGFVEPLESTSIHMIMIGVTRLMQLFPFGGVNDALIERYNRLAEDELEKIRDFIILHYKATERSDSPFWDYCRTMDIPDSLAQRIDLFRENAQVFQAPGELFQVDSWLQVLLGQRVEPRSHHHMGRMMPPDQLRQALDSLKGNIARAVEGMPSHQAFVDRYCAAGST

SEQ ID NO: 84269 - protein, 530 aa, unidentified
  source 1..530: note = Caulobacter rhizosphaerae
  REGION 1..530: note = tr|A0A561MRN8|A0A561MRN8_9CAUL Tryptophan halogenase; OS = Caulobacter rhizosphaerae OX=2010972 GN=FHW61_11929; PE = 4 SV=1
MSQTINDILIVGGGTAGWMTAAYLARRLGSTRPDGVRITLIESSEIGIIGVGEGTFPTIQNTMRTLGVDEARFMREAGAAFKQGIRFVDWKTAPRDGVHCHYYHPFAQPRLLNGGLDLAPYWLMGQAGDIPFSDAVTLQDKVCEAGRGPKRLDDPQYGGPMAYAYHFDAGKLAGLLRDVGKATGVRHVLGNVLAVNKAEDGSIASVTTREHGDLVADLYVDCTGFAGALIGEAMGSPWIDKGDTLFVDRALALQVPYDRPDAPVATTTISTAHEAGWTWDIGLPDRRGTGYVYSSRHTTDDRAEQVLRGYVGKAGEGLTPRLLKLKVGHRDRHWIGNCVAVGLSGGFLEPLESTGIVLIEAAAYMLARNLPRRGAMEAAARQFNAAMTDRYLRAIDFIKLHYCLSQRTDNRFWTDNADPASIPETLRDHLAMWKHRPPNVFDFPNLHESFKYFNYQYILYGMGFETTVDPAAHVHGDLARADFARVREAGLRAAASLPDHRALLTDVYARGFSTKAPDLATAEAGEAPRR

SEQ ID NO: 84270 - protein, 499 aa, unidentified
  source 1..499: note = Novosphingobium kunmingense
  REGION 1..499: note = tr|A0A2N0H6D3|A0A2N0H6D3_9SPHN Tryptophan halogenase; OS = Novosphingobium kunmingense OX=1211806 GN=B0I00_2095; PE = 4 SV=1
MTAASTRRIVIAGGGTAGWMAAAALANALGDAIDLTLVESDAIGTIGVGESTIPPIALFNRLLGINEAEFMRATQATFKLGIKFDNWKEVGSTYFHSFGATGKDHWTAGFQHFWLHGLTQGHKHSYDDYCLELKAALDGKFAHLPNDRMNYAYQLDSALYAAFLRRRAEGEGTKRVEGRIVSVELDGESGNIAALVLDRDRRIEGDLFIDCTGFRALLIEGALHAGFDDWTHWLPCDSAIALQTASVRPPVPYTRAIAHDSGWQWRIPLQHRQGNGIVYCSRYLTEDAALERLLGSVEGEVLTPPNRIRYTTGVRRRQWHRNCVAVGLSGGFMEPLESTSIHLIQRAVLRLIRMLPGGSISPRDVAEFNEQQFTDMEQIRDFLILHYTVTERRDSPFWRHCAALPRPDTLDQKIELFRETGRVFRKNEELFAENSWVQVMMGQGIVPQTYHPIATKLRAEELDGLLTMLRDGVAKTVAGLPGHQDYIARYCGTAQEAAA

SEQ ID NO: 84271 - protein, 503 aa, Brevundimonas sp.
  REGION 1..503: note = tr|A0A168N7L3|A0A168N7L3_9CAUL Tryptophan halogenase; OS = Brevundimonas sp. GW460-12-10-14-LB2 OX=1827469; GN = A4249_02000 PE=4 SV=1
MSDQPEPVRHIAIVGGGTAGWMAAAALGRAFTRAQGLALRITLIESESIGTVGVGEATIPPIRQFVQTIGLSEEDFIRSTAATAKLGIAFKDWIAPGSEYFHGFGDYGPTVAGQAWRQYLFRLKAAGRIDGLDPWSMPTAMARAGKFAPPVEDSRSVLSHYSYAYQFDAGLFARRLRTLAEKLGVVRREGRITGVDRDGETGLVRAVTLEDGGEVEADLFIDCSGFRGLLIEQTMQAGYEEWTHWLPCDRAVAVPCSSSLAPEPITTARAREAGWQWRIPLQHRVGNGYVYSSDHVDDQTALDDLLGQIESEPLAEPNRLRFVTGRRREAWKGNVVSLGLASGFVEPLESTSINLIQTGIGRLLEMFPDRSFDPALIREYNRRSAQEFERIRDFIILHYHLAGRAGAMWDRCRETAPPDTLMEKIELFHARGEVGLLEDESFREDSWAAVFTGLGTWPKQASPLVCLDDLETVDRQARQFAQLIARAAAALPDHSTTFTGYAR

SEQ ID NO: 84272 - protein, 510 aa, Sphingomonas sp.
  REGION 1..510: note = tr|A0A1I5BBC4|A0A1I5BBC4_9SPHN Tryptophan halogenase; OS = Sphingomonas sp. OK281 OX=1881067 GN=SAMN05428984_0368; PE = 4 SV=1
MTDGQLGRVTKVVIVGGGTAGWMTAAALSRLVPSGVSVTLVESEEIGTVGVGEATIPSLLDYNRMLGIDEDAFVRATGATFKLGIEFRDWARPGDSYLHPFGTHGRDVEGVSFHQLWLRQVALSNPDPGPIGDYCLSAVAARRGRFTRPSGNPQSILSSLFYAFHFDAALYATFLRDIAEQDGVVRVEGRVVAVDRDAETGFIQSVRLEGDRRIDGELFIDCSGFRSLLLGDALGVPFTSWKHWLPCDRAWAVPSARQGPLTPYTRATADTAGWRWRIPLQHRVGNGYVYSSAHIDDDDARRALLAGLEGQALGEPRQLRFEAGRRERLWDRNCVAIGLAGGFLEPLESTSIHLIQSGITRLMSLFPDMGFGATEIDAYNRVMLREYEQVRDFVILHYHATERSDSPFWDQCRTMSIPASLSAKLALWSGKARVFREQGELFTPDGWIAVLLGQGIRPSSIDPLAATLPPGESVRFMAHVRDMIDKTATAMPTHESFIAQHCASPLRQPA

SEQ ID NO: 84273 - protein, 538 aa, Burkholderia pseudomallei
  REGION 1..538: note = tr|A0A0E1VW49|A0A0E1VW49_BURPE Tryptophan halogenase PrnA OS=Burkholderia pseudomallei 1710a OX=320371; GN = BURPS1710A_A2017 PE=4 SV=1
MSNPIQNIVIVGGGTAGWMAASYLVRALQQQANITLIESAAIPRIGVGEATIPSLQKVFFDFLGIPEREWMPQVNGAFKAAIKFVNWRKSPDRSRDDYFYHLFGSVPNCDGVPLTHYWLRKREQGFRQPMEYACYPQPEALDGKLAPCLPDGTRQMSHAWHFDAHLVADFLKRWAIERGVNRVVDEVVQVHLNERGYISSLSTQEGRTLEADLFIDCSGMRGLLINQALKEPFIDMSDYLLCDSAVASAVPNDDARVGVEPYTSAIAMNSGWTWKIPMLGRFGSGYVFSSKFTSRDEATADFLNLWGLSDKQPLNQIKFRVGRNRRAWVNNCVAIGLSSCFLEPLESTGIYFIYAALYQLVKHFPDTLFDPRLTDAFNAEIVYMFDDCRDFVQAHYFTTSREDTPFWRANRHDLRLSDAIKEKVQRYKAGLPLTTTSFDDSTYYETFDYEFKNFWLNGNYYCIFAGLGLLPDRSLPLLRHRSESIDKAETMFARIRREAERLRTSLPTNYDYLRSLREGDVGLSRSRPGPTLAAPEIL

SEQ ID NO: 84274 - protein, 480 aa, Burkholderia pseudomallei
  REGION 1..480: note = tr|A0A0E1VZY6|A0A0E1VZY6_BURPE Putative tryptophan halogenase OS=Burkholderia pseudomallei 1710a OX=320371; GN = BURPS1710A_2599 PE=4 SV=1
MHLPNRTQVLVIGGGPAGATGAAFLAREGVEVTLVDKEVFPRYHIGESLLPSCLEILTLMGARDTFDRHGFQRKPGAYFNWKGETWKLDFGELGGTYRYSYQVRREEFDHLLLQHARAVGAQVHEGVSVREILFDDGRPCAALCVAQGAEEATTVEFDYLVDASGRNGLMSTRYLDNRKFHEIFRNVAAWGYWEGLSWPDDCAPGSILVSSIPDGWWWAIPLADRPTSVGVVMHRDAFVAARRTGTLEQVYAQALALSPVMANLTEHARLVTPLKTEQDYSYTCDSFAGNGYFLSGDAACFLDPLLSTGVHLAMYSGMLAAASLASILRAEVTEREAAAYYRDSYRQAYLRFLVFVQTFYEAHGKLGYYSKADELSHYMIEAGDIRRAFLNLVSGLEDIADAEQATSHLMGEMSRRIDQNLALRKDKRALLSAIGSTQVEDNARFFDAIEGLPCLSANMALDGLYVSTRPRLGLQRVAAM

SEQ ID NO: 84275 - protein, 498 aa, Sphingomonas sp.
  REGION 1..498: note = tr|A0A0W1QKC3|A0A0W1QKC3_9SPHN Tryptophan halogenase; OS = Sphingomonas sp. WG OX=1592629 GN=ATB93_12690 PE=4 SV=1
MSEDRRIRSICIAGGGSAGWMTAAALANALGSSVAITLVESSAIGTVGVGEATIPPIRLFNRTLGIDEAEFVRRTRGSFKLGIEFVDWGRIGTRYFHPFGPFGRDFDLVPLHQYWLDARDKGGAPALDDLSMAWAAAKRGKFAPPLADPRSVGSTFDYAYHFDAGLYAALLRDYAEARGVARIDAEIAGADRDGERGDLTAVRLQDGRRIAADLFVDCSGFRGLLIEEVLGTGYIDWRHWLPCDRAVAVPCERGAFTPYTRSTARAAGWQWRIPLQHRTGNGHVHCSAFMGEDEATAILLANLDGAPLAEPRTLRFTTGHRQRFWSHNVVAIGLSSGFLEPLESTSLHLIQAGISKLLALFPTRDMDPLLIDEFNRISIAEFERIRDFLILHYKLTEREDSPLWRYCATMAVPDTLQWKIDHFRSTGRLVAREFDLFAAPSWLAVHIGQGNWPTGRDALLAARGIDGRAHLAKLADAMARAAETMPDHADYVAGLIGA

SEQ ID NO: 84276 - protein, 505 aa, unidentified
  source 1..505: note = Caulobacter rhizosphaerae
  REGION 1..505: note = tr|A0A561N6E9|A0A561N6E9_9CAUL Tryptophan halogenase; OS = Caulobacter rhizosphaerae OX=2010972 GN=FHW61_10880; PE = 4 SV=1
MTDRPADRAIRSIAIVGGGTAGWMAACLLSQTLRGADCAITLVESPDIGAVGVGEATIPPIFDFLKLIEVDLDAFIPATQATFKLGIRFDDWRAIGDSYWHPFGTFGVSIDRRPFQHVFHKARARGLNPTVPQFSLAAALGDAGRLAHPDPRAPGPLAGLRQALHFDAALVARFLRDHALRRGVRRLEREVAQVRLRGDGFIDALALKEGGELSADLYIDCSGFRGLLIEQALGAGYEDWTRWLPCDRALAAPTAHAGPPAPYTQATAQGAGWRWRIPLQHRVGNGYVYSSAFIDDGAAQDELLAAIGPPLAEPRKLSFTAGRRKTMWSRNCVALGLASGFLEPLESTSIHLVCSGLYKLLDHFPDRDFAPANIAAYNRALADEYETYRDFILLHYCVTARDDTPFWRERAAAPLPDRLAERLELYRACGRVDARPGELFTDLSWFYIFEGMGVLPRAYDPLVDASNFDQVRAILPELTARIDTVVAQSPSHEAALAAIVRRSAA

SEQ ID NO: 84277 - protein, 505 aa, Sphingomonas sp.; identical to SEQ ID NO: 83716
  REGION 1..505: note = tr|A0A0Q4JVZ1|A0A0Q4JVZ1_9SPHN Tryptophan halogenase; OS = Sphingomonas sp. Leaf29 OX=1736212 GN=ASE81_17470 PE=4; SV = 1

SEQ ID NO: 84278 - protein, 524 aa, unidentified
  source 1..524: note = Caulobacter rhizosphaerae
  REGION 1..524: note = tr|A0A561NLX4|A0A561NLX4_9CAUL Tryptophan halogenase; OS = Caulobacter rhizosphaerae OX=2010972 GN=FHW61_104323; PE = 4 SV=1
MSASASERASLRGQPIRRVVIVGGGTSGWMAAAALARMAPPDLSVTLIESDEIGTIGVGEATIPTLADFNAFLGIDEDDFVRQTQATFKLGIEFVDWDRIGERYLHPFGVHGHPTPEFKFHQLWLRLAHWAGDDPERRALVGDLGDYNVGAVAARLGRFSRPQAGAHNVLSTIRHAFHFDAGLYARYLRAYAEARRVVRLEGMVVGAQQGPRDGFIEAVRLGDGRVVEGDLFIDCSGLRGLLINGVLGAGFVDWSRYLPCDRAVAVPYERTAPPDPFTRATADLAGWRWRIPLQHRMGSGYVYCSDHLGDQAAADRVVSQAEGRLLADVRPLRFTAGHRERFWVKNCVAIGLAGGFLEPLESTSIHLAQMGVARLILLWPDLAFGQAEIDAYNTAARLEYEQARDFIMLHYKATRRVDTEFWRRCGAMRIPDSLAHKIALFASSGRVFRFQDDLFTEDSWLAVMLGQGVRPQGYDRLVDQIAHDELLANMGRLKDITLKAALSLPAHQIFIDTCCRGAAGIAQA

SEQ ID NO: 84279 - protein, 525 aa, unidentified; identical to SEQ ID NO: 83165
  source 1..525: note = Alteromonas australica
  REGION 1..525: note = tr|A0A350NZ17|A0A350NZ17_9ALTE Tryptophan halogenase; OS = Alteromonas australica OX=589873 GN=DCW74_00940 PE=4; SV = 1

SEQ ID NO: 84280 - protein, 496 aa, unidentified
  source 1..496: note = Thalassotalea sp.
  REGION 1..496: note = tr|A0A516H9R0|A0A516H9R0_9GAMM Tryptophan 7-halogenase OS=Thalassotalea sp. PS06 OX=2594005; GN = FNC98_03305 PE=4 SV=1
MTDKKIQNVVIAGGGTAGWMAAAALTKLLGKTISVTLVESDEIPTVGVGEATIPTLHIFHRMLGINEAEVMAATNATFKLGISFENWRDVNKDYIHSFGFLGQDCWACGFHHFWLKGLQKGLVGDIGDYCPEHLASREGKFAVMANQDLNHAYHLDAGLYAKFLRNIAEQHGCQRVEGKIQDVVLNSDNGYIEKLHLANGKTVEGDLYLDCTGFRGLLIEQALHSGYDDWSHYLPCDSAIAVQTKSTERPVPYTRSIARDAGWQWRIPLQNRTGNGLVFCSKYMSDEEAKQTLLDNIDGELLNEPRVIKYKTGARRTHWKKNCIAVGLASGFIEPLESTGIHLFQKAIVRLMQLFPHHGIQQSDVDEYNAQTREEANNIRDFIILHYHLTDRRDTPFWRYCANMDIPESLQHRMKLFKESGRNFKKQDDLFGESSWVQVMLGQGLMPEQYHPIVDMMGDKELEAFLNKIKNGVRKKVDSWPDHNDFIQHYCRAANT

SEQ ID NO: 84281 - protein, 181 aa, unidentified
  source 1..181: note = Rhizobiales bacterium
  REGION 1..181: note = tr|A0A524KN89|A0A524KN89_9RHIZ Tryptophan 7-halogenase (Fragment) OS=Rhizobiales bacterium; OX = 1909294 GN=E4H18_02790 PE=4 SV=1
MGRPLRSITIVGGGTAGWLAASFLNRFCKSKDAKHQLEITLIESPTIPIVGVGEASLPGMVVLLNQLGVSESEFFKLTDATFKVAAHFINWNHDDKGRPAEFLNILNAPGGIDGRQLADYFITFDPARAAPDAGLAYVRSFSSVAEMVRGNLAPRRPGEPEFSGEVGYTYHFDATKLATFL

SEQ ID NO: 84282 - protein, 508 aa, Colwellia sp.
  REGION 1..508: note = tr|A0A0S2JHM0|A0A0S2JHM0_9GAMM Tryptophan halogenase; OS = Colwellia sp. MT41 OX=58049 GN=CMT41_12850 PE=4 SV=1
MQQEQAKQQNKINNIVIVGGGTAGWMTAATLAKILGKNYCAIRLIESDQIGSVSVGEATIPQISLFNKILGIDENDFVKKTSATFKLGIEFIDWTKNGGAYMHPFGEHGTNMDAIQFHHYWLKMHQQGKSPDLEEYSLAAVAARQGKFIRPQNMGNSPLSKINYAFHFDATLYADYLRDYAIERGVNRTEAKVVDVSLRDSDGFIDSLLLEDGERVTADLFIDCSGFKALLIEGALKTGFDDWSDVLPCNRAVAIPCLAKETEVLYPFTQAKAQKAGWIWRIPLQHRVGNGYVYPSKFVSDEAAVKILTAQMEGEPIGEPNFLRWTTGVRKKAWHKNCIAIGLSAGFVEPLESTGLHLIQSSIAKLMALFPHQGFNQIDIDTFNAQSKTELEYIRDFIVLHYKATDRDDSEFWRDCQKLQVSERLQAKMALYQANGRIYRQDNELFNETSWLAVMHGQGLRPSGYHPLVDALPEDEIERRLKHIHSVIQKSVATMPMQKDYIAKYCKA

SEQ ID NO: 84283 - protein, 503 aa, Brevundimonas sp.
  REGION 1..503: note = tr|A0A168N7K4|A0A168N7K4_9CAUL Tryptophan halogenase; OS = Brevundimonas sp. GW460-12-10-14-LB2 OX=1827469; GN = A4249_01995 PE=4 SV=1
MIPAPLKRILIVGGGTAGWMAAAALAHVTRGTVKIELVESEVIGTVGVGEATIPPILLFNQLLGIDENEFVRATQATYKLGIQFNDWFQKGRSYFHPFGTYGTRIDAASFHQYWLRLNKAGLDDDLDAYSVTTMAARMGRFTRPDTDPRGAGSQMTYAFHFDAGLYARFLRQRAESQGVVRHEGKIADVRLRDGDGFIQSVRLDDGRELEADFFIDCSGFRGLLIEGALKTGYEDWTHWLPADRAVAMPCTRVGDPTPYTQSTALEAGWRWRIPLQHRTGNGYVYCSPFISDDEAQAKLRASLDGEAMAEPNFLRFTTGRRKRTWNKNCLALGLASGFLEPLESTSIHLVQSGISKLLLHFPDTGFAQADIDNYNRMMRLETERIRDFIILHYHATARDDSPLWRHVRAMPIPETLKQKMDQFRSRGRIFRYEDELFQETSWIAVLLGQGVIPERHDPITETIPLEQVQQWLQKMKAMIQQGVARMPTHEAFIAANCKAPPLQ

SEQ ID NO: 84284 - protein, 508 aa, unidentified
  source 1..508: note = Thalassotalea sp.
  REGION 1..508: note = tr|A0A516HG95|A0A516HG95_9GAMM Tryptophan 7-halogenase OS=Thalassotalea sp. PS06 OX=2594005; GN = FNC98_16240 PE=4 SV=1
MQTNSTAQTQANPSASPFNIVILGGGSAGWMTAAALANTLPSNHFNIRLVESEQIGTVSVGEATIPGIHDFNRFLNINEQELIKATNATFKLGIEFEGWTKGSKYVHPFGPYGLNKNGVPFHQMWLKAKLAGEDVAELVKYNMEGMAAQKNKFSPKLNIPNFPIEHLNYAFHLDAVAYAKYLRQYAEQRGVERIEGKFEQARLNSDGFIQSLTLTDGREIPGDFFIDCSGFKALLIEKTLHACYEDWRHWLPCDSAVAIQSKSQPQINSYTKAITHENGWRWQIPLQNRMGNGLVYSSRFMSADEAVEKLQSLVKEELITEPNHLRWVNGCRPEPWRKNCLAIGLSAGFIEPLESTGLQLIQSAIFRLLSLFPDKNFNQSNIDTYNRFANAEIKSIRDFVILHYKQTDNDHSPFWNYCRNMDVPDSLKNKMEMYQQNGNLFRENNELFSELNWLSVLNGQGMLPKTTHPLTQQFSNQEIMSELQQIENAYSRIVDSLPSHDEFLAMLA

SEQ ID NO: 84285 - protein, 516 aa, Sphingomonas sp.
  REGION 1..516: note = tr|A0A1I5BB86|A0A1I5BB86_9SPHN Tryptophan halogenase; OS = Sphingomonas sp. OK281 OX=1881067 GN=SAMN05428984_0367; PE = 4 SV=1
MTKRILIVGGGTAGWLTAGYLAKRLGADLPGGVAITLVESRDIGILGVGEGTFPTIRRTLATIGIDEADLIRRCGATFKQGAKFVHWRHAPGQGATDHYSHPFQVADSSDGLDLLPYWLLGLGGTENWDEVSNPQKKAADQHRAPKLPTNPDYVGPLNYAFHFDAVALAGLLREQGVKNGVRHLTDTVSEVLLDADGAIGGVRTERNGTLDADLYIDCTGFRAELIGKAMKIPFRSCRDVLFCNRAIAAQLPYTRPDEPIASYTISTAQEAGWIWDIGLDRRRGIGHVYSSDHSDDEAAERVLRGYLGAAGEKADVRHFKFDAGYREVNWYKNCVAVGLSSGFFEPLEATGIAFAEVSAGMIANLFPWGGDYATSARQFNANMLRRYERALDFIKLHYCISERRDTAFWRDNVADASVPDRLLEMLDRWRFRPPNELDIDGQVDIFTEASWQYVLYGMGWKTDLSAKAGALRYGEDARRAFAEVQRQAAYAIANLPSNRDLVDYAQTHSFGARAAA

SEQ ID NO: 84286 - protein, 538 aa, Burkholderia seminalis
  REGION 1..538: note = tr|A0A103KBW1|A0A103KBW1_9BURK Tryptophan halogenase; OS = Burkholderia seminalis OX=488731 GN=WJ13_00155 PE=4 SV=1
MSNPIRNIVIVGGGTAGWMSASYLVRALQQQANITLVESAAIPRIGVGEATIPSLQKVFFDFLGIPEREWMPQVNGAFKSAIRFVNWRKSPDRAPGDHFYHLFGNVPNCDGVPLTHYWLRKREQGFQQPMAYACYPQTEALDAKLAPCLADGTRQMSHAWHFDAHLVADFLKRWAVERGVKRVVDEVEQVHLDDRGYISSLSTKEGRTLEADLFIDCSGMRGLLINQALKEPFIDMSDYLLCDSAVASAVPADDARVGIEPYTSAIAMNSGWTWKIPMLGRFGSGYVFSSKFTSRDQATADFLDLWGLSDEQPLNQIKFRVGRNRRAWVNNCVSIGLSSCFLEPLESTGIYFIYAALYQLVKHFPDTSFDPRLTDAFNAEIVYMFDDCRDFVQAHYFTTSRDDTPFWRANRHDLRLSDAIQEKVERYKAGLPLTTASFDDSTYYDTFDYEFKNFWLNGNYYCIFAGLGLLPDRSLPLLRHRPESIDKAEAMFARIRREAERLRKSLPTNHDYLRSLREGHAGLSRSQPGPTLAAPEIL

SEQ ID NO: 84287 - protein, 532 aa, Sphingomonas sp.
  REGION 1..532: note = tr|A0A1I5GS71|A0A1I5GS71_9SPHN Tryptophan halogenase; OS = Sphingomonas sp. OK281 OX=1881067 GN=SAMN05428984_3822; PE = 4 SV=1
MSMAGRLTPPRICPGVAAPDGFEAGTQTMANHPLRIVIAGGGTAGWMAAATFARFLETGYEIDLIESDEIGTVGVGEATIPQIHLFNDALGLDEDAFLRATGGTFKLGIEFVDWFKPGHRYMHAFGDVGRDVGLLPFHQYWLRARSLGLAGDLGAYSLNTHAALAERMQRGPARTARTLPSMPYAYHFDAALYARYLRRYSETRGVNRIEGKIVRVTRDGESGDVSGLVLENGTTVAADLYVDCTGFRGLLIEEALGTGYEDWTHWLPCDRAIAVPSARSEAFTPYTRSTAHAAGWQWRIPLQHRTGNGVVFSSAHLSEDEATATLLAGLDTPAMADPRTIPFRTGRRKQMWNRNVVALGLAAGFMEPLESTSIHLIQSAISRLLKLLPGRVIAEADRTEFNRQSDFEYERIRDFIILHYKATARDDTPFWRQCRDMAIPDTLAAKIDLWRGNGHIVREHEELFTEVGWLQVLAGQGIMPAGHHPLADAISTSDLGEFMDTIDKLNAREAGQMQDHAAFVAQHCASPAGLGA

SEQ ID NO: 84288 - protein, 502 aa, Pseudoalteromonas rubra
  REGION 1..502: note = tr|A0A0F4QRF8|A0A0F4QRF8_9GAMM Tryptophan halogenase; OS = Pseudoalteromonas rubra OX=43658 GN=TW77_08620 PE=4 SV=1
MNKKRIVILGGGTAGWMAANLMAKSWQDQPIEIALVESPDIGIIGVGEGSTPQFKGFMDFMGISEAQWMPACNATYKNGIRFVDWSTRPGFSSYFHPFPSQPDDYSAPAFFHNSFVRRKAIDVAGHPDPFFLTTYLAEQAKAPIAAHHFPFEINYGYHFDAGKLGLFLAQTARDLGVEHIQANVSDVRKHPDGDIAALICEAGMEVTGDVFIDCSGFRSLLMQQHLEVGFDSFANNLFNDAAVVLPTEQGEVISSETQSIARKFGWSWHIPLTNRIGNGYVYSRRYCDPDKAETELRTALGLLDSEVEARHLTMKVGQVKKHWHKNCLAIGLSQGFIEPLEATALHIVQETVQSFIECYQDGEFTDKLKTRHNQSLDARYQAIRDYIVAHYRVNSRTDTQYWRDNANNNQLSRSLYDVLQTWVSGKNLSDELHRQDIDKYYPSVSWHCLLAGYGIYPEQSQLIAGNEEANKYDLSQVQDYIARCGLNFENHRAQLERLARMR

SEQ ID NO: 84289 - protein, 513 aa, Sphingomonas sp.
  REGION 1..513: note = tr|A0A0T0PZP0|A0A0T0PZP0_9SPHN Tryptophan halogenase; OS = Sphingomonas sp. Leaf412 OX=1736370 GN=ASG29_03610 PE=4; SV = 1
MVRPGGTGGRRLNESTGRIRRIVILGGGTAGWMTAAALSASFGRTPSITLLESEEIGTVGVGEATIPTIHWFNELVGLDEADFLRATKATFKLGIEFVGWRRPGHRYFHPFGRYGATLPGVAFHHRWLKARADGLDLPLSDLSLATRLAAENRFAKPQGEARSILSTLGYAYHFDAGLYARHLRTRAEERGVTRVEGKLRDVERGDDGRVTALVTERGERLEGDLFVDCSGFRALLIGGAMGSRFEDWSHWLPCDRAVAVPSARVGETTPYTRSTVRSAGWQWRIPLQHRTGNGYVYCSRHCSDDEAAATLLANLDGAALAEPRHLRFTAGTRRAPWVGNVVAIGLSSGFLEPLESTSIHLIQSGIAKLLTLFPDADMDPALAARFNALFSADMDGIKDFLILHYHATQGHDDPLWRECRAMPLPDTLLAREAQYRRSGRIILDADDLFREASWLAVLNGQGIEATDYNPLADALDPATNIAQVRQVADVIARAAPTLPRHDDALAAILGHPV

SEQ ID NO: 84290 - protein, 525 aa, unidentified
  source 1..525: note = Alteromonas australica
  REGION 1..525: note = tr|A0A358E3A6|A0A358E3A6_9ALTE Tryptophan halogenase; OS = Alteromonas australica OX=589873 GN=DEB45_16680 PE=4; SV = 1
MMSEVNRIVIVGGGTAGWLTAGLLAATHSGADNNGQRLSVTVIESDAVPPIGVGEGTWPTMRRTLATIGISEAELVTQASATFKQASKFVNWYSDNGRNQDNSYYHPFSAPQGSATLDITPYWLTTAQTHSHYAQDVCFQPALCDAGLAPKLTANGKQSFTANYGYHLDAGQFISLLRRHCVNRLGVTHLVDKVTQVNTQADSPEAGIVSLQTQQSGKIEGDLFVDCSGFSGLLINKALGVKLKDASHHLFANSALVCQAPFENETAPIPCHTLSTAQEAGWIWDIGLQHRRGTGYVFSREHQDVDRAADTLSRYLSQVAPSMATPDAFREIQFKTGYRETFWHNNCVAIGLSSGFLEPLEASSLMLIEQSAMLLAEQLPANTTIMSKVSQRFNSRLTYLWERTIEFLKLHYVLSNRPEAFWQDNKQRGSIPERLADLLEEWRYRPILDSDFPQANEAFSAQSYRYILYGMGPKTDFNWDMSTTERSLKHHNFATKQGQLNQTLIGQLKERLPSHRGLVESFFQS

SEQ ID NO: 84291 - protein, 513 aa, Sphingomonas sp.
  REGION 1..513: note = tr|A0A1I5C254|A0A1I5C254_9SPHN Tryptophan halogenase; OS = Sphingomonas sp. OK281 OX=1881067 GN=SAMN05428984_0908; PE = 4 SV=1
MHEIQNIVIVGGGTAGWLTAGVIAAKHQGRRPHGFTVTLVESPNVPTIGVGEGTWPTLRTTLKRMGVSETEFFRHCSASFKQGARFNRWTTGAVDDGYYHPLMLPEQFGQVNLAPHWLAEGGDDSFCDTVTPQGRLCDAGRGPKTMTTPEYDGQANYAYHLDAGKFSHFLQRHCCEALGVRHVLADVNEVHLDEGGDIARLDTAQGITIAGDLFVDCTGFAALLIGKAMGVPFRSCSDVLFCDTALAIQVPYDLPDDPIASHTISTAQSAGWIWDIGLPTRRGVGHVFSSSHISVDEAEGELRAYIGPAARDLSVRKLSIRAGHRETFWVRNCVAVGLAAGFLEPLEASAIVLIELSAKMIAEQMPPRREVMDVVARRFNETTTYRWGRIIDFLKLHYALTKRTDTDFWRDNVRPESIPDRLRELMELWLYQSPWLHEEFDRAEEVFPSASYQYVLYGMGARTAIMPGAIEADDALARRARYENQVQTQRLVGSLPGHRDLIDRIVRHGLQPI

SEQ ID NO: 84292 - protein, 509 aa, unidentified
  source 1..509: note = Alteromonas australica
  REGION 1..509: note = tr|A0A350P1N2|A0A350P1N2_9ALTE Tryptophan halogenase; OS = Alteromonas australica OX=589873 GN=DCW74_05615 PE=4; SV = 1
MQNPKKNPIKRVVIAGGGTAGWLTASLMKKVLGEAVNITLVESEVIGTVGVGEATIPPIRLVNQVLGIDEAQFLYETKATIKLAIKFENWKTKGQSYYHTFGAPGKAMAFCHFHHYWLKGQQLGKTQDLWDYDLNYHAAEAGKFAPINAKDPLLELPFAYHFDASLYAKYLRKLSESMGVVRIEGKIGSVERDNVNGYIKALRLDNKNRIEGDLFIDCTGFKGLLIQETLGTGYDDWSHLLPCDSAIAVPSERHESTRPFTRSIAHDADWQWRIPLQHRNGNGHVFCSRYVSEDHALDTLMGNLDTKPLADPKLIKFTTGRRRKQWNKNVVSVGLSSGFLEPLESTSIHLIQSAIVRLIQLFPHNGITPSLEAEYNKQSALEFEQIRDFLILHYSVNERTDSAFFNDMRNLDLPDTLRHKIALFKENGSLFRDQNDLFLESSWLQVMYGQGITPNDYHGLVNTFSDEKLKEMLTRLLKIKREPLSQLPSHDEYLNGMVKRAKQNMSANA

SEQ ID NO: 84293 - protein, 526 aa, Sphingomonas sp.; identical to SEQ ID NO: 83715
  REGION 1..526: note = tr|A0A0Q4J995|A0A0Q4J995_9SPHN Tryptophan halogenase; OS = Sphingomonas sp. Leaf29 OX=1736212 GN=ASE81_12825 PE=4; SV = 1

SEQ ID NO: 84294 - protein, 534 aa, Sphingomonas sp.
  REGION 1..534: note = tr|A0A1I5GZ97|A0A1I5GZ97_9SPHN Tryptophan halogenase; OS = Sphingomonas sp. OK281 OX=1881067 GN=SAMN05428984_4023; PE = 4 SV=1
MRAYVQDEELIVTDGAELTRGRGPLRSIVIVGGGTAGWMAATLLARRLDRQSVTITVVESSDIRTVGVGEATVPGIRDFFREIGVTEQEVMAATQGTVKLGIEFVDWKREGERFFHPFGLYGMRSRGVAFHQYWRKMNAAGHPTPLSDFCLATALAERNLFMPPTDSPVHDLLFFDWAVHFDAGLFARFLAKKAAEWGVRQVDATITDVRVDPATGFVAGVDTQCGKPIDGDLFIDCSGFRSLLLGDALGVPYEDWTSLLPCDRAVAMPCERAGPLSPYTRSTALAAGWQWRIPLQHRVGNGYVYASRNISDDEAVATLKGRLESEALAEPNMIRFRTGRRAAFWKGNCVALGLAAGFMEPLESTSITLIQTGIEKLLALLPDRGFDPALAEEYNRTTGLEYVRIRDFLILHYFANDRQDQPMWDRCRDTALPEGLAHKLRLFKARGHLVRYEWESFQDPSWLSMYAGFGIDAAAHDPLADHFSVSDLEAAFERMKGSIRDAVALAEPHETFLKSFAPATALPAFQAMSLAANG

SEQ ID NO: 84295 - protein, 509 aa, unidentified
  source 1..509: note = Alteromonas australica
  REGION 1..509: note = tr|A0A358DX34|A0A358DX34_9ALTE Tryptophan halogenase; OS = Alteromonas australica OX=589873 GN=DEB45_06320 PE=4; SV = 1
MQNPKKNPIKRVVIAGGGTAGWLTASLMKKVLGEAVNITLVESEVIGTVGVGEATIPPIRLVNQVLGIDEAQFLYETKATIKLAIKFENWKTKGQSYYHTFGAPGKAMAFCHFHHYWLKGQQLGKTQDLWDYDLNYHAAEAGKFAPINAKDPLLELPFAYHFDASLYAKYLRKLSESMGVVRIEGKIGSVERDNVNGYIKALRLDNKNRIEGDLFIDCTGFKGLLIQETLGTGYDDWSHLLPCDSAIAVPSERHESTRPFTRSIAHDAGWQWRIPLQHRNGNGHVFCSRYVSEDHALDTLMGNLDTKPLADPKLIKFTTGRRRKQWNKNVVSVGLSSGFLEPLESTSIHLIQSAIVRLIQLFPHNGITPSLEAEYNKQSALEFEQIRDFLILHYSVNERTDSAFFNDMRNLDLPDTLRHKIALFKENGSLFRDQNDLFLESSWLQVMYGQGITPNDYHGLVNTFSDEKLKEMLTRLLKIKREPLSQLPSHDEYLNGMVKRAKQNMSANA

SEQ ID NO: 84296 - protein, 503 aa, Sphingomonas sp.
  REGION 1..503: note = tr|A0A0W1QJL3|A0A0W1QJL3_9SPHN Tryptophan halogenase; OS = Sphingomonas sp. WG OX=1592629 GN=ATB93_13410 PE=4 SV=1
MASTAPYRIVVAGGGTAGWMAAAALVRFLGAGFTVSLVESDAIGTVGVGEATIPQIRMFNASLGIDEDAFVAATQASYKLAIEFVGWTKSGRYMHAFGEVGRDNGLLAFRHTWLRGMAEGVAEPLAAYALNNVAALGNRMQRGPARTARVLPEMPYAFHFDAGLYARFLRDYAEARGVVRHEGRIEAVARAGEDGNLQALHLDGDRRIEGDLFLDCTGFHARLIGEAMGVGYRDWSHWLPCDRALAVPSARARDFTPYTRATAHGAGWQWRIPLQHRTGNGIVYSSRHLSDDAAAAALLAGLDEPALADPRPLRFTAGRREQCWAGNVIALGLASGFLEPLESTSIHLIQSAIERVLTLLPGARAIAPLRNRYNRQAAQEMERIRDFLTLHYWANDRDEPFWRERREAPLPDGLAEKIALWRASGEIDREDGDLFSDVAWLQVLAGQGIAAEGHHPLADAPPAAQIAEYLDLIAKLNAREAAQMAPHSEFVRAHGAADAEIAA

SEQ ID NO: 84297 - protein, 508 aa, Sphingomonas sp.; identical to SEQ ID NO: 83448
  REGION 1..508: note = tr|A0A0Q4J3S4|A0A0Q4J3S4_9SPHN Tryptophan halogenase; OS = Sphingomonas sp. Leaf29 OX=1736212 GN=ASE81_14710 PE=4; SV = 1

SEQ ID NO: 84298 - protein, 503 aa, Alishewanella aestuarii
  REGION 1..503: note = tr|J1QM61|J1QM61_9ALTE Tryptophan halogenase; OS = Alishewanella aestuarii B11 OX=1197174 GN=AEST_02470; PE = 4 SV=1
MKNTALNQVRRVLIVGGGTAGWMTAAMLARILGEQILLQLVESDSIGTVGVGEATIPAIQHFNAALGINEAEFLRETKGSIKLGIQFENWGRQGDSYMHAFGPVGRQLGMASFHHFWLAAKARGDQSSFWDYSLNYQAAKAGKFNPQSQLPGSPLPGLQYAYHFDAGLYAAFLRRYSEQRGVTRVEGLIAHVEQQPSGDIATVVLTDGRVLAADLFIDCSGLRALLIEQTLAAGYDNWQHWLPCDSALAVPSEARYPIVPFTRSIAHGGGWQWRIPLQHRTGNGLVYSSRFLDDEQAKQTLLTNLDAPALAEPRKISFVTGRRKQQWRHNCVAVGLSSGFLEPLESTSIHLIQSAVVRLVQCFPATRDMVALSAEFNRQSQLEFEAIRDFIILHYHLNQRTDHPLWQYCREMDLPDTLAQRLDLFRQSGQVFRQQDELFTEVAWQQVMLGQNTYPISHHPLAEGLTATQLSGYLSDLQQVVSKTVMALPTHQAYLQNLVGNLS

SEQ ID NO: 84299 - protein, 513 aa, Ideonella sp.
  REGION 1..513: note = tr|A0A523Q8W9|A0A523Q8W9_9BURK Tryptophan halogenase; OS = Ideonella sp. MAG2 OX=2083017 GN=C4K60_05990 PE=4 SV=1
MSTRLNRLVVVGGGSAGWLVAAIVAAAHQPHHARPLSVLLVESAAVPIIGVGEGTWPSMRDTLRAIGLPEDELFTACDAAFKQGSRFDGWVNGQADDSYQHPFSLPEGFGELDLVTAWAQHHAGQSFAELVCPQAQLGPAGRAPKQVQTPQYAAVANYGYHFDATQFGQVLKRHCLERLGVQHLIADVVGLHRDEQGHILSLRTAEHGEVRGDLFVDCTGMASLLLGQYMQVGIVSQQPVLFNDRAWATQVPYPAADSPIATHTVATAQAAGWVWDIGLQSRRGVGYVYSSAHSSDAQAEDTLARYLQATGSPAGNTPRQIRFEPGYRERFWQHNCVAIGLSSGFMEPLEASALAMVEMAASLLSETCPATREDMPVVAARFNEAMRYKWERVVEFLKLHYVLSQRQDSAYWLEHRQAASVPERLAEQLLMWRHRPPSRHDLGRVDEVFPAASYQYILYGMGQRPALGHPQPLSAEVRQALQRCQQLGQRMVAALPSPRELLQHIVRHGQHRI

SEQ ID NO: 84300 - protein, 378 aa, Corallococcus exiguus
  REGION 1..378: note = tr|A0A5C5DLT0|A0A5C5DLT0_9DELT Tryptophan halogenase; OS = Corallococcus exiguus OX=83462 GN=FH620_31580 PE=4 SV=1
MDTLRYDVAVLGGGPAGAALALALCRHSGLRVVLFERSTYAHSHLGETLPPDSRRLLARLGVWEAFARQGHLRSMGSCSRWGDSALGDNDHLRSPWGTGWHLDRSRFDRMLADEALRFGVDVRIGSAVTDWTPLETGGHRLFVPTEGDAPRDFVDARFVVDATGRSAVFATSQGARRHTVDRTSGLCGTFALQPGRAVDALTLVESCEDGWWYSARMPGDQVVFGLMGDKDSLQGLMPEDAEAWRARMERAPETRRRLEACVFTGEPLRAVSANVACLDRLHGEDWLAVGDAACMLDPLSSQGTSHALRTANQAADVVSRYLRGDSAALRLHEVRTRHEFQEHLRIREGYYRLERRWPGAPYWRNRQQSCAPVLSSPP

SEQ ID NO: 84301 - protein, 507 aa, unidentified
  source 1..507: note = Sphingomonas elodea
  REGION 1..507: note = tr|A0A495F2W8|A0A495F2W8_SPHEL Tryptophan halogenase; OS = Sphingomonas elodea OX=179878 GN=C8E52_2437 PE=4 SV=1
MRAAGQPIRSILIVGGGTAGWMAAALLERLLDRQPVTITLLESPDIRTVGVGEATVPAIRDYFRAIGVSEAEVLREAKGTAKLGIEFRDWARPGDSFFHPFGLYGIASRGVGFHHYWLKRRAGGDQTPLADYCLATQMALRGLVMPPAENPPNDLGIFDWAVHFDAGLFARFLARVATGRGVRHVEGTVAAVEQDGESGFLTGVTLQDGSRIEADLFLDCTGFRSLLLGGTLGVPYVDWSHLLPCDRAVAMPCTHGDAFTPYTRSTALAAGWQWRIPLQHRVGNGYVYASAHLSDDEAQAVLRGGLEGQALAEPNFLRFTTGHRARVWEKNVIALGLSAGFLEPLESTSLTLIQSGVERLGNLMPDRGFAPELADEFNRITALEYARVRDFLLLHYWANGRVGEPLWDACRSLALPEELAYKVALFRSRGVFARYEWESFRDPSWLSMYAGFDLLPDRYDPLADHFTDGELEGAFARMREAIGRAMSLAQPHRDFLRDIGGLAGEGV

SEQ ID NO: 84302 - protein, 548 aa, unidentified
  source 1..548: note = Pleionea mediterranea
  REGION 1..548: note = tr|A0A316FG22|A0A316FG22_9GAMM Tryptophan halogenase; OS = Pleionea mediterranea OX=523701 GN=C8D97_111124 PE=4; SV = 1
MSNQLTEQVVIVGGGTAGWLTAAKLAKHLHTSQPANSSQPKAVQVTLIESPDIPTIGVGEGTWPTMRKTLMDLGINESEFMAYCQATFKQGTQFIHWRQEPLASQSENSFDNTLNNTFDNSFDNSNQYFHMFSSALDPADFNLSPYWLAGVAGNDMPFADAVSAQASVCRNGLAPKKIIQRQYDGALNYAYHLDAGKFANFLMTFATEKLGVKLVRANVVSVNQNEQGDIASVVLDSSETIAGDLFVDCSGFKSLLLGEALGVEFVSVDNTLLTDSAVAIQVPYDNEQEAIACHTKSTAQNAGWVWDIGLYNRRGTGFVYSSNHISDDEAEQCLRDYLGERSNKAITQLSAKKLSMNVGYRKQHWHRNCVAIGLSAAFVEPLEASAIFLIEAAGNMLVDMFPADRAAMDYCSRRFNDSLLKRWRKTIDFIKLHYLLSQRQTSFWKDNRMDSTIPESLKERVEHWRFNPVSKYDFDNVFEPFPQESYHYVLYGMGLRHIDSDNNRVPGDLNYAQQSFQEIQKFTEHLLKTLPDHRALLTKVYQYGFQAV

SEQ ID NO: 84303 - protein, 520 aa, Duganella sp.
  REGION 1..520: note = tr|A0A3D9KFG9|A0A3D9KFG9_9BURK Tryptophan halogenase; OS = Duganella sp. GV023 OX=2135490 GN=C7506_105507 PE=4 SV=1
MSSNDVHGGPIRRIVIVGGGTAGWMTAAPLAQRLLRHPTQPCAVTLVESPEIGTIGVGEATLPTIRAYNAALGLDADDFIAKTQASYKLGIEFKDWGHIGNRFFHPFGDFGPPLAGIGAHQHWLRLAQAFNSMPDIENWSVASVMARHGKFTPPNEQTPGMTDAYSYGFHFDASLYAAYLRDYAVTRGVERVEGMIVDVEQHPESGFVTAVKLADGRRLEGDLFIDCSGFRGLLIEGALKAGYEDWSEYLPCNSAQAVPCASVEQLTPYTRSTAKEAGWLWRIPLQHRTGNGYVYSNGFTSDARARQVLLDGLDGAALDEPRQLRFVTGRRRQSWVKNVVAIGLSAGFIEPLESTSINLIETAVGKLVELFPERDCSPALANEFNRVMGGRYESVRDFIVLHYKLTKRNDSDFWRYCADMAIPDSLRHQIELFRETGRVAILDRAGFAEPSFVAMMMGLGAMPKRHDPLAERVDIRAVHGHFAELRDLITQAVARMPDHGAYVAGQAAASAASNHKLREA

SEQ ID NO: 84304 - protein, 501 aa, unidentified
  source 1..501: note = Novosphingobium kunmingense
  REGION 1..501: note = tr|A0A2N0H3H9|A0A2N0H3H9_9SPHN Tryptophan halogenase; OS = Novosphingobium kunmingense OX=1211806 GN=B0I00_3280; PE = 4 SV=1
MTRKDNSIRSIVIVGGGTAGWMAAAALANAIRTGCTITLVESDEIGTVGVGEATIPPIRTFNEALGIDENEFVAATQGSFKLGIQFVNWGKLDHSYFHPFGTYGRNFDFLPLHQYWLAARASGDAPGLDDLCMAWAAAQRGKFCQPSHDQRSVLSTFDYAYHFDAGLYARYLRGYAEARGVTRLEGKVGDVTLDGGSGHVSCVTMQDGRRVEGDLFIDCSGFRGLLIEGALKTGYQDWRHWLPCDSAMAVPCERSGEFTPYTRSIARDAGWQWRIPLQHRIGNGHVYCSSFIQDQAAADVLMANLDGKALADPRKLSFVTGRRNLFWNRNVVAVGLSGGFMEPLESTSIHLIQAAISKLIAFFPDRSFDPLVIEEYNRIAINEFERIRDFIILHYKLTSRTDSELWRYCSAMEVPDTVTWKIEHFRRSGRLMQRDADLFGPPSWLAVHIGQGNQPESADPLLALRGIDHADHLRKLEGALARAAETMPSHADYIAQNCSAS

SEQ ID NO: 84305 - protein, 483 aa, Sphingomonas sp.; identical to SEQ ID NO: 83439
  REGION 1..483: note = tr|A0A0Q4JK88|A0A0Q4JK88_9SPHN Tryptophan halogenase; OS = Sphingomonas sp. Leaf29 OX=1736212 GN=ASE81_12830 PE=4; SV = 1

SEQ ID NO: 84306 - protein, 505 aa, Sphingomonas sp.; identical to SEQ ID NO: 83486
  REGION 1..505: note = tr|A0A0Q4JG05|A0A0Q4JG05_9SPHN Tryptophan halogenase; OS = Sphingomonas sp. Leaf29 OX=1736212 GN=ASE81_12840 PE=4; SV = 1

SEQ ID NO: 84307 - protein, 572 aa, Sneathiella sp.
  REGION 1..572: note = tr|A0A2G1YYV2|A0A2G1YYV2_9PROT Tryptophan halogenase; OS = Sneathiella sp. OX=1964365 GN=COB93_10055 PE=4 SV=1
MGEQISEITIVGGGTAGWLTAAFLIRFMNLRDEETPTKITLIESPNIPTIGVGEATVPTMVSLLASLGISEKEFFKRCNTTFKLGVRFSNWHHDENGQGKSFYHPFETVFSQLAGQNPSYHFHKYGGPPGRPQIDEAFSVCVAAIRNKLAPKGLEHGDYEKHLNYAYHLDAGRFAEFLREISIERGVNHILDDVEEIEQDERGFITALNLQRQGRRPVELVIDCTGFKSVLLNKTLKVPFEDYSKYLLNNRALAVQVPHRDVENIEPCTTSTALGAGWSWRVPLYNRIGTGYVFSTHFRTDEEAMDEFLEHLGEDGIGAEPRAIPVNIGRMERAWEKNCIAIGLSAGFIEPLESTAIYMIDNSVKLLLLNFPDKDFAPSLAKRFNDTTEEMMVDIRDFIILHYCVNNRNDSEYWRVAREEMTVPDSLQTRLEEFKYPLPTTTEFDSTFLFNNVNYTLILSARGYFDGIKYPAERFIARSDWDARARDFDNYEKRLLAKLPNHYQLLRKFRGEEPEPLQGSGVTFGGFNGPMFGSGQASVQPTVQYGTPSLKPSIKFAKKEEEKLDLSESNIL

SEQ ID NO: 84308 - protein, 533 aa, unidentified
  source 1..533: note = Pleionea mediterranea
  REGION 1..533: note = tr|A0A316GHX0|A0A316GHX0_9GAMM Tryptophan halogenase; OS = Pleionea mediterranea OX=523701 GN=C8D97_101225 PE=4; SV = 1
MGKRFNRLVIVGGGSAGWMTAALLAKVTAGQYHITVIESEAIGTVGVGEATIPPIQLFNQLLGIDEAKFIKQTQATIKLGIQFENWNKNGDCYMHAFGNIGRDLGFTHFHHYWLRAHKKGISNNFWDYSFNYQAAKRNLFSKMDRIPNSPLQGLVYAYHFDAALYAKFLRQLSEANGVKRIEGKVCDVTQDSESGYIDALNLESGETIKGDLFIDCSGFKGLLIEQVLNTGYENWSDWLFCDRAVAVPSEKTSPVTPYTRAIAHNEGWQWRIPLQHRTGNGLVFSSDYLSTDEACHRLLTHLDGDALAAPKVIPFTTGRRKKQWNKNVVAIGLSSGFLEPLESTSLHLIQQGITRLIKHLPSNGICNAEVDEYNRQSQYEFEKIRDFIILHYHLNEKTHLNKKSHLNKRSHLNEKSHLNEKLHLNQKNSVNSHQTNQSIWQKSRHMPIPQSLKQKIELFKHTGKLFREQDELFSEVAWHQVLMGQGVVPGSYHPLANMISDEQLSEFLKNLKVIISSGLDKLSSHKMFLDSFD

SEQ ID NO: 84309 - protein, 422 aa, unidentified
  source 1..422: note = Rhizobiales bacterium
  REGION 1..422: note = tr|A0A4Q3H5V0|A0A4Q3H5V0_9RHIZ Tryptophan 7-halogenase (Fragment) OS=Rhizobiales bacterium; OX = 1909294 GN=EOP20_11280 PE=4 SV=1
DFRISVVESSRIPTVGVGEATTAAFRVLLKHFGIDEFEFFRKTDASFKLGIRHEDWRRKGFTYYGPIDDPHQVVQAPPGAPSDYLNVYAVAAGRAVQEMHMFQPLLEQKKAPYALKADGSLIPLGPFHHAYHFDQALVGKFFASKAKGVEKVDALVAGVERDGESGDIRALVLDDNSRLEGDFFIDATGFRKQIIVKALEAPWKSYAHELPVNRALPFWIDVKDGEELPNYTRAWAQSSGWMWQIPTRTRFGCGYVYSDEFSTPEQAKEEVERVLGHEIEVRSDIRFQIGRLEKAWIGNCVAVGLSSSFLEPLESTSIHGTIVQMMLFAQRYMDVPSKISQKAKDDYNERVGRQVDDFRTFVNTHYMTERDDTPFWREVRANRIHPETKERLARWKHEMPRNEHFPNYLGGLPHIETQLHYP

SEQ ID NO: 84310 - protein, 514 aa, unidentified
  source 1..514: note = Novosphingobium kunmingense
  REGION 1..514: note = tr|A0A2N0H6E6|A0A2N0H6E6_9SPHN Tryptophan halogenase; OS = Novosphingobium kunmingense OX=1211806 GN=B0I00_2098; PE = 4 SV=1
MSKGSIQRVVIVGGGTAGWLSASYLAARRPDLAITLIEAPNIPTIGVGEGTWPTMRETLATIGISEAEFLVTCDASFKQGSRFDGWVTGDPGDSYLHPFTLPAGGDMADLLRAWQAGPSGGSFAAAVTPQAAVCAADLAPRQRAMPDYAGTMNYAYHLDAGRFAALLARHAVQRLGVRHIRAEVMGTEPAPNGDIAALRLADGDSIAADLFIDCSGQAARLIEGHFASAWVDRSDVSFNDRALAVQVPVAPDSPIASVTVGTAHQAGWLWDIGLPTRRGIGCVYASRFMADDEADAVLRGYVAAQLPGADLDALNPRRLSFRTGHRQRFWQGNCVAIGLSAGFIEPLEASAIVLIELSLRALADDFPASRSVMDIQARRFDALFRERWERIVEFLKLHYLLSHRTEPYWLAHRDAATVPARLAENLALWRNRPPSWRDFSQAEEIFPAASQQYVLYGMRFALPDSSGLMPSAAVQARLAEVRERARSLAAALPSNRTYFTAAAAASTAPAARTA

SEQ ID NO: 84311 - protein, 494 aa, Colwellia sp.
  REGION 1..494: note = tr|A0A0S2JHP7|A0A0S2JHP7_9GAMM Tryptophan halogenase; OS = Colwellia sp. MT41 OX=58049 GN=CMT41_12890 PE=4 SV=1
MNNHKITKIVIAGGGTAGWMAAASLSKLLGKSFDITLVESDEIGTVGVGEAAIPTLTAFHRLLGINEQAFMKATHATFKLGISFENWKKGDDEYMHGFGRVGKECWAGEFQHFWLHGKQNNIDFGFEHYSPEIQAAKAEKFALAKGGLNYSYHLDASLYAKFLRTFAEAHGVKRIEGKIIDVAKDSKTGDIKSLQLANGNVIEGQLFIDCTGFVGLLIEKALHTGYEDWSHWLPCDSAVAVQTKSVSAPLPYTRSIARESGWQWRIPLQHRVGNGLVFCSKYLADDDAKTLLMNNIEGEPIKQPRVIKFKTGRRRKGWNKNCVALGLSSGFLEPLESTSIHLIMSGILRLIRLFPFEGISPSAVNEYNQQLTTELEHIRDFIILHYHATERADTPFWQYCKNMEIPDSLKQRLALFKETGRIFTAEGELFRVDSWAQVMLGQGVYPEQYHQIAAIMKPHELDKFLSDIRQTIDKAVANLPSHQSFLEQYCRSSR

SEQ ID NO: 84312 - protein, 511 aa, Sphingomonas sp.; identical to SEQ ID NO: 83728
  REGION 1..511: note = tr|A0A0Q4K4K7|A0A0Q4K4K7_9SPHN Tryptophan halogenase; OS = Sphingomonas sp. Leaf29 OX=1736212 GN=ASE81_00070 PE=4; SV = 1

SEQ ID NO: 84313 - protein, 502 aa, Sphingomonas sp.
  REGION 1..502: note = tr|A0A0Q4JR73|A0A0Q4JR73_9SPHN Tryptophan halogenase; OS = Sphingomonas sp. Leaf29 OX=1736212 GN=ASE81_16255 PE=4; SV = 1
MTDNRIRSIVVLGGGSAGWMAAAALATYLGRGVSVRLVESEEVGIVGVGESSVPHMKTFNSETLGIDEREFVMRTNSTFKLGIRFTDWGRIGDSYIHGFGTIGQGLGPLPFHQLWLRRFLAGQAAPLGDYSLQTVAAPAGRFQWDGPPGTPLSDIAYAYHLDAVLYARFLRELAERRGVERIEGKVVDVEQRAESGHVAAITLADGRRVEGEFFLDCSGFRGVLIEQTLKTGYLDWRHWLPCDRAFAVPSATVGPPMPYTEAAARGSGWQWRIPLQHRVGNGHVYSSAHESDEQAIATLLGTLDGQALDVPRQLRFTAGRRAKAWNGNVVALGLAAGFLEPLESTGIYLAQAGIRRLLGLFPGRDFDPALADRFNRETAFEYERTRDFLVLHYKATTRDDTPFWRYCRTMDVPDPLREAIELFRTDGRYFRNGEDFFALPSWVQVMIGQGIMPADYHPIVDAMPEGHLDQYLARVRGEIASTVATMPPHHQFIDHHCKALVA

SEQ ID NO: 84314 - protein, 502 aa, unidentified
  source 1..502: note = Thalassotalea sp.
  REGION 1..502: note = tr|A0A516HG50|A0A516HG50_9GAMM Tryptophan 7-halogenase OS=Thalassotalea sp. PS06 OX=2594005; GN = FNC98_15965 PE=4 SV=1
MAEQKPFHILILGGGTAGWMAANLFANRWRNCDNQKSVKITLIESKDVGIIGVGEGSTPTLKRFFEDLNIPESQWMPACDATYKVNIRFKDWSPQSGIADYSHPFTTQVDTFTKRAFLVNGRTRRMGLDTHTRPDDFLLNGVLANQGKGPLTPDNFPFVMEYGYHFDSGKLGQFLKDKAIAAGVEHKQAHITQAKRSPQGELEAIIDDQGEAYSADFFIDCTGFSSLLMQKALRVPYKSFKSNLFNDSAVVMPSSMDSIIPVETEATALSAGWCWKIPLTSRYGNGYVFSSDFIDNDQAETEFRRHIGALDSEQECRFLKMQVGQLTEHWSYNCLGLGLSQGFIEPLEATALHLVQVSIELFASLLEKGNFSSHYAPEYNKKISERFERVRDYIVAHYKLNTRDDSEYWRANRDNNKLSQSLLSILDCWYQRGDLNEEIERQNLDTHFDAVSWNCLLAGYGTFPPLAPNQPGQGDLYQEKKIQQFLHGCSLNFSDHQSNLRK

SEQ ID NO: 84315 - protein, 483 aa, unidentified
  source 1..483: note = Caulobacter rhizosphaerae
  REGION 1..483: note = tr|A0A561NPP2|A0A561NPP2_9CAUL Tryptophan halogenase; OS = Caulobacter rhizosphaerae OX=2010972 GN=FHW61_103215; PE = 4 SV=1
MTGSPLSSVAILGGGVAGWMAAAALARVLPPACAIRVVETANAAPRGALSTLPALRGFHVLLGLDEAAVMRAARGTFKLGARYGGWTAPDQDHVEGFSDAGANLDGVVFHHHWLRARQRGQAGRYEDYSLAAVAGRLGRFAPPSEDPRSVLSTLSYGLHLDAAGYVAALRSTAGRTEIRAGEIAEVVLAPDGAIAEVVLADGERLAADLFVDTTQDGRLIGATPDGGWIDETAALPCDRLAQREVAPRADPPPLTEFEAVAEGWLRRVPLRGGDAVTLAYASDLTPDDTARAVLGGDAKIVRLRNGRRERAWSGNCLAIGPAASQMESLNGDDAQAIQSGVSRLIALLPTADGSPLAAMEYNRLMAETFDRARDMAVLRYLAATRIDPLWTRARRGAPPAALAYKQAQFESRGRVVLYDEETFVEGAWVGAFLGHGITPRRHDRLADRLPADQADAALARLRGLIRQAALAMPTHADALKDRP

SEQ ID NO: 84316 - protein, 513 aa, Pseudoalteromonas rubra
  REGION 1..513: note = tr|A0A0U3GGR7|A0A0U3GGR7_9GAMM Uncharacterized protein OS=Pseudoalteromonas rubra OX=43658 GN=AT705_04675; PE = 4 SV=1
MQNAETKIKRIVIVGGGTAGWLAANHLAADASEDVSITLVESPDIPTIGVGEGTVPVIVDSLKKFGIRESDMFRLCDATFKNGIHFVGWNKPVNGQPHCYFHPFDDPNVNGVNLLPYWLHQLPGARARFDQSVSIQAHIALENKAPKLITNAEYERMINYAFHLDAGKFSALLSEHAIKNRQVNHVLDEVESVKLALDGSISGLQLRHGGLLEGDLFIDCSGFQSLLLGKALNTPFIDKSDVLFANHAVVTQVPYENEHEVPPYTISTAQQAGWIWDIGLQTRKGVGHVYSDQFMSHEQAHRDLSDYLGKPEDTVESRLIKMQVGYRSQAWVKNCIGIGLSQGFVEPLEATGLLVFDLAARMLSKRLPGERQEIPAIAQQFNQHMTHVWQSIVDFIKLHYCISDRDDSEFWRMNRLPESIPESLQHKLALWRNDIPNEYDFVSSLDVFRLENHLYVLYGMNYPSQCNYPSPQKLSQQEAMLKLVAQQQQKAGAMLETHSNLIAKAARYGFQRI

SEQ ID NO: 84317 - protein, 535 aa, unidentified
  source 1..535: note = Thalassotalea sp.
  REGION 1..535: note = tr|A0A516HDQ1|A0A516HDQ1_9GAMM Tryptophan 7-halogenase OS=Thalassotalea sp. PS06 OX=2594005; GN = FNC98_11360 PE=4 SV=1
MVNSLKHSSSTTAQEQSHATIDKIVIVGGGTAGWLAANHLASQLKPAPEQGMDITVIDSDDIPGIGVGEGTVPMIRQSLQAFGIDEAKFIRECDVTFKQGIKFIDWLDTPRTGQSSYYHHLFDYPLVSEIPDLTAYWLNIPVEQRPSYTDFVAFQGKVCDLGLAPKQITSPQYQGNCQYAYHLDAAKFTRLLQSHAMEHFGVKLIKANVIDVDINDSGEINGLKTDHAGMVKADFFVDCSGFHSILLGKALGVDFVDKQQTLFADKALAVQVPYTQTNEPIPSFTKATAKTAGWIWDIGLTARRGCGYVYSSAHTNEADAENTFREYLGAEHKNAELRQIDMKVGYRDKFWHKNCVAIGLSQGFVEPLEATGLLVFDVTAKMLAQQFPANKALMPLVAEQFNRNVQQSWERVIDFIKLHYFLSRRDDSEFWLDNRNFESLSSTLQERIQRWRWQLPSAYDFSSGYEIFNLENYLYVLYGMEFETDLRQSQYRYHQQDRVQQLQQQLLQHSQQLANLLPEHRQLLDKIQQFGLQRQ

SEQ ID NO: 84318 - protein, 504 aa, Duganella sp.
  REGION 1..504: note = tr|A0A3D9KNA9|A0A3D9KNA9_9BURK Tryptophan halogenase; OS = Duganella sp. GV023 OX=2135490 GN=C7506_10276 PE=4 SV=1
MRDPNNRQPVRRVVICGGGTAGWMAATGIAKVLGKQLDIKLIESEEIGTVGVGEATIPTLTNFHNVLEINEQEFMAETQATFKLGISFESWRNLKEDYIHSFGTTGIDHWTAGFQHFWHKGVQRGLAGDFGDYCLELKASKENRFAHLPNNGMNYAYHLDASRYAKFLRRLSEPRGVQRIEGKIVRYTKHDNGDVRSVVLASGQEIEGDLFIDCTGFRALLIGEAMDEPVEEWSQWLFCDRAIAVQTTAIADAVPLTRSMAHQAGWQWRIPLQHRVGNGIVYSSRYLDEDTARKQLLANVEGKTLIEPRVIKFQPCQRRNTWKGNVVAIGLASGFLEPIESTSIHLIQRSVIRLMQMFPSDGIQQADIDEYNNQCNSEINHIRDFIILHYHANNRTDSQFWIDAREMKIPASLQHRIDLFRETGRVFRVPNELFAENSWIQVMIGQGIMPKSHHSTADLMGDEELKAFLGNIKSRIDRTVVQLPTHQAYVQRYCGRPDEGAKAA

SEQ ID NO: 84319 - protein, 516 aa, Amycolatopsis coloradensis
  REGION 1..516: note = tr|A0A1R0KXU9|A0A1R0KXU9_9PSEU Uncharacterized protein OS=Amycolatopsis coloradensis OX=76021; GN = BS329_11460 PE=4 SV=1
MVIVGGGTAGWLSAAYLNRAFGGKVDITLIESPRIPRIGVGEATVPTLRTTFAFLGMKEEDWMPKTNAVFKSAVRFNDWRKPHEGRDSHTYYHPFFDVPEPAVQNYEKPFHKRFGRGVSLAHFWLKQRLAGDTRVRETFGDAGMALQRLCELNKAPKPLPGTDAPDPGYRYAYHFDAALIAKYLRELATGRGVKFVSADVTSVTVDPRGTIEKVVTDTAGEIEADLFLDCTGFRGLLINKTLNEPFVSANDVLLCDSAVALPARHREGGLRPYTSATAKPDGWIWEIPLADRDGTGFVYSSAFTTPDKAERRLREHLGGRGYDIDGNHIKMRVGHNRRSWVNNCIAVGLSSCFVEPLESTTIALIEYQLALLVLHFPDSDFDERRKARYNELMVGAFEDLRDFIVMHYTLTDRDDTEFWNAVREAPIPASLEEKLTEYAESVIIPDGSQLRLFETRSIWAILSGMDFGFKKAPPSVEKMNDAAAWEMFEKIDKEREIYSAGLPGHREYIEALHRGF

SEQ ID NO: 84320 - protein, 502 aa, Sphingomonas sp.
  REGION 1..502: note = tr|A0A0T0PSF6|A0A0T0PSF6_9SPHN Tryptophan halogenase; OS = Sphingomonas sp. Leaf412 OX=1736370 GN=ASG29_07465 PE=4; SV = 1
MSHSVSHIVIVGGGTAGWLAACRLAAAARPGALAVTVVESPDVPTIGVGEGTWPTMRRTLAAIGIAEADFLRGCDAAFKQGSRFDGWVTGDAGDSYHHPFTAPAGGDPRALVAGWQAGGLPFAQAMGPQPQVAEQDLAPRQRAMPDYAGALNYAYHLDAGKLAVLLRDRALALGVRHVRDHVERVDRTDAGDVAAVATRAHGAIAGDLFLDCTGHAALLIGGAMGVKFVDRSDVLFNDRALAVQVPVAPGSPIASTTNATAHAAGWIWDIGLPARRGVGCVYASAFMDDDTAAATLSAYLGVPDASFRRLTFRSGHRARFWHGNVLAVGLSAGFLEPLEASAIVTIELALDHLIANFPATTDAFPAAAARFNAAFRYRWDRIVEFLKLHYVLSRRTGPYWRAHRDPASIPARLRDLLDAWRHQPPSDADLPDAEEVFPAASYRYILYGMGFPVPPAVAVAVAGAADDPLAQVPQQVRALTAALPTHRAYLDALSRPMERLAR

SEQ ID NO: 84321 - protein, 491 aa, Amycolatopsis coloradensis
  REGION 1..491: note = tr|A0A1R0KUZ0|A0A1R0KUZ0_9PSEU Tryptophan halogenase; OS = Amycolatopsis coloradensis OX=76021 GN=BS329_14110 PE=4; SV = 1
MSAEEFDVVVAGGGPGGSTVATLVAMQGHRVLLLEKEVFPRYQIGESLLPATVHGVCRILGVADELANAGFPIKRGGTFRWGARPEPWTFHFGISAKMTGSTSHAYQVERAKFDQILLTNAKSKGVVVREGCSVDDVVEDGERVTGLRYTDPDGNEREVSARFVIDASGNKSRLYSKVGGTRNYSEFFRSLALFGYFEGGKRLPAPVSGNILSVAFDSGWFWYIPLSDTLTSVGAVVRREDADKIQGDREKALMDLIGECPLISEYLSNATRVTTGQYGELRVRKDYSYQQTTFWRPGMVLVGDAACFVDPVFSSGVHLATYSALLAARSINSVLAGDLDEKTVLTEYEARYRREYGVFYEFLMSFYQMNVNEESYFWQAKKVTKNENTDIESFVELIGGVSSGETALTAADRIAERSAEFAAAVDQMASGDGDNMVPMFKSHVVKQAMQEAGQVQMKAILGEDAEPEMPLFPGGLVASPDGMKWLPYHPA

SEQ ID NO: 84322 - protein, 497 aa, Sphingomonas sp.; identical to SEQ ID NO: 83460
  REGION 1..497: note = tr|A0A0Q4JY02|A0A0Q4JY02_9SPHN Tryptophan halogenase; OS = Sphingomonas sp. Leaf29 OX=1736212 GN=ASE81_02840 PE=4; SV = 1

SEQ ID NO: 84323 - protein, 496 aa, unidentified
  source 1..496: note = Thalassotalea sp.
  REGION 1..496: note = tr|A0A516HG06|A0A516HG06_9GAMM Tryptophan 7-halogenase OS=Thalassotalea sp. PS06 OX=2594005; GN = FNC98_15960 PE=4 SV=1
MQQPIKKLVILGGGTSGWISAALSKKLLGNAIEVELVESSEIGTVGVGEATIPPIKLLNDVLGLNEAEFLRETQGTIKLAIKFENWKNENHSYYHTFGSAGKSMAFCHFHHFLKRAGELDDDSKLWDYDLNALCAEEGKYAHIRHQDPILEMPYAYHFDAGLYAQYLRKFCEKIGVQRTEGTVAKVHQNSQNGYIESLQLKDGSLISGDLFLDCSGFRGLLIQQTLQTGYEDWSHWLRCDRAVAVASKRFEHTLPYTRSIAHKGGWQWRIPLQHRNGNGLVYNSGYYSDDEATELLLGNLDSKAITDPKVIKFQTGRRYQQWNKNVIAVGLSSGFLEPLESTSIHLIQSAVVRLIHLFPHHGINDAMVDEYNKQSKLEFEQIRDFIILHYHVNQRTDSLFWQEMRDMKIPETLAHKIELFKQDGRLFRDQNDLFLESSWLQVMLGQGLVPNSYHPMANAMPESKLKAMLEKIKAIKREPVSAIPSHDEFLKRYCGQ

SEQ ID NO: 84324 - protein, 504 aa, unidentified
  source 1..504: note = Caulobacter rhizosphaerae
  REGION 1..504: note = tr|A0A561MSL0|A0A561MSL0_9CAUL Tryptophan halogenase; OS = Caulobacter rhizosphaerae OX=2010972 GN=FHW61_11870; PE = 4 SV=1
MAHLNKIVIVGGGSAGWICAAMLSHYFQNGPTAVELVESEEIGTIGVGESTIPPFLQLIRTLGINEQEFIQETQAAFKLGIRFENWLEKGDVYYHPFGQIGGPLEVNEFYQCWLRAKQNGHPSKLQDFAPASVMADAGKFMLPAKAQRTMIANANYALHVDARLVALYLRRFAEARGVKRTEGIVTEVVTRPDGGVQKVILKDGREVAGDFFIDCSGFRALLIGKTLGEPFRDWGDVLLCDRAIAVQTENVGAPHPYTLVQAQDFGWRWRIPLQHRSGNGYVYASKYLSDDEATAVLMRQVQGEVVLGPNVIPFKTGVRERPWVRNVVSIGLSCGFIEPLESTALHLIYKGMDYLLRFMPDMDADPILAAEYNRRMVADYEEIRDFIVLHYVTTRRDDTPFWRDYQKVVPPESLRERMALFKAAGVLRDGVDDMFRAPSWQSVMEGMGVRPDRYQQLVDRIPLSVIMNLMDKSAPMLADFVATLPSHEEFLKAHCPAAPFRRSA

SEQ ID NO: 84325 - protein, 508 aa, Colwellia sp.
  REGION 1..508: note = tr|A0A0S2JD48|A0A0S2JD48_9GAMM Tryptophan halogenase; OS = Colwellia sp. MT41 OX=58049 GN=CMT41_03740 PE=4 SV=1
MSSTDKINNIVIVGGGSAGWMTAAMLSKQLECNAKGSKVNITLVESDNIGTVGVGEATIPPIKTFNRMLGIDENDFLKHCNGSIKLGISFENWPKKNHQYFHPFGRFAVDFDYIPFSYFWNKHRASGDNKPLHDYASAWHLAKNNKFSPPSPDKKSLFSGFDYAYHFDASLYANYLRSYSEKRGVKRQEGKITKVDTHESNGFISSVTLASGQNIAGDFFIDCSGTTALLINKTLGIKFIDWSENLLCNRAIAVQTCHTKVISPYTRSITKQSGWQWRIPLQTRMGNGSVHCSEFIDEQSAMDELISDIDGEILSEPRVIHFNVGRREKFWHKNCVAIGLSAGFLEPLESTSLHLIQRAVMRLIAHFPNKKCDEVNTKQFNNLTVTEYEHIRNFIILHYKATKRDDSEFWRYCQHMDIPDSLQHQIDLFSSHGHLNVDANDLFKQDNWLAVLTGQNIHPTTVAPIMAYKQKIDLPRTMNSFYDIMTKTVQKLPNHEDYLKEKCPFLIK

SEQ ID NO: 84326 - protein, 508 aa, Colwellia sp.
  REGION 1..508: note = tr|A0A0S2JEB2|A0A0S2JEB2_9GAMM Tryptophan halogenase; OS = Colwellia sp. MT41 OX=58049 GN=CMT41_03905 PE=4 SV=1
MKIKRIAIVGAGTSGWLAANHLGCELSADAEIEITVIESKDVPTIGVGEGTVPYIMKGLKRFGISEAELLNSCDATFKQGVKFVNWLDPIKHGENYYYHSFDDPYPNGFNVTPYWNSYEGSKSFDDIGVQARISELGLSPKMKNSGEYEGELSYAYHFNAAKFANLLASNAQKRFNVKHQFATIEGIKRCNEGNISHLITADGDELAFDFYIDCSGFSAVLIGKGLAVPFESKAKELLVDTALVQPMPLKADEDINPYTTATAHKAGWIWDIPLTTRRGTGFVYSSKYMSESEALALYAEYLGVNEKDLSPKKLPMAVGYRKEFWCKNCVPLGLAQGFLEPLEATSILLSDFSAELLAKNFPRDSTNIETIAPYFNKVVTYVWERTVDFIKLHYCLSDRTDSDFWLDNQDETFLSAELKERLQKFKLCPPQQSDFFSRFDLFNEKNFLYVLYGMKFETQKTILSDKEIEMSRTILKNNDRLVEQADQHLLKHKDWLMGLKSAMEKSKS

SEQ ID NO: 84327 - protein, 503 aa, Sphingomonas sp.
  REGION 1..503: note = tr|A0A0T0PUZ3|A0A0T0PUZ3_9SPHN Tryptophan halogenase; OS = Sphingomonas sp. Leaf412 OX=1736370 GN=ASG29_13375 PE=4; SV = 1
MTDDRRIRSIAIVGGGSAGWMAAATLARLLGPGYATITLVESEEIGTVGVGEATIPQMRTFNRMLGIDEDEFVRETKGSFKLGIQFVDWGRLGHTYFHPFGGYGVDMAGVSFHAYFLRLRALGEAPSIDAYSLQAMASRGDRFMRSIDAGNSPLSDIAYAYHFDAGLYARYLRRYAEARGVVRREGRIVSVERDGESGNVAGVTLAEGGRVEADLFVDCSGFRALLIGEAMGNDFVDWGHWLPCDRAVAVPCAGRAEMTPYTRSTARTAGWQWRIPLQHRTGNGHVYASAYLSDDEAAATLLANLDGDALADPRLIRFRTGHRAKFWDGNVVALGLAAGFMEPLESTSLWLVQSGLARLLAMFPDRDFDAATTARYNRILTTEFEEIRDFLILHYHATQRRDTPFWRYCADMAVPDRLAEKMRVYAAHGRVFRENEELFNDTSWFAVMHGQLLPVKAHDPVADAMDLATTRARLAEIARAVANSADYMPGHRAFVNEHCRAAS

SEQ ID NO: 84328 - protein, 464 aa, Sphingomonas sp.
  REGION 1..464: note = tr|A0A0T0PVV1|A0A0T0PVV1_9SPHN Tryptophan halogenase; OS = Sphingomonas sp. Leaf412 OX=1736370 GN=ASG29_13365 PE=4; SV = 1
MTAAALAHKLRHMRIAITLIESEAIGTVGVGEATVPHIRAFNAAMGFDEAEFMAATNATFKLGIEFRDWARVGDRYFHPFGLFGEPIDGVPFHHQWLAAGEDAGAFGDYCLPAAMARADRFARPRDGDDYGYAYQFDAAGYAAYLRGVAEARGVTRVEGQIVDVAVDARGHVASVALEDGRRLAADLFVDCSGFRGLLIEETLHAGWDDWRRWLPCDRAWAVPSERAGAITPYTRATALDAGWAWRIPLTHRTGNGHVFASAFVSDEAARAALLAQLDTPALAEPRMLRFAAGKRRRQWVGNTVAIGLSAGFLEPLESTSIHLAQVAIERLLDLFPTGDRDPLDAAEFNRTMDVEYERVRDFIILHYAATERRDTPFWRHVAAMPLPDSLSAKIDLFRARGVVTTYAQGLFMEPSWLAVYMGQRVRPAGHDPRASCDAAALSRIRARVATQVAGMPTHDATLAR

SEQ ID NO: 84329 - protein, 553 aa, unidentified
  source 1..553: note = Unknown
  REGION 1..553: note = tr|A0A285YZL9|A0A285YZL9_9BACT Tryptophan halogenase; OS = bacterium JGI 053 OX=1855372 GN=SAMN05216486_1061 PE=4; SV = 1
MQKIRIVAPPQAPLIENVVIVGGGTAGWMAASYLKKAYPGVEFTLIEAPAIPRIGVGEATIPNLQRVFFDFLGIEEDEWMRHCNAAFKVAVKFVNWRKPASAGVDDHYYHTFGILPTCDNLPLSHYWSHKRLQGFTEAFDYACYKEPPLMDLKLAPRYHDGSRAMIYAWHFDAHLVADFLQKVATGWGVKHVVDQVAGVELADDGSIASIRTAQGRTLRGDLFVDCSGFRGLLINQALGEPFVDMSDHLMCDSAVAHAVPHDDAKNGVEPYTSAIAGDAGWTWKIPMLGRFGTGYVYASRFATEDQAAHDFCKLWGLDEDKTHLNRIRFRVGRNRRAWVKNCVSIGLASCFVEPLESSGIYFIYAAIYQLAKHFPDKALDPVLIDRFNGEIEAMFDDTRDFIQMHYLTTPREDTPFWRANKFDLKISDDVKHKLATYRAGLAVNMPVATEDTYYSSFEAEFRNFWTNGSFYCILGGMGWHPEQAMPSIRYRPDSQQKAEAIFREIKQKAAELRATLPTNHEFLRKLHGRTGDDVRTAAGRHPHGRVPAGAGAG

SEQ ID NO: 84330 - protein, 502 aa, unidentified
  source 1..502: note = Caulobacter rhizosphaerae
  REGION 1..502: note = tr|A0A561NLA7|A0A561NLA7_9CAUL Tryptophan halogenase; OS = Caulobacter rhizosphaerae OX=2010972 GN=FHW61_10462; PE = 4 SV=1
MNSGQQQEIVILGGGAAGWIAAALLAKKTDRQRTRITLVESEEIGIIGVGEATVPVLAQCNAMLGIDEFDFIRRTQGTFKLGIEFCDWGVAGNRHFHAFSDYGHQVEGVSTHHYWLRLRQSGDDSPIDDYSFAYAVAKNNKFEPTDPQNPRYHHAYHFDAALYARYLRDVATELGVQRIEGKMTHVDLDGETGNIAAIHLANGVTVPGDLFLDCTGFASELLGKALGTPFVDWSRWLLCNRAMAVPSKRTGAPTPFTRSTAHAGGWRWTIPLQHRSGNGMVYSSEFWSDDEARDALLGNIDGEPLAEPRLFRFTSGHRKQFWNRNCVGIGFASNFLEPLESTGLQLIVMGVLKLLRYFPDRTIDPVLRDEYNDLSTREIERIRDFIIAHYHLSRRPEPLWLACRDMEIPDSLRHKLDVWKASGQVALGDSESYMEPSWVAILLGNGVVPSRYNISADLYPLEQIRKGMELRREEVMRSAQAVVSHQEFIDLYCKAPQMATAG

SEQ ID NO: 84331 - protein, 144 aa, unidentified
  source 1..144: note = Rhizobiales bacterium
  REGION 1..144: note = tr|A0A4Q3GWE5|A0A4Q3GWE5_9RHIZ Tryptophan 7-halogenase (Fragment) OS=Rhizobiales bacterium; OX = 1909294 GN=EOP21_01530 PE=4 SV=1
MNSELTTAVRRIVVLGGGSAGWLTAATLAAELGGTAPDALQITLIESPDVPSIGVGEGTWPTMRATLHRIGLSEVTLVRECDASFKQGSCFDGWLDGSATDRYYHPFTLPHGQGEADLVGAWLEGGAGSDAAFAEAVSSQPHVC

SEQ ID NO: 84332 - protein, 501 aa, unidentified
  source 1..501: note = Sphingomonas elodea
  REGION 1..501: note = tr|A0A495F2H3|A0A495F2H3_SPHEL Tryptophan halogenase; OS = Sphingomonas elodea OX=179878 GN=C8E52_2580 PE=4 SV=1
MSAPLSHIAIIGGGTAGWMAAAALGRVLDTRAIAITLVESEAIGTVGVGEATIPPIQAFNALLGIDEAEFLRATKGTAKLGIEFVDWRAKGTRYFHPFGIHGIDFGAIPFEALWQRARLADEAAPLEAYSICAEAARLGRFQRPVTSGNNPLTHLGYAYHFDAALYAGFLRDKAEQWGVRRQEGRIVSVERSEDGAIAGVVLEDGTRIAADFYIDCSGFRSLLLGETLGVPFEDWAQWLPNDRAVAVPCTLGAEGRSPFTRSTARGAGWQWRIPLQHRVGNGLVYASAHCSDAEAEAQLLGSLEGTPLAEPRLLRFQAGRRARFWEKNCVALGLASGFLEPLESTSIHLVQAGIARLLEMLPVGGGTPADIRRYNRLMATEFETIRDFLILHFHATARDDTDYWRHLRTMDLPDTLADRIAIYRASGRLYREADELFSKTSWLAVLHGQGIDPSGYDPIADGMPRDEAAARLARIAEVTALAASRMTTHEAFLHESGALQR

SEQ ID NO: 84333 - protein, 504 aa, unidentified
  source 1..504: note = Sphingomonas elodea
  REGION 1..504: note = tr|A0A495EQ51|A0A495EQ51_SPHEL Tryptophan halogenase; OS = Sphingomonas elodea OX=179878 GN=C8E52_4341 PE=4 SV=1
MTGQPSLRVVIVGGGTSGWMTAAALARLLPERCSLHLIESEAIGVIGVGEATLPHIRGFVEKLGIREADFMAWTRGTFKLGIEFRDWGKIGDSYVHPFGTFGRGTGEVDFHHYWTRLRLAGVAVPSLERFSYGCMLARANRFDLPASDPAVIASTYGYAYQFDALLFAPYLRGIAEGLGARRTEGKVVEVLRDGASGNITAVRLDDGQVIEGDLFVDCSGFRSLLLGEALAEPFEDWNHWLPADRAVAMPCRTATSVTPYTSAIAMPAGWRWRIPLQHRTGNGYVYASAFTSDEAAAQALTGAVEGAALANPRVLRFRAGRRRRSWVKNCVAIGLASGFLEPLESTSIYLVQQAITALIELFPEAPDAPIERDEFNRLIDLEYDRIRDFLILHYHATTRTDTDFWTYVRTMTVPDSLAEKIELFRHAGRVVKYREGVFLDASWIAVYVGQGILPEGYDPRADAADPTALLQGMRALEAEIAATVAQVPEHLRYIDRYCAMAAAA

SEQ ID NO: 84334 - protein, 525 aa, unidentified
  source 1..525: note = Alteromonas australica
  REGION 1..525: note = tr|A0A075NVJ1|A0A075NVJ1_9ALTE Uncharacterized protein OS=Alteromonas australica OX=589873 GN=EP13_01165; PE = 4 SV=1
MMSEVNRIVIVGGGTAGWLTAGLLAATHSGADNNGQRLSVTVIESDAVPPIGVGEGTWPTMRRTLATIGISEAELVTQASATFKQASKFVNWYSDNGRNQDNSYYHPFSAPQGSATLDITPYWLTTAQTHSHYAQDVCFQPALCDAGLAPKLTAHGKQSFTANYGYHLDAGQFISLLRRHCVNRLGVTHLVDKVTQVNTQADSPEAGIVSLQTQQSGKIEGDLFVDCSGFSGLLINKALGVKLKDASHHLFANSALVCQAPFENETAPIPCHTLSTAQEAGWIWDIGLQHRRGTGYVFSREHQDVDRAADTLSRYLSQVAPSMATPDAFREIQFKTGYRETFWHNNCVAIGLSSGFLEPLEASSLMLIEQSAMLLAEQLPANTTIMSKVSQRFNSRLTYLWERTIEFLKLHYVLSNRPEAFWQDNKQRGSIPERLADLLEEWRYRPILDSDFPQANEAFSAQSYRYILYGMGPKTDFNWDMSTTERSLKHHNFATKQGQLNQTLIGQLKERLPSHRGLVESFFQS

SEQ ID NO: 84335 - protein, 519 aa, Escarpia laminata
  REGION 1..519: note = tr|A0A497TIZ2|A0A497TIZ2_9BACT Tryptophan 7-halogenase OS=bacterium endosymbiont of Escarpia laminata OX=1221601 GN=DJ030_15220 PE=4 SV=1
MLNKSGDREMNERIDDITIVGGGAAGWLMGLFLTTMLNKGESKVKVTLIESPNIPTIGVGEGTVTGFPRMLQQLGIKESEFLRKSDATFKCAGKFVGWNLDAQGKPITFYNPFNVGGYVGGFETGYYYQKYGNAPGASSFVDSIMPTQMVVENQLGPKLIGAKDYESPVPYTYHLHAHDFSRQIANIAKKRGVVHILDEMVDAEQDENGYITALNLKEKGRVPVKLVIDCTGFSGRILQQVLKEPYNEFGNHLLCDRAIPIPHPHEDPKRLTPCTTATAMKAGWTFDVPLYSRMGTGYVYSSRFISDDEALDELIRHIGDESLRERTPPVIKMRVGRVRNTWVKNVIATGLSAGFVEPLEASAIYTIEMTARMLLTYYPEQGIEQKTVDRFNEVMNRMYNEILSFIVMTYYTSNRTEPFWVAAREDIDLPDRLRENLEMWQSFMPSPHDVEGKFLFSHWNYIYVLLGKGYFEGRHFPAERFLVKSDWTRFSNHIAEVKRQLKQKLPSHYDLLKAIRSGR

SEQ ID NO: 84336 - protein, 514 aa, unidentified
  source 1..514: note = Caulobacter rhizosphaerae
  REGION 1..514: note = tr|A0A561NP47|A0A561NP47_9CAUL Tryptophan halogenase; OS = Caulobacter rhizosphaerae OX=2010972 GN=FHW61_10341; PE = 4 SV=1
MVRPVKNIVVVGGGTAGWLTAGLIAAKHKARQATGFTVTLVESPNTPIIGVGEGTWPTLRTTLAKIGVSETDFFRECDAAFKQGAKFARWTTGAADDAYYHPLMLPQGFSQVNLVPHWLVGGNGRSFCDAVTPQGRLCDEGLAPKTITAPPYQGAANYAYHLDAGKFAPFLQRHCCDKLGVRHVLADVRGVAMTEDGDIRGVVTEQQGEIQGDLFIDCTGFRALLLGEALGVPFRDCGDVLFCDTALAIQVPYETETSPIASHTISTAQSAGWIWDIGLPTRRGVGHVYSSRHISDDDAERELRAYIGPAGRDLPARKIPIRSGHRETFWKRNCVAVGLAAGFLEPLEASAIVLIELSAKLIAEQMPACREVMDIVASRFNATTHYRWGRIIDFLKLHYVLSQRTDTAFWRDNRARETIPDRLADLLQLWRHQPPWLYDEFDRADEVFPAASYQYVLYGMGFRTEVEPEALADERAMAERTLRETAAQTERLRATLPRHRDLIRKIVEHGLQPV

SEQ ID NO: 84337 - protein, 505 aa, Caulobacter sp.
  REGION 1..505: note = tr|A0A258INZ7|A0A258INZ7_9CAUL Tryptophan halogenase; OS = Caulobacter sp. 32-67-35 OX=1970330 GN=B7Y81_11130 PE=4; SV = 1
MADGGLKSLTIVGGGTAGWMSAAMLSRALGSTVAITVVESDEIGTVGVGEATIPAIKLLNTFLGLDENDFLATTNGTIKLGIEFVDWHTVGQSYLHAFGPVGRPLGLAAFHHYWNRRRLQGHDESLWDYSLNALAARAGRFDRLQTAGGGYLEGLAHAFHFDAALYAQYLRRYAEAQGVRRVEGKIVGVSQHPETGFVTGLSLQDGRNVGGEFFIDCSGFRGLLIEETLKTGYDDWRSWLPMDSAIAVPCASVTPLTPFTRATAREAGWQWRIPLQHRTGNGHVFCSDYIDAAQATDVLMRNLDGAPLADPRQLTFTTGRRKRFWNRNVVAMGLASGFMEPLESTSIHLVQSALSRLIALFPNADFNTVEIDEYNRQTALEYEYIRDFLVLHYKATTREDTPFWRACKAMEIPDTLKARIELFAQSGRIFSKEDDLFKEASWVQVLIGQGVLPGAAHPLTGVVTDQQLDEYMANIRQIMGRAVEALPDHADFIARQCAAASRPAA

SEQ ID NO: 84338 - protein, 497 aa, Sphingomonas sp.; identical to SEQ ID NO: 83469
  REGION 1..497: note = tr|A0A0Q4JSK9|A0A0Q4JSK9_9SPHN Tryptophan halogenase; OS = Sphingomonas sp. Leaf29 OX=1736212 GN=ASE81_02850 PE=4; SV = 1

SEQ ID NO: 84339 - protein, 477 aa, Pseudoalteromonas rubra
  REGION 1..477: note = tr|A0A0L0EL62|A0A0L0EL62_9GAMM Uncharacterized protein (Fragment) OS=Pseudoalteromonas rubra OX=43658; GN = AC626_25095 PE=4 SV=1
ITLVESPDIPTIGVGEGTVPVIVDSLKKFGIRESDMFRLCDATFKNGIHFVGWNKPVNGQPHCYFHPFDDPNVNGVNLLPYWLHQLPEARARFDQSVSIQAHIALENKAPKLITNAEYERMINYAFHLDAGKFSALLSEHAIKNRQVNHVLDEVESVNLALDGSISGLQLKQGGLLEGDLFVDCSGFQSLLLGKALDTPFIDKSDVLFANHAVVTQVPYESEHEVPPYTVSTAQQAGWIWDIGLQTRKGVGHVYSDQFTSHEQAHRDLCAYLGKPEDTVESRLIKMQVGYRAQAWVKNCIGIGLSQGFVEPLEATGLLVFDLAARMLSKRLPGERQEIPAIAQQFNQHMTHVWQSIVDFIKLHYCISNRDDSEFWRMNRLPETIPESLQHKLALWRNDIPNEYDFVSSLDVFRLENHLYVLYGMNYPSQCNYPSPQKLSQQEAMLKLVAQQQQKAGAMLETHSNLVAKAARYGFQRI

SEQ ID NO: 84340 - protein, 516 aa, unidentified
  source 1..516: note = Thalassotalea sp.
  REGION 1..516: note = tr|A0A516HDP6|A0A516HDP6_9GAMM Tryptophan 7-halogenase OS=Thalassotalea sp. PS06 OX=2594005; GN = FNC98_11365 PE=4 SV=1
MNQNAVRSITIVGGGSSGWMTALYLNRLYNHQQSHVAIRLIESKDVGILGVGEATVHSIRFFFAAMGLDESELLRETNATLKTGIMFNNWMQPVDGQIHQYYHPFEHQALGNILDISTSWLLRSRHLFERYDQGVSLSAHLMQENHCPKMPDSKPFEGITPYGYHLDASEMARFLRRKAVQAGVEHVEALVNEVKVEQGNVKAVVTDKGEFSSDLFIDCSGFKGLLIEALKQDNWQSFTDELPCDKAVAMQVAYKDGQTPRSYTTATALSNGWAWEIDLTSRRGSGYVYDSRYLDKAEAEHELREHLGSDVEVLKTLHLDMKVGCRKEFWVGNCIAIGLSGGFIEPLESTGLHLINIGAKLLSTHISSTQTAQATRDSYNRLMNGVYDDLKRFIVLHYCLTDRDDTEFWQNAQRSVDYCPLLKQQLQAWQHKTCEYMDLAGGYATTFTDENYRFILYGMGHYPDLHIPYDEASCDQIFQRLNFMSQRALQVTMSHQDFLESVQGAVQDISTPEQAV

SEQ ID NO: 84341 - protein, 504 aa, Brevundimonas subvibrioides
  REGION 1..504: note = tr|D9QNH4|D9QNH4_BRESC Pyridine nucleotide-disulfide oxidoreductase OS=Brevundimonas subvibrioides (strain ATCC 15264 / DSM 4735 / LMG 14903 / NBRC 16000 / CB 81) OX =633149 GN=Bresu_2902 PE=4 SV=1
MADPIKSVLVVGGGTAGWMAAAALNRSLGPHCKVSLVESDDIGIVGVGEATVPPIRDFNALIGLDEAEFMRETRATLKIGIEFVDWGSRGNRYLHPFGTFGPGPTLSEFQQSFLALRAKGRIDDDLDAYSLCAQACKAGKAGARDPDPRSPLNALFTAYHFDAGLYARYLRKVCEGRGVERIEGEIVDVVQRPDDGFIDRVRLKDGRELSADLFIDCTGFRALLIEGALKAGFEDWSHWLPMNRAWAVPCERVGPTTPFTRSTARDAGWQWRIALQHRTGNGHVYCSDFMGDDEARQILLDNLDGPALAEPRPLRFTTGRRKAFWSKNVVALGLSSGFIEPLESTSIHMVQSGIYRLLQHFPDSRFSPVNIETYNRRLGAEVALIRDFVILHYHATQRDDTAFWRHMATMPIPDTLSQRVEAFRDRGLLYQSGADEYFSQGSWLAVMYGQGIMPTGHNPLYDLQNLDQIQAGFGQIARRWTQTVAAMPGHDEFLKASGMWAGAT

SEQ ID NO: 84342 - protein, 495 aa, unidentified
  source 1..495: note = Porticoccaceae bacterium
  REGION 1..495: note = tr|A0A351NZ15|A0A351NZ15_9GAMM Tryptophan halogenase; OS = Porticoccaceae bacterium OX=2026782 GN=DCX08_11430 PE=4; SV = 1
MSQNIKKVVIVGGGTAGWMAAVSMSTLIGRDLEIVLVESDDIGTVGVGEATIPTFFALHQLLKINEAEFLSEVQGTIKLGISFENWKNKGEDYIHAFGYTGKSCWAAGFQHFWLKGKGLGFSEEYSCYSPELMAARQHKFGHLKQNQLNYAYHIDASLYAKYLRRLAERQGVVRQEGKVVEVNQTASGNIQDVVLESGLVIDGQLFIDCSGFSGLLIDKVLRVGFEDWSHWLPCDSAVAVQTESVSPPIPYTRSIARDCGWQWRIPLQSRVGNGLVFSSKYLSDDEAKTTLFNNLEGRALTEPKVIKFRTGQRSKQWNKNCIALGLAGGFLEPLESTSIHLIQRGIIRLMQMFPQTEITNADRDEFNRQMSNEYEFIRDFIIMHYHVTERDDTAFWHYCRNMEIPESLDHRIRLFKESGRVFQAEGDVFGENSWTQVMLGQGLMPEQYHPIVDMMSDPELQHFLKSIKASVDNVVGQLPAHQAFLNAYCPAKLAE

SEQ ID NO: 84343 - protein, 510 aa, Sphingomonas sp.
  REGION 1..510: note = tr|A0A0T0PYD6|A0A0T0PYD6_9SPHN Tryptophan halogenase; OS = Sphingomonas sp. Leaf412 OX=1736370 GN=ASG29_00870 PE=4; SV = 1
MTDAPPLRIVVLGGGTAGWTAACLIAKAWPRARVTVVESPAVGIVGVGEGSTPQMRDLFRGLGIAEGDWMPAADATYKAGIRFDGWGGEGSYFHPFPSAIDRHTQAQFHHNTLARRRGADVDAHPDRFFLTARIAADARAPVTPATFPFDIGYGYHFDAHKVGQVLRDHAVGLGVVHLSRHVASIALADDGDVAALVLDDGERVAGDLFMDASGFRSLIAQQALGVRFRPFAENLFCDSAVTIPTPRPHPSAASPLPPSPTGRGKLEVHTTATALSNGWAWRIPLTSRTGNGYVYSSAHISPDAAETELRRHLNVVDDVPARHLSMKVGRVETTWTRNCVAIGLAQGFIEPLEATALHLTQVAVEGFVESYAAGGFTPAHRDAFNARIARRYEGVRDYIVAHYRLNRRGDTDFWRDNAANERLSDDLKAIMTAWFTGGDVAVLLGQRDLARYYSPMSWEVLFAGYGTFPDPGRLRATADAVDLPGIDRLLDGCVLNLPDHADALSALRSP

SEQ ID NO: 84344 - protein, 503 aa, Sphingomonas sp.
  REGION 1..503: note = tr|A0A0T0PSA6|A0A0T0PSA6_9SPHN Tryptophan halogenase; OS = Sphingomonas sp. Leaf412 OX=1736370 GN=ASG29_07480 PE=4; SV = 1
MTDQNPRTPRRIVVAGGGTAGWMAAAAIARTMGRTVSVTLVESEAIGTVGVGESTIPPLVTYNRLLGIGEAEFMRATQATFKLGIRFDGWRTPDSTYFHSFGTTGKDHWSAGFQHFWRHGAAMGHDQPYDDYCLELRAAEAGKFAHLPDDRMNYAYQLDSSLYAAFLRRMAEADGVRRVEGKIAAVDLHGESGDVASLTLESGERIEGDLFLDCTGFRALLIEGALHAGFDDWTHWLPCDGAIAVQTESVGPAVPFTRATAHDAGWQWRIPLQHRTGNGIVFCGRYLSRDAALERLLANVQGKVLTTPNHIAFTTGARRKQWHRNVVAIGLSGGFMEPLESTSIHLIQRAIIRLIRMMPAGDISPRDVAEFNDQQAQDMEQIRDFLILHYHVTDRRDSPFWRQCAAMDVPDTLRQKIELFRETGRVFRRNEELFAENSWVQVMIGQGIVPRSYHPVAAKLRDAELDRFLGGLRDDVARTVAGLPSHAEYVAHYCGAATPAQAA

SEQ ID NO: 84345 - protein, 511 aa, unidentified
  source 1..511: note = Caulobacter rhizosphaerae
  REGION 1..511: note = tr|A0A561NSN6|A0A561NSN6_9CAUL Tryptophan halogenase; OS = Caulobacter rhizosphaerae OX=2010972 GN=FHW61_10276; PE = 4 SV=1
MLTETSRENGPLRRIAIVGGGAAGWMAAAALARVLGPQGPAITLIESEEIGIVGVGEATIPPIRAFNAMIGLDEDVFVRETKGTFKLGIEFVDWRRPGHRYFHPFGVYGPDFGPTPFEGAWRRLRQAGLGQSLETYSICAQAAAAGRFARPQPGAGPLSQLAYAFHFDAALYAKLLRAHAEAAGVVRREGKVAAVNLRSGDGFVEAVTMEDGERIAADLFLDCTGFRALLIGQALDSPFEDWSRWLPNDRAVAVPSANAGPPAPYTRSTARQAGWQWRIPLQHRTGNGYVFSSRHVSEDEATATLLANLDGEALAEPRVLRFQAGRRPAGWVRNVVALGLAGGFLEPLESTSIHLIQVGIARLLEMLPTRGFEPADARRYNRLMAAEFDSVRDFLILHFHATERNDTPYWDQLRTMAVPDTLLERLRIYRATGRVFRESDELFTKTSWLAVMDGQGPPVEGCEPLAEGLPLDQVEARLARIATATAQAVQQMPSQAEFIRAHGQAAARIAV

SEQ ID NO: 84346 - protein, 507 aa, Novosphingobium pentaromativorans
  REGION 1..507: note = tr|G6E7N0|G6E7N0_9SPHN Tryptophan halogenase, putative OS=Novosphingobium pentaromativorans US6-1; OX = 1088721 GN=NSU_0365 PE=4 SV=1
MTQTRFSIVIVGGGTAGWMSAAALARFAPPGYAVTLVESEAIGTVGVGEATIPAIRLFNKALGIDEAQFLRETSASYKLGIAFDGWLGEGHSYMHAFGTVGRPLGLLPFRHYWARAKAAGNAKPLAHYAANELAARTGRMATGVSGPGIPELPWAYHFDAGLYATFLRRLAQSMGVTRHEGRIARVIRKDEGDIAAVQTEGGQTLAADFFIDCSGFKGLLIEEELQTGYEDWRHWLPCDRAVAAPCEAAGPFTPYTRSIARSAGWQWRIPLQHRIGNGLVYCSEYLSDEAATESLLASLEAPAQADPRLLRFTTGRRRKAWNRNVLAVGLASGFMEPLESTSIHLIQSTIMRFLTVLPCGPASPAIVSAFNRRTAEEFECIRDFLILHYKANARAGEPFWDRCRDMAVPDSLAARIAEFEEACQIQPAGDELFQEAAWLQVMAGQGIEPKGWNPIADALSEEDLAGFLGAVEQACLQTVGPMPRHMDFLAATCASALSSSPELETLP

SEQ ID NO: 84347 - protein, 497 aa, unidentified
  source 1..497: note = Porticoccaceae bacterium
  REGION 1..497: note = tr|A0A2E0EVK3|A0A2E0EVK3_9GAMM Tryptophan halogenase; OS = Porticoccaceae bacterium OX=2026782 GN=CMK34_05600 PE=4; SV = 1
  VARIANT 339: note = Xaa can be any naturally occurring amino acid
  VARIANT 372: note = Xaa can be any naturally occurring amino acid
  VARIANT 382: note = Xaa can be any naturally occurring amino acid
  VARIANT 393: note = Xaa can be any naturally occurring amino acid
  VARIANT 399: note = Xaa can be any naturally occurring amino acid
  VARIANT 418: note = Xaa can be any naturally occurring amino acid
  VARIANT 428: note = Xaa can be any naturally occurring amino acid
  VARIANT 447: note = Xaa can be any naturally occurring amino acid
  VARIANT 462: note = Xaa can be any naturally occurring amino acid
  VARIANT 464: note = Xaa can be any naturally occurring amino acid
  VARIANT 469: note = Xaa can be any naturally occurring amino acid
  VARIANT 471: note = Xaa can be any naturally occurring amino acid
  VARIANT 483: note = Xaa can be any naturally occurring amino acid
  VARIANT 492..493: note = Xaa can be any naturally occurring amino acid
  VARIANT 495: note = Xaa can be any naturally occurring amino acid
  VARIANT 497: note = Xaa can be any naturally occurring amino acid
MTKQNVKKVVIVGGGTAGWMTAASLTKLIGRDLDVTLVESDEIGTVGVGEATIPTFFALHQLLKINEAEFLSEVQGTIKLGISFENWKDKGEDYIHAFGYTGKSCWAAGFQHFWLKGKELGFSDEYSSYSPELMAAKANKFGLLKQNPLNYAYHIDASLYAKFLRRIAEKSGVTRQEGKIIAVNQSSDGSIKSVDLESGVTVRGDLFVDCSGFAGLLIDKTLGTEFEDWSHWLPCDSAVAVQTASVAPPIPYTRSIARDFGWQWRIPLQSRVGNGLVFSSQYLSDEDAKKVLLDNVEGKILTEPRVIKFRTGQRVKQWNKNCVSLGLAAGFLEPLESTXIHLIQRGIIRLMQMFPLAGITDADRDEFNRQMXDEYYFIRDFXIMHYHVTERRXTEFWRXCREMAIPDSLDHRLRLFKXSGRVFQGEGXVFGENSWTQVMLGQGLMPXQYHPIVNMMSDSELXGXLQSNXAXVDHVINQLPSHXQFLSQYCPXXLXSX

SEQ ID NO: 84348 - protein, 534 aa, Sphingomonas desiccabilis
  REGION 1..534: note = tr|A0A4Q2IMF4|A0A4Q2IMF4_9SPHN Tryptophan 7-halogenase OS=Sphingomonas desiccabilis OX=429134; GN = EO081_15080 PE=4 SV=1
MNEHTIRNVVIVGGGTAGWMAAAAFSRFLNNGVTRITLVESEEIGTVGVGEATIPPLLTFNRMLGINENDFIRETGGTYKLGIEFDGWGEIGERYFHPFGSHGHDLGGVHFHQLYLRERKRRVMQDISAWSMSAVAAQAGKFARPAEGAQSAVKELLYAFHFDASLYARFLRRYAEAGGVQRIEGKIAEVAVRPDDGHVAALKLDNGQTVDGDLFIDCSGFRGLLIEEALETGYEDWSRWLPCDRAVAVPSRYAGDPDPFTRATARGAGWQWRIPLQQRMGNGLVYCSDFMTAEAAERELLANLEGEPLAEPRHLSFVTGRRKLGWNRNVVALGLSSGFVEPLESTSIHLVQSGIAKLIALFPDRRFNPVERDEYNRQMRDLYEDVRDFVILHYKATRRRDTPFWDRCRTMDVPETLQRKIDLFRAKGRIFREAAELFATTSWVAVCLGQHIVPEEHEPAADALDEDKVAGALEQMRQGYLQVAAQLPTHGDFLRHTGASLANAPAPPQPAEVPGEPSFSFASEKPFNFSANPL

SEQ ID NO: 84349 - protein, 497 aa, Sphingomonas sp.
  REGION 1..497: note = tr|A0A0T0PW08|A0A0T0PW08_9SPHN Tryptophan halogenase; OS = Sphingomonas sp. Leaf412 OX=1736370 GN=ASG29_13385 PE=4; SV = 1
MIAAPIRDLVIVGGGTAGWMMAAAAALYLNDGRRRITLVESEAIGTVGVGEATIPPIRDFNAMLGIDERAFLAATGGTYKLGIAFDGWGAPGDSYVHPFGRMGRDFNGIDFHMAWLKHRAAPGVGPLGDYWMAQVAARGARFQHPATDPNTPTGQIAYAFHFDAARYAAFLRERAEAGGVVRVEGKVAGVARDPATGHVATLVLDDGRRIDGDLFVDCSGFRSLLLGQEMGVPFVDWRHWLPCDRAVAVPSERRDPLVPLTRATAHDAGWRWRIPLQHRTGNGVVYSSAHLSDDDAGARLLAALDTPATDTPRTIRFATGRRARSWEGNVVALGLSGGFLEPLESTSIHLIQSGISKLLALFPDTGFAPVLRDEYNRLMGAQYDAVRDFVILHYHANGRVGEPFWDALRDMAIPNTLATRIALFREKGRVLRYDDDLFSIASWVAVLLGQGVMPRGYDPMVDALDDGAVVAALRGLRASYAQAAGAMPDHADYLRRM

SEQ ID NO: 84350 - protein, 524 aa, Duganella sp.
  REGION 1..524: note = tr|A0A3D9KWU0|A0A3D9KWU0_9BURK Tryptophan halogenase; OS = Duganella sp. GV023 OX=2135490 GN=C7506_1011096 PE=4; SV = 1
MKTLPKDGVKQVLIVGGGTAGWLTACFLAKQLGTGADAGSVRITLVESKEIGIIGVGEGTFPSIRGTLATIGIDEARFIRECNGTFKQGIRCNHWVREPGAAGADHYFHPFSLPSQRPGGPELLPYWLQGAAGPGVAFAAAATMQKRVADASRAPKRPADPDFNGPLNYAYHFDAGKFAALLCTHAQSLGVQHVQATVERVALDDDGAIGAIHTKEAGVLTADLYIDCTGFRAALIGEALGTSFRNINDVLFVDRALAMQVPYERPDAPIPSYTIATAHEAGWTWDIGLHQRRGIGYVYSSRHTDDTRAEEVLRGYIGKAADGLNPRQLKLNVGYREQHWVKNCVAVGLSGGFLEPLESSGIGLIETAAYLVSYLFPHDGDFEPVAKVYNEMMKARYERIVDFVKLHYCLTQRKDNAFWTDNADAASIPDSLRDKLAMWRKRAPHRMDFVVDYEMYPPSSWQYVLYGMEYPTDLYANAKTLPRMEEARKEFAMIEQVSHRALADLPDHRAMVEHLLQRGERKIA

SEQ ID NO: 84351 - protein, 497 aa, unidentified; identical to SEQ ID NO: 82350
  source 1..497: note = Mycobacteroides sp.
  REGION 1..497: note = tr|A0A0R3ICH3|A0A0R3ICH3_9MYCO Tryptophan halogenase; OS = Mycobacteroides sp. H001 OX=1720565 GN=AOT83_22510 PE=4; SV = 1

SEQ ID NO: 84352 - protein, 508 aa, Duganella sp.
  REGION 1..508: note = tr|A0A3D9KUB5|A0A3D9KUB5_9BURK Tryptophan halogenase; OS = Duganella sp. GV023 OX=2135490 GN=C7506_101470 PE=4 SV=1
MQPLKDIVIVGGGTAGWMTAAALSKMLKGQYNIKLVESDQIATIGVGEATIPMINLFNRMLDLDEDDFMRQTQGTFKLGIEFVNWGRIGDRYVHGFGVIGQDGWTVDFYQHWLQQYLAGKASALEHYSINNVAAMHNKFTRARPELGNSPLSQIVHAYQFDASLYARFLRNFSETRGVQRVEGKITQVRQRDADNHVTAVVLENGTVIAGDLFIDCSGFRALLIEGAMNTPFEDWSHWLPCDAAIAVPCANGPELTPYTRATAHGAGWQWRIPLQHRIGNGHVFSSKFMSADEAQSILMNNLDGEALAEPRTIRFRTGKRSKAWHGNVVSIGLSCGFIEPLESTSIHLIQMAIAHLISYFPSGGFDAADIRQYNRVMDEEYRWARDFVILHYKATERDDTRFWNYCRQMEVPEDLQHRIDLFRSHGRVFRDGLELFTQHNWLQVLHGQRVRPRASHPLVGLTGAAQIDGLLKEVESVIRNCVGAMPTQAAFIAAHCAAPIIKTEGRNQ

SEQ ID NO: 84353 - protein, 493 aa, Sphingomonas sp.; identical to SEQ ID NO: 83464
  REGION 1..493: note = tr|A0A0Q4K6R2|A0A0Q4K6R2_9SPHN Tryptophan halogenase; OS = Sphingomonas sp. Leaf29 OX=1736212 GN=ASE81_00085 PE=4; SV = 1

SEQ ID NO: 84354 - protein, 516 aa, Streptomyces sp.
  REGION 1..516: note = tr|A0A4Q6IGK9|A0A4Q6IGK9_9ACTN Tryptophan 7-halogenase OS=Streptomyces sp. F001 OX=1510026; GN = StrepF001_26090 PE=4 SV=1
MVDKVVIVGGGTSGWMSASYLKAAFGDRISVTVVESDRVPTIGVGEATFSTVRHFFEYLGLKETDWMPACNATYKLGIRFENWSEVGKHFYHPFERLRVVDGFPLTDWWLKQRPSDRFDVDNFVMAQLGDTLRAPRFLDGTLFERGSSELGPGGAAFRSTLTEQDTQFPYAYHFDAALLAKFLTEYGVSRGVRHVTDDVVDVKLDDRGWISAVATRGHGDLEGDLFIDCTGFKGMLLNGALEEPFVSYQDTLPNDRAVALRVPVDTAVKGIAPYTKASAMEAGWIWTIPLFDRIGTGYVYASEYTTPEEAERTLREFVGPEAEGLEANHIRMRIGRSRNSWAKNCIAIGLSSGFVEPLESTGIFFIQHGIEQLVKHFPQADWSEQLRDSYNRAVNNCMDGVREFLVLHYRGAARSDNAYWKDAKTRKVPDALQGRLEQWQTKLPDAENIFPHYHGFEAYSYVAMLMGLKGIPLRAPGALDLMDGSAAAEEFARVRSTSSELVRSLPSQYEYLAQMH
